United States Patent Application Publication US 2019/0348154 A1 - sequence listing, part 79

SEQ ID NO: 298325 - DNA, 1581 bp, Proteus mirabilis
ttgatcccggacgtatctaaagcgctttcttggttggaagcccatcctaaagttttatgtggtatccaccgtggtatagagcgagaaaccttaagagttactcctgatggtcatttagcggctacaggacaccctgtcgagctaggtaagtcactcactcacaaatggatcacgacagattttgctgagtctctgttagagtttattactcctgttgacgataatattgatcacaccttacattttttaagtgatttgcatcgctatacggcacgtcatttaaccaatgagcgtatgtggccgatgagtatgccttgctttattgaagccgaagataaaataacattagcgcaatttggtacctctaatgttgggcgttttaagacgttatatcgtgaagggctgaaaaatcgttatggtgcgttaatgcaaactatttctggtgtgcattacaatttttcgttacctatcgaattttggcaagcgtgggcaaatatcaccgatgaagaaacaggtaaagaggcgatttcagacggttatttacgtttgatccgtaattactaccgttttggttggataattccttttttctttggtgcttcgccagctatttgtggttcattcttaaaaggtcgaaaaaccaatttaccctttgaaaatacccctaaaggcgcaaaatacttaccttatgcaacttcgttgcgcttaagtgatttaggctataccaataagtcacagagtgatttagatattacttttaatcatctagagacttatgtgaaaggtttgaaaaaggccattcataaaccgtcagaagaatttgctaaattaggtgtaaagaaagacggtaagtatattcaattaaatactaacgtattacaaattgaaaatgaattatatgcgcctattcgtcctaaacgcgtagtcaaaggggatgaatcaccttctgatgcattattacgtggtggtatcgaatatatcgaggttcgctcattagatatcaatccatttacgcctatcggcgttgatgaaacacaaatccgtttcttagatttattcttgatttggtgtgtattagcggatgcaccagaaatgaatgcagaagaattggcctgctgtcgtgcaaattggaataacgttattctagaagggcgtaagccaggtcaagttattggcatgggttgtggtgaaagaaaagagccattagcacaagtggggaaagcgctttttgctgacttacagcgcgtagctaaggtattagatagctgttctggaactaaatatctagaagtttgccttaagttagaggaaatgtttgataatccgcaattaactttctctggcagattattagaaaaaattaaagcacagggtattggcggttatggtctatctttagctgaagaatatcatcaacaattaatcaataccgcttatgaagtgttaacagatgatgcttttgaacatgagagaatttcatctattaaacgtcaggcagacttagaaaagagtgataccatttctttcgatgaatatttgaagctccatgctgggccaaataatgatggtgtggcttcttaa

SEQ ID NO: 298326 - DNA, 408 bp, Proteus mirabilis
atgaaaccaatcactaaacgaactcaacgagattattctctcgcttttaaattacagcttgttgaccaagttgaaaaaggcgaaatgacatataaacaagctcaagatcactatggtatacaaggatgttctacggttttggtttggcttcgtaagcatggtagattagattggtcgaatggtacccctgatactttttatcgaggctcagctatgacccaatcttctgaacagcaaacacctgaacaacgcattaaagcccttgaaaaggaacttgaagaagctcggcttaaatctgatttctttgaagccgttgtcaaagtcatggatagagacttcggagttcgtttatcaaaaaagcgcaaagccgagttattaaagaaaaaacggtcaaaaacctcaccgtaa

SEQ ID NO: 298327 - DNA, 798 bp, Proteus mirabilis
ttgtcgctttatgcacagatcagccggcaagcttattacaaaagacaggacagggttgaggaacgaaagaaatccgatacggtcattattgatgctgtaaaatctgaacgagccttgcaacctagattaggtgggcgcaaactccattttattttaaagaaaaaacaaatgtttattggtcgtgaccggctgttttctttattgaaagagcatcggttactggtgccaaataagcgggcttatcatcggacaaccttaagccatcatcgttttcatcgtcaccccaatttaattaaatcggaatttattcctacacaaccagagcaactatgggtcgctgatattacctatttatcgactcatgaaggtgatgcttatttaagtttaattacggatgcatattcacgaaaaatcgttggatatcatttagatgacaatatgaaaacaagctcagtgaagaagtcgttggtacaagctttaaaaaaacgccgtttaacaacatcgctgatccatcattcagatcgcggggtacagtattgttcctcagagtatcaagaggtacataaaaggcatagtattcaatgttctatgactgatggctatgattgctatcaaaatgctttagctgagcgaattaatggaatattgaaaatggagtatctactgataaaaccgaataatctagagcaagcgagaaagttagttgaagaatcaatacagttatataatgaaaaacgaccacacttgtcattaaactataaaacgcccgatgaagttcatcgagcgttttatgcctga

SEQ ID NO: 298328 - DNA, 135 bp, Proteus mirabilis
atgataatttgtcctgtttgtggtcatgccgcgcatactcgtagtagtcaacaaatattttccgataccaaagaacgttataaccagtgccagaatatcaattgtggcgcgacgttcatcagccatgaaacgtaa

SEQ ID NO: 298329 - DNA, 219 bp, Proteus mirabilis
atgagacaaagtattcctactcatttgtataaatataaaagttttagtgttgattgtcttgacctacttgtaagtgatgcgctgtattttgcagacccaacaacatttaatgaccctttagattgtaatccttcaatcctgaacaacatagaagacattgataaaattagagagtctgttattgagaatgcaatatcaacaaaacaaacccaaagatag

SEQ ID NO: 298330 - DNA, 228 bp, Proteus mirabilis
atggtatatctctctccagcttccaatgcactttcacgtccgtgtgccacagcattcctcctttctcgtaaagtattaactcgacctattgacgcaggagatactgaaaaattaggcgcgccaaacagttttagaacccaagacattgtattagcatcaacattttgcaaactttccgctaaaggattatcagttatctttaaggctgtttcactgaaggttgcttga

SEQ ID NO: 298331 - DNA, 1044 bp, Proteus mirabilis
atgaatttttcagaagtacttgcagaaatacaaaaagaaagaagatctgttggatttgatacttacgacataacgatcaaacaactagtagatatgattgctgaaaataatataaacgtttctccagactatcaacggcgttttgtgtgggacgcagtcagacaatcacaattaattgaatcaatttttcttggcattcctatcccaaacatttttatggcaactaatttagattcttcttgggaagtaattgatggactacagcgtataacaacaattcttcgttttgtttcacatgaacacgctgttattgatggtaataatttaggtgcattaaaattaaaaggtttagataaagtttcatctcttaatggtgcattatttaatgatatgccaagtaaccttaaacttaactttttgactagacctcttcgcatcaccgtcctcaatgaccaaagtgattttcaagttcgattcgatttatttgagagattgaatactggaggtattatacttcatgatcaagaaattcgtaattgtgtttttcgtggacgattttccgagttcgttaaagaatgtgtaaacaatatcgattttaattcagtaattaaacgaagtgacaaaaatggtagaggtaacttagaagaattggtattgaaatttttcgcatattatgaagaaagagagttattcaaacactctgttaaagaatttctaaatgactatatggagaagaaaacaaaatcatttacaaatgagagtacgctacgggatatatttcaacaaacatttgtaacccttaacaatgctcttcctaatgggatcgtacgtgcaaatcgattaaattcaacgccattagttctattcgaagctatttccattggtgtagctgatattctttcaatgcatcaacaagttgattctcaagtactagtcgagttacttgaaaacaccacacttaaggagctaacaacaggggcaacaaatagcctgccaaaacttactggaagaataaattttgtatctcagcgagcggtaatatga

SEQ ID NO: 298332 - DNA, 1431 bp, Proteus mirabilis
atgtcggggagtcagtataaaaaggaagatgcgagctggggaatgctacttaaaggacgaaatagtctaaaatcactcgctttagcagggggagtggcattacatgctattaatgtctatatcaccattaccaccctaccttctattgttcgtgatatcggggggcttaatttatatgcatggaataccaccgtttttattttggcatccattctctcttcggcgctaacttctcgtttattaattttgctcgcgccacgtaatagctacttatttgccacactctgctttttagtcggctctattatctgtgctaccgccccttcaatgccaatcttgttggttggccgatttattcaaggtgcgggaggcggaatgttactggctttagcttattcattggtcagggtgatgtttccgcaaccattatggtctcgagctatggcgttaatgtccagtatgtggggaatatcaacgttgctgggtcccgcattaggaggaatatttgcagaatataatatttggcggggtgctttttggtctattctttgtgtaggcattccttatgctattctactgtttactatccttcctaaggaaaacagtgctgatattgctaacaaaaaaacatcacttccctacctacaacttaccttattaatattagcagtgttatctatctcaatcggtagcttgtatcacgttacgctatatcatattttatcttttctattagcaattatttttatcttattattaatttatatcgataagagatctcatgatgggctttttcctaaaggaacattctctttttcagccccactatcccctatttatctgactatggcattgctaggaataagtgttcagacagaagtgtttgtgccctattttttacaaatgatccatggtattactccgttactttccggttatttagctgctttagtcggtgctggttggtctttttcggctattatctcttcatctcaaccaagcggtattgctcagcgtcttatgcgtatcggccctgccattaactttactgccataattgttcttggcttattaatttcaaattatctccttttaccttatgggcaagtgattattatttgtctagccctcttttttacaggtgcaggaattggcatggcttggcctcattatctcactcgtgtattacaggtttctcaaggggaagaagcgcaaaaagcggcgacgtcaatcaccactattcagctattttcaaccgctgtaggtgctgccatttcaggtactgttgtaaatatggcaggattaaccaaccccggaggtattgctggcgcacaaaatgcagcccattggttatttattgtattttctattaccccactgattgcatttattactgcaaaaatcgttgtttccaatataagaaaacattaa

SEQ ID NO: 298333 - DNA, 1266 bp, Proteus mirabilis
atgaaattaagaaatgcaataataattggcgtaatatacacaccatcaatatgccaggccgtagaacaaactaactataaatattattctgatcatatttctattaatcaagactcttcaacaatagttaaacctaatgaatttaatcctaaacaagcagaaatattaatagcaccaaaaaattccaaaggtatttctcataataaatatgatacatttgatgtaactgatgctggcattattttaaataataaagaggttgccgctgagactattattaatgaagtggttaatggagcaacgtcattcttagcggggaatatcgcggtagctggcaatgcagctcatgttgttatagccaacccaaatggtattgaatgccataattgtagtttttcgaatacattacaagaaacgttaacaacagggaaacctgttatcaataataataatgatgaattaatcggctaccgcttagaaaaagctatcgctcctataaataaaggatataggggtggaaaatcaattgaacatattggaaaaattgtattcagtaataaaaatgaccgtagttctagtcattcttttaataaacttaatatcatatctaataacattaagttagaaaacggctttatatcctctaaaggagatataaatatttattcaggtaaaagagatataataattaaagaaggtgaaagtatcttaaaacaagaatacgccatgcgctcacatataaaaagaaataatctccccaatcagataatattaggtgataaaaatggtgatcctaaaaaacaaggtttaatctcttctaaaaatatcattattaatgcttctgatactactatttataattatggtagtttagaaagtagtaaccgtagtaaaaatgccatacaacttaatctaaataaaacaatatttaataaccatggatatattctcgccagaggcggatatttagatctgcaaaataagtctttcttctataatatggaaagtggaactattggcatgcaatattggcttaatactggtaaaaataacaataactatagcgagacatacatagggttaatacccaaaaatactattagccaaatgagaaacttaactttagatattagtgaggatagccaactgataaataatggtgttatcaacactgaacgattatacactcgcgataaaaatatgaataatattcaaaacaatagagaagatatcaaaatttatactaaattacgcaaaattaaataa

SEQ ID NO: 298334 - DNA, 1152 bp, Proteus mirabilis
atgttgaaactaatacataaattttcctcgtggaaaaaagaaatagcattaaataatgtaataatacctttattaaatgacctaatttatttcttaatattattaagtgttttttttattaattttatatttacatctattgctattgcagattatgcgccaagaattcaagatataaacactggctatatgattaaattggcaagtaacagtcctattgcattaaatccagtgaaaggtacagatggtaaaaactattataaagttggtaatacgattgtgatcaataatacaccatctagtgtaagtgtatcggggattgttcagtgcatcgggcttacttggggacatgcttcaacaaatatttcttggaataatgcatatcatcgcttgtttacatatgtacctatggctggtaccaatatagaaggccatatggcatatcgtattaatagtaatttggtaatgaccattgatactcaaatgttgaattgggtaaatataagaggatctgtttgtgaacaggctacaccaacattaactgctcatgccagtgaatttactgtacaatttccaatcagtgtgacattttatataaatgatatggttattgattctcagctacctatacctgaaatggatctaggaggttatgttcgtgcatttacacgatcaggaacgagtcctcctcaaaattcttgggcattgaatgatgtcactgttcctatgcgattagcagcatcacaattaaacgtaacttcttcttgtaaaacagtaacaagtacaggacaagtaagtactttaaatttaaagcatgggcaactcaatacattaaattatgacagcttagttacagaaagtgtaacttataattgtgttttttcaaaagcaacaaaagtgagattacgtctcgattatataactgataacgatcctcaaaaaagattaccgatggtgagtacccaaaacagcaataataaaatttatagtgaattgaccatgacagatgaaataaccgggcaaaaaggtaaagattttaaaattgacattaatgatttgagaacaattaagataaccagccatcttcaaggaacaaatgcgatagctggagattataaaggttcagcttggctaatcgctacgtttgattga

SEQ ID NO: 298335 - DNA, 537 bp, Proteus mirabilis
gtgctaatatggctaaataaaatgaaaaatttattgggtgtagctttattatttatttctctagtatgtaatgctgatatttttattaatatatctgcaacaatggttgaacctgtttgtaatatacgtagtgaaaatggtagtgctccattaaaaattggttttgatacattgacgatatcttcactgactaaatctcctgtggtaaaagatttttcactttatatatcagactgtaattttaataatacattagccattgttttaaacccaaaaggaggaagtacgcttttatataaaggaaaaaatatattagcaacaagtactgatgggttaggtatagatattaatgaagtgactggtggaactattcgttcactggaaacaagtaaaaagcataaaatcaatccagaacgaattaattcaactctttatcgtgttgacttacaagctcagttagtaaatacagtgcctattaatcaattaaaactagggaagttcaattcaatagttactatttcagtgacttataactaa

SEQ ID NO: 298336 - DNA, 534 bp, Proteus mirabilis
atgaataagatggtgaaatttctagggcttatttctttaacaatatgtaattggcagtctcaaacattagcggccaataatttagatgttgaatttagcggtgagttaatcagtgttgcatgccaagtcgcttcagaatcaataaataaaaaagttactttacacaatctacgttggcaatttattaatgaaaatgaaattagtaaagtgactcatttcacgattgcgattgataagtgtagtgaaactgacttacagaaaagtattaaattaacctggaaaagtaacgaattagttgatatcgatggtaatcattttcttattactaaaggggatagtggagcactattaggaattattgataataatggaaggtctgttatatggaataaaccgatgacaattggagatgtaagtgttgttgatggttcacaacaatttgagtttggtgtttttgtccgtaagccagcaataggagaaattaagattggtgaattttccagtatcgtaacttttaatgtggagtatgaatag

SEQ ID NO: 298337 - DNA, 429 bp, Proteus mirabilis
atgagtaaatatcacgtttttaaaatagccaaatggttcaaagtgcttttactcattgttggctgtgcattcagtcaatttattatagccgaaagttctatcgtgagtactacgacaaaacaatcagtttatgagctattacatcaaggagtagttcaagtgagagccactctgtttaatgcgccttgtaatttatcttttgataataatttaagtttgattggatgtggagctggaaaagattatcgcaccataaacttatttgatgtaacagcaaatactcctgcaagtattcgttattatgatatacaacgaaggctattttctgaagattattcactttcattacacaatggcaataatccaatatatttacccaccttaatgaaagatcaacatatattacgtttagaggtaagttatgaataa

SEQ ID NO: 298338 - DNA, 732 bp, Proteus mirabilis
atgtttaattttagtcgtgggttatattgtattcttgttgggtattccatatttatttcgatggcggcacatagtgctgtgacattagatagaacgcgtattattttccctggaacggaaaagtcaattaatattactatttctaatgataatcctgaagaagcttatctcgcacaaagttggatagaagatttgcaggggaataaattaactaaaggtgctattttagcaacgcctccattacagagaatcgagccaaatagttatagtttagttaggttaagtacaacaccagaattacataaattaccacaagatagagagtcggtattttattttaatttacgtgaagtaccaccgaaatcaacagatggcaatacattacaaattgctttgcaatctcgtgtaaaactattttatcgtccaaatagtattttatctgaagcagaaactaaatggacacataaagtgacattaaccaaaacggctcaaggctaccgagttaataatataacgccttttaatttaacaataattggatttggaaatagtaaagcagccgctgaaaaaaatccttttgatgttgtcatggtgccacctaaatcgactcatgatattgcgtcttctatattatctacaccttatcttacttatattaatgattatggtggtaaaccatcgttggtatttcgttgccaaggtgatacctgtgtggtaactggtgaacaataa

SEQ ID NO: 298339 - DNA, 2523 bp, Proteus mirabilis
atggtgaatagtatgatatttgaactcaatcagttaaggcaagtcgtattattgacaatgagtattagtgtgttttctgcttatgctacagaattcaatatcgatgtgttagatgcagaagatatacaaaatatcgatatgagccaattttccattgctggctatgttccccctggtgattatgtattaacagtttttgttaatggacaacgtttaggcgcacctcgcgatatcacggttttagagcaaaaaacgcaaacacaagctatctgtatacctgctgacttacttgattctattggtttaaaagagtctgtaaaaccaaaagtgactgtataccctaatagtcaatgccttgatctttctgttttgaaaggaatgcaaacagttattgatctcccaacactatcactcaaaataacgatcccccaattatggatggaatatagagatccttattggactcctcctgcattatgggaagaaggaattaatggtgctttccttgattacagcgctaatgtttcaatcaccgaagaaaaagagggggataaacgtacttatttgtccactaatggtactgcgggtattaatttaggtgtttggcgctttcgtggtgattatagtgccatctatcaaaaaaagcggggtggcagacaatcacaagaaatacacgattttgattttagccgtctttatggttttacctccttgaaaaaattggcttcaattttaactattggagaaaattatttttactcagatgtttttgaatcatggcaatacagcggtatttcattagaaagtgatgatcgcatgctacctcccaaattagtggggtatgcaccagagatcacaggtgtagcagataccaatgcaacagtgattgttcgtagccaaaatcgagtgctccttgaaacaacagtaccccctggaccatttcgtattcaaactttagatagtggtgttcgagggatactcgatatcacaatccgtgaagaaaatggagaagagaaaaaatttagtatcagtactgcctcattaccttatttaactcgccctggccgtctgatctataaattagtgatgggtaaaactcgttatgatggacatcatttaacaggtaaacccgtattcagtggtgaattctcctatggtctatctaatgcttggtcgttatatgggggaacacaatttaacagcgattatcaggcaacggcgattggtataggacgggatctattttcttttggggcattatcacttgatattactcagtcttttgcacgttttactgataaaaaaataaaagggcgttcttatcgtcttaattatgcaaaatcttttgatgcactacgcacggatattacttttgctgggtatcgatttgctgctagagattatcgcacattaactcagtttatggatcaacgtcgtactggttatgatattcgctctccaaaagagaactatcaaatttatataaacaagtattttgataattttaatatatcactaaattatcaatatagtacctattggcaagataaacctcaaacacaatatggtttatacgcaagtactaatatcagtattccaatgttatctcagcaaaatgcgaatatatctttatcagcaaccagaactgaacgagatagtggttatcaagatgatgctattaatctgtatttaacaataccattatataaaggccatagcatttcattttctgaatcatattctcgtattggtaaaagtaatcaatatagccatagagcaagttatagtggttatagtgatcgcgataattatagtctgaatgtgggctatagtcatggagaagaaattgatagccaatcaagtatcagtggttattattctcgcgacttttctcaagctaacttatctgctaacgcaagttatgtaccacaacaatatcgtagtgttggtgcatcaattaacagtggtattacagctacaactcaaggtattgcgttgcatcgttcagctaatggtgatactcgtttaatgattgaaacaccaggggttggtgatgtacctctagatagtggcgttatcaaaactaattactttggacttgcagttattcctaatgttaatagttatcgtaaatctacggtttctattaataccagtcagctacctgaaaatatagaaacgctagaatcaacaactgatattaccttgactaaaggggcgatagggtatcgcagtttatcagtaatgaaaggggaaaagttgtttgccattatatccctaaatgatggtaagaaaccgccttttggggcaagtgtacgtaatgcggataatcgtgagttgggtattgttggtgaagatggtgtgacatggctagtaggcatttcatcaaaagaaaaactatctgtttattgggcagggaaaaaacaatgtgagttgtcacttcctgaagatttagcatcgccaactagcatgttattgctaccttgctcttcacctactatatcaaaaattacagaaaattaa

SEQ ID NO: 298340 - DNA, 573 bp, Proteus mirabilis
gtggctatttatcgacgtataggattgcaattaattggcagtcttttgtcacttatttctagtacagcattggctttcgatcctaaagttattgagcatgagggaagtacttatctagtgggtagtgttatctcaactccttgttctattgtaatgtcaaatcgttatcaaacggttgatttttcttctttaactttagctatgttatcaagcaaagaaaaacgcgaacagcagactttaccatttgaaatagaacttcgtgactgtggcagcatttacacgtcaattgacagcaaaacatggatgatacgttttgatggacagagcgtaagtaatatcaatgcatttatcttgcaaggctcatctaaaggtttaggggtttctgttctagataataataaaaatgcattaataccaggagaaacatatcctttattcgatagcgtattacgacaagataaatcgggacaaatcctctatctgcgttacttccttaggctagaactcaccggagaacctttacgagctggagattaccaaggactggttcgtttttttatccattatcaataa

SEQ ID NO: 298341 - DNA, 1539 bp, Proteus mirabilis
atgaagcaagcagtggcagacaagagagtagattttctattgacgaatccagcgcaatttgtccagcttgatagtgcatacccgctacgttggttactctctttacgctcgggttatgagcctgataacacaacaagaaatgtgattggtagccttattttggtgcgcaaagacagcgcaatcacatcgattcatgaattagtcggaaagcgtgttggcgccattgcaccagatgcctttggtggatatctgttaggttacaaagcactgcgtgaagaaggaattgatcctgaacaggattttacattacgttttagtggttttccggctgatgcgttactttacttattacgtgatggcgatattaatgcagcgatcatcccagtttgtttattagaaaatatggataacgaaggtcttattaataaagaagattatcgtccattattaaattattctaccaatacttcttgtttaaccagtactccgctctatcctaattggtcatttgctgcattagatactgttcctgacacattagtggataaagtgacacgaacattactcaatgatgaaagcgacgccatgaaatggggggctcccgcttctcattctcaagtggaaaatttactccgagaagtcaaccaacacccaaggcagcgacaactttggcaagatgcgaaaatttgggctatccagcaccgttttattattggattatcattgggtgccattatcttactggttttcaaccaaatctggattagttatttggtcagaagacgtagccatcaattagaacaagcgcatatccatttaagagagcaaaaagaggcattagaacaagctcagcgtttaaatattttaggtgaaatggcgtcaggctttgctcatgagcttaatcaacctctttctgcgatcaaaagttatgcccaaggtagtgcgatccgtctagaaaaagagaacaaaaatcatccattactccccgcgttacgacagatagaccagcaagcccaacgtggcgcagatattattcgcaatctacgtttatgggtaggtaagcaatcagcaaatagtgatacagtgccactgtcagaacaaaatattgcccaatgtattgaacatatttggcggttattacgtattgatgaaaaatatccacaagtgactctgatcactaagattgataaacatgataccctatacttacctgaaacattattagagcaaatattatctaatttgatcaccaatagcctacaggcgggtactaaagagctacagataagcacccataaagcgccagataggttgttaattgtgatcaaagatgatgcgggaggaatgagccatagccagcttgaacaacctttctccccttttcaaaccaccaaaacagaaggtcttggtttaggtttggtgatttgccaacgcttattaaattcacagggtgctgatattcacatagaaaatcaaaaagataagcaaaataatgttggattaaaaatcacccttattttccccaataacaataattag

SEQ ID NO: 298342 - DNA, 942 bp, Proteus mirabilis
atgataaagtcacctccatttaaaacatcatttttacagcccaaatattggctgacatggttggggataggattactctatcttctcgttctactcccttatcccgttatctactggttgggtacacggctaggtcgtttatctaaagtctttttaaaaaaacgtgtacaaatagcagaacgtaatcttgagctatgttttcctgacatgcctaaaaatgaacgtgaagcgttagtgaataaaaacttcgagtccgttggtatggggctatttgaaacaggaatggcttggttttggcctgattggcgtgtgaaacgttggtttaaaatcagtggtagagaaaatattcaaaaagtacaagaaactggccaaggtattattgtcgttggtatacactttttaacccttgagttaggtgcacgtatatttggcatgctaaaccccggtattggtgtgtatcgccctaatgacaatccagttatggattggttacaaacttggggtcgtttgcgttctaacaaatttatgttagatagaaaagatgtcaaaggtatgatccgcaatctaaaagctggagagatcctctggtatgcccctgatcacgattacggcccacgaaagagtgtctttgccccactttttgccgtagataaagcagcgacaacaactggaacctatattctagtcaaaaccagtcatccggctttgatcccgtttacaccaaagcgcttacctgaagcaaaaggttatgaactgattatttcacctgccgtagctgattttcccatcgatagtgaagaaaacaccgctatcgcaatgaataaagtggtcgaacaagaaattttacgtgctcctgatcaatatatgtggttacaccgtcgttttaaaacccgcccacctggagaagcttctttatataatgagataaagaaagtacactag

SEQ ID NO: 298343 - DNA, 1536 bp, Proteus mirabilis
atgcaatctactcactcaaaatcaagccgaaccttttttggccatccataccctttaagctctctgttcttcacagaaatgtgggagagattttctttctacggtattcgcccattattaatcctatttatggctgcaaccgtttatgaaggtggtatggatattcctcgagagcaggcatctgctattgtgggaatttttgctggtggtgtttatttaacatcattgccaggaggttggctggctgataattggttgggacaacgtcttgcggtttggtatggctctatctttattgcattagggcacctttctatcgcactttcagcgttttggtctcagaacctattttttatcggcttattgcttatcgtattaggtacaggcctatttaaaacctgtgtcactgttatggtgggaaccctgtataaaaaagatgatacacgccgcgatggtggtttctccttgttttacatggggatcaatatgggctcatttatcgcaccactgatcaccggcttcttagtccgtgattatggctggcattggggctttggtattggtggtattggtatgctagttgcactactgatcttccgcttttatgccgtaccgacaatgcgtcgctttgataaagaagttggcttagattcaagttgggatcgccctactgttgtgcgtcgtaatgtcggacaatgggtattagcacttgctgtgatattaattgccattgttggtttaattatttcaggcactattccatttaatccggttattgttgccaattttatggtttatgtgatctccggcagtgttatcgcctattttatctatttattcctatttgcaggattaagtagtagtgaccgttctcgcctgtttgtttgcttcctattattagtttcagcggcactgttttggtctgcattcgaacaaaaaccaacctcatttaacttatttgctaacgactatactgatctaaattttatgggctttgagatcccagcggtttggttccagtcagtcaatgcgctatttattattattcttgcccctgtatttagctggttatggccaatgctagcacgcaacaatatgaatttaagtagcatgagcaaatttgtgattggtattttattcgctgcaggtggctttaccgtcatgatgtacgcctctgaaagcgtgcttgcaacaggcagtggtgtttcaccattatggttaatttccagtattttattgctgaccctaggtgaattatgtttaagccctataggacttgcgacgatgaccattttagcgccagcaagaatgcgtggacaggttatgggtttatggttctgtgcgagtgcattaggtaacttagccgcaggtttaatgggtggaaatattcgtcctgataaacttgatgttatgcctgatttcttctctcacgtctctatagcattggttatttgtgccgttgttcttgcagcattaattattcctgtgcgtaaactgttacaaagtgcagatgataaagagaatgcgcaagcataa

SEQ ID NO: 298344 - DNA, 780 bp, Proteus mirabilis
atgaacacgcttcccatttattatgttaacgcttttacttcaacacctttttccggaaatccggctgcggttattttgttagataaatggctacccgatgacacactacttaaattagccaatgaaattggtttaccagaaacggcttttttagttgccaatcatattcgctggtttacgcctaaagtagaagttcccctatgtgggcatgcgactttagccacagcttttgtattaaaaacgattaacaaagcacctgcgacaagctttaaattccattctctgtctggagagctcacggtatcttgtcactcctcaagttttactctcgattttcctcaagtacctgcatcattaaatccaactataaaaccgtcattagaagcggcactaaacatagatattgaagaagtttggcaatctcacgacagatatacctgctttgtggctgatcctaacaaggttattgattatcaacctgactttaatgctataacacaactaccacttcccggtgtaatattgacggcgaaaggttatgcgccttttgattttatttcacgcttttttgcaccacgtaaaggggttaatgaagatccggtaactggcacttcacattgtgtattagctccaatttgggcaaaaaaattaaacaaagataaattaaatgccagacaagtttccgcgaggggaggcaatatacagtgtgaactcaaacaagagcgcttattgcttactggtgatgctgtactatttttaaccggtgaaataaccttttaa

SEQ ID NO: 298345 - DNA, 639 bp, Proteus mirabilis
atgaacacgaaacattggtcacgtgtcgaatatttacacgaaacagtaaaaaataagaatattattattaaaggtcagcatagctattacagtgattgttgggataatggctttgaagcatctgtagtgcgttacctttatggcgatgaatttagccttcagtgggaacctttatgggaaatcgataaattatatatcggtgactatgtttgtattggtgctgaagcggttattttgatggggggcaatcatactcatcgtatggattggttttctctttatccatttttagacaatattaaagaagcctatattggtaaaggtgatacttatattcacgatggtgtatggataggtatgcgggcaatgattatgcctggcgttactattggtgaaggggctattatcgcagcaaatagtgtagtgacaaaagatgttgctccttatagtatcgttggtggaataccggctaagcatgttaaataccgctttgaaccaaaagtgatagagcaacttttatctttaaatatttatagttggtcagagaaaaagtttgccgcattaaaaccttatttatgccaagcttcaattgataagctgttaactgctcatacgcaatataaccaagatatgaaatag

SEQ ID NO: 298346 - DNA, 420 bp, Proteus mirabilis
atgtgtgtgggagtaagaatatcggcgactgattgggttgagggaggatgggatctggaaagttctatcgcattaactcaacatcttgaagatctcggttgccactatattcatgtttcttccggtggcttatcagacaaacaagccatcaagctaggacctaattatcaggtcccttttgctcaagccatctataatgaaacacaattacccgtgattgcggttgggttaattacagagccagagcaagcagaagctattttactgactgaacaagctgattttatcgcattaggcagaggaatactttatgatcctcgttggccttggcatgcggctgaaaaattaaagcagaccattaaagtcgctccgcaatatttgcgttgtgcgccacatggtagtaaagatttttttaaatag

SEQ ID NO: 298347 - DNA, 1197 bp, Proteus mirabilis
  misc_feature (1165)..(1174): n is a, c, g, or t
atgaagttaaatggctctaataataggaatttttatcaaggtgattttaaaacaggtataaatttttataattggattttacgtaataacagtagcttttcttcaggtgatgggaaaacttactatagatttaatgaaacaacgctttcacgtacaatagaacgcatcaaagccattttacaattaggccaaattacatctaatagtgagttattagatagtgctgatgtgaatggttttcaattatattcagatagtagctatcaaaacagtaagttgacagttcctattactgggatgtctgaaaaaccggctaccgttgaagtcacacaaaataatcgattgttatatagaacgataatacctgcaggccctttccaattaaataacattagtggtgtatcatcaagtcaaccattacatgtcaaagttattcaagatgatggtactattcaagaatttgatgttattacatcaaataaagacttaaaaaatccacagagtagtaccagctttaacttttttatggggaaatatagaaaaaactcaagtgatgaacgcatacatactccttttattaccggttttgaaggtggcattaattatttaaatcataattttctagggggtatggaaatatcatcaaaatataagtccattgtaggtagcgtaaatagcgtttttggtgaacatcgtcctttatctactggctttggtattaaatatgcatcttcttctaataaaggtgatggcttccaagcaaatgctaatttaagtttacctgtatcagtattctcactaggcttatcaacaatatatcgttcacgtaactattcgacactctatgaatctctacaaatagataatatagaaaacccattagatgataatcttgctaataatcagacaaaaacatcaagctcattatctctaagcttaggaaatcaacgttatggatcactgagttatagccttagctatagccaatattatggtgataaaaaagacaattattcaaataccatttcttatggaaaaagatttccatttatgtcttttaatattagctatcaaaaaagtagtaattttgaagatcgtacatttgtaaacatcaacgtacctattaataattcatcatcatttagtactcaataccaacattatnnnnnnnnnnacattataaaacatcatctttaa

SEQ ID NO: 298348 - DNA, 447 bp, Proteus mirabilis
atgctgacagcatctggtgctattgcttatagtgatggattatttgctacttctcctgtggagttaggagatactttcggtattttacgtgttccaggacaatctggtattttagttaactctatgggtggtggtacgacaataactaatcactttggtaccgccgttattcctaacttacctgtaaataaaaaaacaactgttctattaaatactaaaaatttaccactcaatgttatgttaggcacaacatcctttgatattgataagggaaatctaataggtgttattatgggggacggtaatgttataataagtaatgagcaaatcggtaagccactaaaagtaaaatcagataatggtgacatctgttctgttgattattcagttccagaagaatttaatccagactttttatatgaaaaagttgatgcaatttgtaagtaa

SEQ ID NO: 298349 - DNA, 675 bp, Proteus mirabilis
atgaaaatactaaaaggaatgatttttctcattctattaataagtcatttttctcatgctagttttcaattggaaaccatgactgttattttagattcagaagagccaagaaagatttttaatgttaaaaatacgggtagtgaacctattttattatcaacaaaagtcagcgatttagataaacaacacgaaatagcaaaaaatattattataactccacctattacaagaatagagccagatcaaagtcagaatattaattttattttaaaagacggtattgaatttgatgatgaacaaattttaaaagcctctttccaaggtattggtgttgcaaaggtcaattcaacaaaaatgcctatcagacaagatattgcgatgttaattattccaaaagggttaaccatagagcgtgaaccttggaaaaatctagaagtaaaacaagtcaataatcaattaatattaaagaataatggtaaacaagttattcgtatggctcccgcttttagctctttaccaagcaataacggttatagtattggtcaattttatattcgtcctcaagaagaaattaaagttgatgtaaaagaaaagttaacagaaataaaaatatcacctttaagtcgttatggatttaaattagcaggtgatattaaaatgaaagttaataattaa

SEQ ID NO: 298350 - DNA, 600 bp, Proteus mirabilis
atggtggtggatttacccgctccgttaccaccggataaagtcgtgactaattcatctaaatcaaaagtacgagcaaaaaacccattccagttgatcaatgttaatgagcgaaattttcctcgttcagtgctttctgaaatggatatgttggtcggcaaaattctttgttatctctaccttagccctgagcgattagctaatcaggggatcttcactgtacaagaattatttgatgaattacgtacactggccgatgaaagcaaattgttacgcttagttaatcaacgctcaacaggatcggatttagacctacaaaaactgcaagagaaaatgagaacgtcacttaaccgactacgccgtttagggatgatttcgtttttacccaatgatacgcaacgtttttcaattactgaatcggtgttccgctttggtgctgatgtgcgtagtggtgactctcctcttgaagcgcaaatgcgtatgatccgcgatggtgaagctatgccactagagcaagatagcgagccaagtgatgacgatgaacaggaagatgagcaattagagtccagtgaagatgatgatgcagaggaagaaaataaatga

SEQ ID NO: 298351 - DNA, 1716 bp, Proteus mirabilis
atggcgcaacaagcaattaaaagagcaataacatattcggtcgtaataggtacacttctctcagggcataatgttattgcctcagaaagtgaaacgccactgctattaacatcagaaacacctgcattagtacccgcattcacagaagacgtggcaacacaagatacattaaattcaccatcagtgagtaagcaggaagttagcactaaactacaatcttggttaccaagcgaatataaaccactttactttaagcaactcgtggatgtttatcaaagcaatgatttagcactgatttggcaagatgaacaaattacaaaacaactagagcagcaactggcagaggttgccttaactggaattcaaccacaatttggacgttggttaacgctattagaaacagcacaattaacgccagaagcacgagatattattttatctgacgcttttttaggttatatcagctttgttgaacagattaatcaatcaggaacaacactgttatatcgcgctgcgatacaagcattaccggcaccaactgtgcaagctgtcgagcatttccaactcaatctacaacaaaataccttagggcgctttgtcgtctcctttgcaccctcacacccttactatccattaatgaaagaggaagtgcgcaaacagcttcatcaagaggttatttggcccgtcatggaagggaaaaattcattaaagccaaaccaatcggcagaagaagttattgcattaagacaaatattgcgtaacttaaatttactgcctcaattggctgaaaatgagcaagaagtagcaacaacgatttatgatgagcctttaattgctgctgtaaaatcgtttcaagcggcccatggattagaaactgacggtattattggtagacagacgcgtaattggttaaatatgacaccaatacagcgtgctggaattatggcattaaatatacagcggttacgcttaaccccacctattggtgacactggaatttgggtcaatattcctgattactccctctatttttatgctaataatcaactgattttagattcaaaagtgattgttggtcgaccagatagaaaaacccccattatgagtagtgcgcttaataatgttgtggttaatccgccttggaatgtacctacgagtatgacgcgtaaagatattgttccaaaaggaaaggctgatcctagttattttagccgtaaaggttatacgatttattcagggtgggggaatgacgcctatccaattaatccttacgatatagattgggaaaacatctctgcggctaattttccatatcgcatttggcaagcccctgggccaactaactccctaggtcgatataaatttaatatgccaaactctgaagcaatttatctgcatgacacaccaaaccacaatttatttactaaaaatatgcgagcaattagttcaggttgtattcgtgtgaataaagcggcgcaattagcgacgatattattaggtgatgcaggatggaaacaagatagaattgatgcagccttaaaacgaggttcaacacaatatgcaccaattccagaacgtatccctgtctatttatattatcaaacagcttgggtagcagaagaaaatgcccctcaatatcgagcagatatttataattatgaccaaagcattaataatgcaacctcttttttagagaatattaagaaatatttgtaa

SEQ ID NO: 298352 - DNA, 687 bp, Proteus mirabilis
atgaaaaaattgctatttagtcttgctacgctgattgtaatgtcaacaccagcattagctactccaccaggcgctaacttaaaaataaacggtgatattactccccctacttgcaccgttaatgctggtgataatgatattattattgattatggtgtaatatccccctcttttattcctgctgaggaaaattacgcactaggagctaagagtgccaatatcaaaatatcctgtgatgcaagcaattatttaacacttaaggtatcagatacttataaaacaagttcaacagattcagcgaaaattagcgtttttggattagttaatgcaaaaaatacagaacaagagattggtggatatataattgatgtcattgatatcaaagttgacaataaacgagcttatttaggaagagtggcagataagatttggactggatcgtccgcaactatttttaaagataccttaacagcgttaactagtgaacctcaagcccaggttgataaaaacaatttaaaacttatagctggaaaagtgtttaatgcaaaaatacaaataggagcttataacgaaagtaggtatgcgtatattttatcaagaaaaaaattggcacaaaacaatatcgatttaactgatggaattgattatataggtgaagctgtttttacttttaactttggtgtctaa

SEQ ID NO: 298353 - DNA, 2517 bp, Proteus mirabilis
atgaataggaaaaaaattgtttcttttaaaattaatttattagttttctctgtattatcaacgttaaatatggcgactgtagtacaggcggatccgtctgctcatattgttgtgcaacaacagcaaaaaaatagtagtgttgatattcttaatattgccgcagcgattaatggctattccagtaattcattaaccagttttgatgtttctgaagcagggttaatattaaataatagtcctgatggtgctgatactcaattatcggggcatattgacggtaatagtaatttatctagcggtgcggcaaaagagattactcttgaggttaatgctaaaaaagccattacgttaaatggtcctgttgaggtggccggaacaaaagcacgggttattttatctaatcctgctggaattatttgtagtagctgtaactttcttagtgctgaccgtgttgtgttgactactgggaaagtgaatacacaaaatgataccgttgatagttataaagtggaaaaagggaatattactgttaaaggtaatgccacttttgataaaagtgcgcaacagattgatttaattgcccgcaatgtttccattgaaacgcctcttgatgcatctggtattaatatgaatgtgataactggcgctaatgaagttaaagcacaagataatacggtggttgcacaaaagccaacaggcgttgctagtaaatatagtttgcagatagtcaagaatgcaggagtgagaagctcatcgctaaaatttataggtactgaagctaactcaccactgaaaaataatggtaatgttgaaactgctgggggagggatcgagcttattcatagcggtgcacttgataataataaaggtaacttcttatctgagggggatatctattttgctttcgataaaggtgttacaaatagtactggtgaaatacaaagtactaaaactatctcaatagaaacaaaagaagcgaaagttgataatatctctggtggtaatatttctgctgatggaaatgtaactatcaatagtggtgaatttaaaaacaatgcctcctatattgcaagtaaagataaattagatattcagacaaacggtaaaccaataacgaatactgcaacggtcggtgaaggcgtcggtatttctgctactaatggtattaagattaatagtggcttatttaataataaagagggtgaaatcaattctaaaagtgtcattgatattaatactaacctaaaagatttcaataatattgatgcttatattgatgcgtcaggggatattagtattaatagtggcgcaatgaataatacccatagtcgtctacgctcagttactcgtgttgaaattgatactaatggtaaggcactgaaaaataccggcatgacggcagatactgctagcgatgattcattaggtattcttagtggtctggatggtatgacagttaatattgctggactgaataatgaccaagggattattgccaccgatggcgatatgaacttcactaacaaaggcgacattaccaataaatggggacatataaaatcagggggatacttgacatttagtagtgataagatcaaaaacctctatggtggcttagcatctaaaactggtgctaatgtgactttctcccagacattagataataactttggtgttttttacttagaaggcgatagcgttaccatcagtgcgccttatataaataataataaaggtgttattaaaggagacgctatttattttaaaacagataaatttaataacacatcaggatttgtgatcactgaacagaaattagagattgatacaccagaactgacgaataacagcagtttagatttcaaaacagaaatgggcttttatctggggcaacctgatcagaaagggggattaattagtaaaggagaaatgaaattaagcggtaataaattagtgagtaataaaggacgtattgtaacagaaaatggggatatggagcttaaattcacctctgttgataataccagtggtactattgcatcacataaaaatgcctctgtagtgacaagcacctttaccaattcacaaggcacattgtttggccaggataaattaacactacaaaccgatacactgaaaaataacagtacaggttcggttgaaagtaataccttaaaaggtgttattgcgtcgagtggtgatactgaagtgacggttaatcgtgattttgaaaacaatggcgtcatttctggtgtagaacatttacgtgtaaatataaatggtaaatataccaatgccagcaatagtattatgtcaggtaaaaatagtttcgaattaggtgtgacaggaaatattattaatcgcggtattcttaattcaataaaagacacgactatttctggtgagaatattactaatgaaaaatcaggtattattgttggtagagaaagtattactatcgataataaaggcacttttactaataaaggtaaagttgtcgggccgttaaataaataa

SEQ ID NO: 298354 - DNA, 633 bp, Proteus mirabilis; identical to SEQ ID NO: 296595

SEQ ID NO: 298355 - DNA, 645 bp, Proteus mirabilis
atgactaaaggtcttatttttgatctggatggcgtaattgttgataccgccaattaccactatattgcgtggaaaaaactatctaatgaaataggaattgattttgacaaagagtttaaccatttattaaaaggaataagtcgaattgagtcattagagcttattttatctcatggtaataaaagtgatgtttattctgcggatgaaaaaaaatcattaacagaaacaaaaaataaatattatcttgagttattaaataatattactccaaaagatattttaccgggtgttttagatctaatagaacaagcaaacaataatcacattccttgtgctattgcatcagcttcagaaaatgccccaaccatattagaaaaattaggcattaagcattattttaaggcaattgttgatcctaaaacactcaaaaaaggcaagcccgatcctgaaatatttttgcgtgcggctgagtttattcacattccaccacatttatgtatcggatttgaagactcgattgctggaatacaatcgattaaacaagcgggcatgtatgcaattggcgttactgctgatggccccttaccagaagcagatttagctgttcactcattaactgaaatagatattcattcacttttttaa

SEQ ID NO: 298356 - DNA, 2718 bp, Proteus mirabilis
atgaattatatctctgttattctttctgatactgatatcaccattaaatatctttcagaaaaaagccattattcatttaataccacaaatagccattaccttgattggctaaatatggctaaagctattaaccataaatttaactctgctcaaggtggtttgatatattcgacaagtaataaattggatagcgatattattaaaaccattgataataaagtaataaatttatcaaatttctttactgaaatatttaataaaccttttatttatatcaataaagcgcagcttgaacatcatcatgatttagaagaaaaaatggttacagttgccaataactttgcttggtcaattgaatattcaggcttagaaacaggaaaagatgaatattgccaagagtctctcttaactacggccaatggttatattgggttaagaggaactttgcccgaaatgactataagtgatgagcactaccccgctacctatattgctggcctatataatcaagcaagttcacaaatagaaaaccatcaggtgattaatgaagattttgttaatgcacctaatggacaatttatttctcttaaaattggtaagggagaatatcttcatccaaagcaactgataacacaacatttaacacgtcatttagatttgaaaacgggtgtattcactagccaatggcgtgtagaaacccctgaaggacagcaacttgatattcattgtacaaaatttgccaatatggctgatatgtcacattacgccattttatatacctttaaaccattaaatttctcaggtgaaataacagttataactcgcctagaaggaaatacttataattacggtgtacaacgctaccgtagccttaatccccatcattatcatgtgttacaaactggagcgaataagcaacacgcatttatattagctcaaacagatcagtcaaaaatagggatcggattatcgtcaacaatcaggggggatttctttgcaaatgaagatattgtttgtcatgtttcagatacgcttgttgaacaaaccatcaccttcaacgctcaacaaaataccacctatcaacttgaaaaatgtgttgctgtaacaacctctacggcttacccagactcatggcaagatgtggttaattgggaacaacaacctttacacagccaattgataaatagccaaaaagcgtggaaaacgttatgggatagtgccgatatctcgattgctggcgatctgatgacccaaaaattactacgcttacataccttccatttactgtcatccgcatcaccatttagcaatcagcaacatcaattagatgtttcagtcaccgcccgagggttacacggggaagcctatcgaggccatattttctgggatgagatctttattctgccattttatattatgcacttccctgaaaccgcacgccaactattactatatcgttaccacaggctacctgctgcgcgtcttgcggcacgagcagaaggatttcaaggtgctatgttcccttggcaatcagggaatgatggtagtgagcaaacccagacactgcatttaaaccccttatcagggcaatgggatgccgaccatagttgtcgtcaacgtcatgtctcattagcgattgcctataatgtgtggctatattggctaaatactcatgatcaccaatttatggaacagtatggacttgaactactcaatgacattaccttgttctggttagaccaatgtcagtgggatgaaggcgatcaacgttttcatattaatggagttatggggccggatgaatttcatgagaaatacgcagactcacttgaaggtggcttaaaagataacgcatacactaatttaatggtggtttggttgtttaatcaaatagagatgttcataaacaatgatcgtttttctaaaaaattacaacagctaaacagccaatctagcgttttcaataaaatacaagaagttaaaaatcgtattgctatcaatattgatgctcatgaaattattgaacagttctcaggttattttcaattaaaagatctggattgggaaagctatcgaaaaaaatacggcaatatctatcgtatggatagaattttgcgtaaagaaaataaatctgccgatgattacaaagtagctaaacaagcagataccctgatgttatttaataacttagataagcaaaccgtacattccctaattacctctcttggttattcagtttctaagcactttgctgaaaaaaatctacattactatttagaaagaacctctcatggttccacactgtcacgcattgtccatgcttatctcgcagaacaaatacagttacatgatttgtcatggcaactttatcaagatgctctttattcagattataatgatattcaaggtggaacaactgccgaaggtattcatactggtgtcatggcggcaacattaaataccaccatcatggcttatgccggtgttgatattcgtcaggatatgttgaccatcaccccttcactccctcaacaatggcaaaaactaagctttaaattattgcatcgctctactttatatcaaattaatctcactcataaagaaattagtattttaagtgataagcccagtactattttaattaaccatcaaacgcataagctaaccgccaatacgttattagtattaaatttaaatggagacacgcaaaatgactaa

SEQ ID NO: 298357 - DNA, 1215 bp, Proteus mirabilis
atggatgttgatatctactataaattattaattgataagctttcattaaaagctaaatctaaagatgatataaaatctgacgcgaaaaagaatatgggatcctggcaaaagctgattgccaatttagccgaaatttttgttccattattacctatcttaatttgcggcggtttattattaggattaagaaatgttattggcgaaatgcctatatcagataataaacccctcacttatttttatccttggttaacgccaatatatgattttctctggttaccttgtgaagccatcttccattttctacctgtgagtatttgctggtcgagtgtaaaaaagatgggtggtacacctgcactaggtatcgtactaggtataactttagtttctccacaactaatgaatgcttacaatttaggttcacaaattcctgaggtttggaattttggtttatttactattgagaaagtaggttatcaagcccaagtgatcccttcgattttagcgggactatttctgggatggtttgagactaaattacgtcgttttatccctgattacctaaaattagttattgtaccgattgtaactcttattgtcgccgtttttgttgcccatgttattttaggccctatcggtagaagcataggtgatggtctcgcccaactgatcaaatttttaatgttaggtgattttgcccctattggttcaactatttttgcctttttctattcccccatggtgatcaccggcttacatcacacaacgttagcgatagatttacaaatgactcaaagttatggcggtacacctatttggccgattatcgctctgtctaatattgctcaagcatctgccgttgtaggcattattatcgttagtcgcaaattaaatgaacaagaaattactattccggcagctatctctgcttatttaggtgtgacagagccagccatgtatggcgtcaacttaaaatatggctttcctatgctgtgcgccatgattggcgctgcgctagcgggtttgatttgtggattaaataatgtgctatctaatggtattggtgtcggcggattacccggtattttatctatccagcctacttattggttagtttatttattagcaatgattgtggctattgtcgtccctattggattaaccattctggtctatcgctataaagaaaaagcaggcaccttgcaagtcgattaa

SEQ ID NO: 298358 - DNA, 969 bp, Proteus mirabilis
atgacagatactaataaaaaaaagttaacaatcaatgatatagccaaactttgtggtgtgggcaaatcgactgtttcaagagtacttaatcaagatcctatggttaatgaagaaacaaggaaaaaagttacctcaattattgagaaatataaattcacgccgtcaaaatctgcacgagcaatgcggggatactctaatcgttcttttggtattatcgtcactcgcctggattcttatgcggaaaatcaagcaattagtgccatattaccgatcctttatcaaaacaacattgaccctattattttagaaagccaatttagccaagctaaagtagaagaaaacttaaaaatgctcgcccaccagaaaatcgatggcgtaatattatttgcattttcagggatcaatgcggctaacttagcaagttggaaacaaaaaatggttgttatagcaagaccactagaaggttttgtttccatttgtcatgacgatgaacgagctgttaacgctttaatgcattatttccatcgagacaaacattatcaatatataagttttatcgggatccaaattaatgatgaaacaacgggtttattacgttatcaaacttatcttcaatattgccagcaacatcaattaatatctcaagctcaacttggtgaacttaattatcaaagtggctatttacttgccaaacaagcattagcaagcaagcctcaagctattttatgtgcgaccgactctctggcctttggtgtacaaaaatatttagccgaacagaaaatagatcatattgaggtggcctgcatcggtcgtaatgatctactcacctttttatttcctcaaactaaattttatcgattaggttttagagaaagtggacaagaagctgctaacatattgatacaaatgctagaaaaaaatattcctgcacaaaaaatcattatatcaagtcatgacttaaacccatga

SEQ ID NO: 298359 - DNA, 408 bp, Proteus mirabilis
atgttaaagaaaatgatgggatttatgtttcttgcggtggcaatgatgacattatctgcatgtggtgataaacaagacgaagcaggaaaagcagcggttgaatttattgaagctgtcgcttccggtgatggtgataaggctgtgtcattaatgtattttggtgatttagaaaaagatccaatggcagagcaaattaccggcaaatttaaaatgatcgttgccgaagcgggcaaaaaaattaaagagcaaggtggcttgggtaaggttgaagtagcaaaagttgaatacagcgaagataaaaataaagccgttgtcacactcaaaaccgtgttgaaaaatggtgaagaaaaaacagaaaatcaaaatatgatcaaagttgatggcaaatggaaagttgaagttaagtga

SEQ ID NO: 298360 - DNA, 693 bp, Proteus mirabilis
atgtctattgcaaaacgcaccaaagacaaacgtattgcgttaggtttaacacaatctgagcttgctaccttggctggtacaacgcaacaatcaattgaacaacttgagagtggtaaaaccaaacgccctcgttttttacctgaattagcaaaagcgttaaattgtgaattatcgtggttgctcgaaggggataataaacaaacacacgcttctgaaatacctccccaagatgaatggcattcagtcagtgaatgggataacgatacccctctcaatgctgatgaagtcgagatccgttattttaaaagcattgaacttgccgctggtgatggctgctgtactaacgaagatcataatggttataaattgagattctccaaaagcacactacgccgctatggcgcttcaccacaaaatgtgatctgtttttccgtctatggtgatagtatgtctccggttattccaaatggttcaacagtgaccgttgatacaggtaatacgcggattgtggatggcggtatttatgctatcgaacaagattcattatttagaataaaattactctaccgtcagccaggcggaaaattaattattcgtagctacaataaagatgaatttcctgatgaatttgcagaaattgactccgttaaaattatgggacgcgttattcactggtctgtgatggcttggtga

SEQ ID NO: 298361 - DNA, 624 bp, Proteus mirabilis
atgttaaccattcactcgttaactaccggtattttaacagaggtttcattacacctagagcaagggtgttgtttagggatcagtggctcatcaggtagcggcaaaacaacgttactcaatgctattgccggttataccgactatacaggggatattgttttagctaaccaaaatatgaataaattacctgtttggcagcgcccctgtcgttatttaaatcagcgtctttatttattcccttttctcactgtaaagcaaaatttatggctggcacaatatgcggctaagcaaaagcgcagtaaagaaaaagagatagcgttacttgaacagatgggaattgctcatttagcaacacgttatccatctcaaatatcagggggagagcagcaacgagttgcattagcaagagcactcattagccaacccaaactgttattaatggatgaacccttttcaagtttggattgggaaacacgttatcagctgtgggagcttattatctcattaaaaaaacagcagataacgatgataatagtcactcatgagcctcgtgaattgcaagcattagcagataaaacgctgttattatctaatgggaaaattgtgcaagaaagtaaaaactaa

SEQ ID NO: 298362 - DNA, 273 bp, Proteus mirabilis
atgattaataaaaactggcatccggctgatattattgcttctttaaagaaaaaagggacaacactagcagaagtttccagagctgcaggtttaagctcatcgactctatctaacgcgttgtcccgtccatggccaaaaggagagcaaattattgctaaagaacttgatatacctccatcaacaatatggcctgaacggtactttgatgaaaaaggaaatcaaattattcgtaaattaagacataaaaatataaataataaagatgaattataa

SEQ ID NO: 298363 - DNA, 258 bp, Proteus mirabilis
atggttccttttaggttaagatatgcccgtaaaatggcaaaattaactcagacaagattaggtactctggccggaatggatgtagctagtgctcgttcaagaatttcgcaatacgagtctggactacataaaccaagtttcgaagttgtgtgtaaactagccaaaatacttaacttgcctgaatgttatttttataccgttaatgattgtttagcggaagatataatgaaattatatcgtgaaaaatataataagtaa

SEQ ID NO: 298364 - DNA, 261 bp, Proteus mirabilis
atggtacctaaaagattaaaggctgcaagggcaagagttgcattaactcaagaagagttaggtattttagctgggattgatgaagaatcagctaaaattagagtgtgtcaatatgagtctggtactcaccgcccaaactttgaaactatttgccgattttccaaaatattaaaagttccagaaaattatttttatactttaaatgatgaattcgcggaagagttaataaatatttataataataaatataattgctcttaa

SEQ ID NO: 298365 - DNA, 399 bp, Proteus mirabilis
atgagagatatacaacaagtattagaacgatggggagcttgggcctcggatgtacaaagtggagtagattattctcatattgcagcaggttttaagggtgttttaccttatcaatcatcttcaaggataagttgttgtgatgatgatggtatgattattgacgctacaatagcgcgattacaacaattgagaagagaagaagaattgaatgcgcttattttacattatatatatcagtgctctaaaagaagcattgcaagacgttggaaggtgagtgaaagccgtgtacgtcagattatacagattgcagaaggttttgtagaaggtggtttggcgatgttagattcagggttagtcatggatcatgaagttgcttgtaataaaaaacaggttaaataa

SEQ ID NO: 298366 - DNA, 1074 bp, Proteus mirabilis
atgaaatcattaattataaaatctcgacctcagatagtgataccagaattagctgtcaaaattggattgcatgaagctttagtattgcaacaattgcactattggataacagaaactaagtctggtattgaacatgatgggcgacgatggatttacaatacactatctaattggcaattacagtttccatacttatcagtatcaacgctcaaacgggcatttgctcagttacgtatttctgggttgattgaggtaaaacaactcaataaacatcttcatgatcgtacaaatttttatagtatcaattatcaacataagatcttgcaaatagaagaagatgaaaagagaagcttgactgaaggtaattatgccaataaaacaacaataaaaccgttcgatgagcccaaatcgaaacaatggacaggtgtaacaaatctatctcagagtagttcaaatagagcccttcttacagagagtacaacaaagataactacagagagtaacaataaaagatctcggtcagtttgctcgttttcaagtcctgaacgtccagaaatagaaattatccgttattttaacaaagtgactcactcccattaccgtgagtgtcagacgacgttaggatatatccgtgcaagattagctgatggttttcatttcgaagaattgatattaataatcgattatttaacagctaaatggctcaatgataataatatgcaggactatttaaggcctaaaacattatttcataaaaataattgtactgaatatcttgataaagcgaagaaatggcatttaaaagggaggcctgcatatcaaaatgggcaatgtttaaaacccggggaaataccgattgaaattgattatgcagaaagagacagtacgtttaatttactatttagctcagcgtggaagcccaaaacagcacttcaaattctagctaaaaaaatggctttacagcgtggtttagggcatatgcatattcacaaggctaggtctgtttggaaagaaatttggtatcagtcggcccaattaattgctcgttcaacaattacagataagatcgcataa

SEQ ID NO: 298367 - DNA, 660 bp, Proteus mirabilis
atgagaaataaaatgcacataagaattaaagaacgccgtttacaattatcattaacacaagaagctctagcaaagatgttaagtgtaagccgagtttctattacgaagtgggaaacacgagttacagagccggatggagaaaatttacaggcattagctaaagtccttgaagtctctccagaatggttactttacggggggaactcatcagaagcagatgcattaattataactcgcaagacagtgaatattaagaaaatacccattatcacacttgaacaagcagctgattggaaagcacgttacgatacattaagattaagcgatattcagcattggtgctgtgcaacagtacccgtatctgaacaagcatatgggttaatttaccaaggcgaatctatgacaaacccctattcacttccttcaatccctaaaggttcaaccgttattatcgaaccatcattcaagaatgagatagaattatatggaaaaataattatcgctaaaaacattattactaatgacatcgttattaaaaagtttatccatgaaccaccacaattttatttaatctcattaaacacagcctttaccccaatattatttactgatgattatcaaattattggttatgtaatacaaattattcagactctctaa

SEQ ID NO: 298368 - DNA, 243 bp, Proteus mirabilis
atgaaagtattaacattaaaggaatggtcggataaacgatataaaagtcacccaccttctctaacaacattaaataaatatgcacgattaggttatttttgtccccctgcaaggaaagagggccgattatggcgagtcaaagaagatgctgatttagttggtatagttgccactccttccatcaaaacattcgatgaccctatattaaggaaaatattaaaagatgagcggacgacttcgtaa

SEQ ID NO: 298369 - DNA, 1128 bp, Proteus mirabilis
atgagcggacgacttcgtaaaaagaatattgatatacccaatttatattcaatatatcatccaaggatgaaaaagatatattggcgataccgtcacccaatttcaggaaaatttcattcattaggagatgatgaagcacaagctaaacagatagctcttgaagccaataaccgtatagcagaacaaagaacacgccaaattttaatcattggtgatagaattgctactatgaaagatcaatctatctctgtttctacatggttagatcgctattggaatattcaaaaagaacgtttatcacaaggtgagataaaacttgctacatataaacaaaagaaaaaacctatagatctgatgcgtcaaaaattggctttatatccattagcaaatataggtactcgagatctagtcagtattattgatgaatacaaagcaataggtcaaatgcgtatggctcaagttgtaagatcggtttttagtgatatttttaaagaagcgcaacatgctggagaagttcctcccggatataaccctgctctagcaacgaaaaggccaagaacacggatcaggcgacaaagactcactctagatgaatggcataaaatttatgatattgccgataaacaccatcgttatatgggaaatgcaatgctacttgccattgtgacgggtcagcgagttagtgatatctcacgtatgcgttttcaagatatttgggatgatcatttgcacatcatacaaagtaaaacaggatcaaaagtagcaataccactttctttacgtaatcaagctattaatgtatctcttaaagaagttattgaacgatgtcgtgatcgtattgtaagccattatttagttcattatcatcgaactacttcacaatctaaacgtggcgaacaagttactgcaaatacgttaacgactaattttaaaaaggcgagaaataaaacagatattgattggggagaaggaacacctgcaacatttcatgagcaacgttctttatctgaacgtttataccgaaaacaaggtattgatacccaagccttattaggccataccacacgtttacaaaccgatcgttataataatactcgtggaaaagagtggataaccattacctgttaa

SEQ ID NO: 298370 - DNA, 300 bp, Proteus mirabilis
atgatgaaagatagaattctattctcatttcaaacagggttgtttttttttgcggcccctttgattatctatttttcttatctaatttttatttgtggatacacaaaaaaaacacaaaaaatgaataataaagtagcgggtatatgcacaggaatagcaatagttggtatcgtttttagctttttcttttcaatttatgtcgctctcgatttaacctctaaaggctattttagttgttataaatcatctgcttttgcaccaaatgaatatgttattgcaaaagagatgtgtaaaaaatag

SEQ ID NO: 298371 - DNA, 708 bp, Proteus mirabilis
atgaaaaaattattacttagccttactatgctggcgataatatctacgccagtgttggctaaatcccctgtagctaacttaaaaatcaacggtgatattaagcccccaacttgtactattaatggagcaacacaaagtgatgtgattttcgattacggagtcataagcccaacacttatccctcaatcgaaaatttattcttatcctgccagtatggttcaaaatacagttacagttgaatgtgatgcaaaaacatatttaacctttgttgcgtctgatacttatgataatacagaattaagcgttaataatacgtcagactggtttcatttagtagataaagcaaatcctgaaactgcggttggagcagcttattttgcatgggataatgtgactgttgatggcaaacctgcgtatatttcacgagcaaacgatgctgctatcacagggactaactactataatgtcctatataaagggccaaccaatggttggacatcaaaacaacagacagaatcggttgataaaggctctctggctctaatttcaggtgaaattttccaagcaaatttcagacagggaattgaaagtaatcctactcaaacctttattttatctagagatgaattaagtaaaaaaggaatagatttatctaatggattagattttatcggggaggctgttctcacttttaattttggtgtctaa

SEQ ID NO: 298372 - DNA, 2730 bp, Proteus mirabilis
  misc_feature (810)..(819): n is a, c, g, or t
atgtctcgtaaaattaaaaatatacttatctccatttttttagtatttatggccttggggctttatctcaataaaaatcaaatccaaccagagttaaagccaaatggttatagttattatcaaaaaggtgactataaagaggcgtttaattatttttcacaacatgcgcaaagtgatccgcaagcggcatttagtttagcaatgatgtattgggatggcataggggttgataaaaatgccttagcttcacaaaaatggttaataaaatcagcaaacttacaaaataaaaatgcactttataatttaggatatttacgtaacaaaggattaatccaaagtcctactgatgatgctcaaggattaacgtcattaactaaagctgctgatttaggctcttcaatagcgaaagattttttacatgaccttaattttcctgtgatttattacgatcaaaaagagtatacgttactccctatttatggtgagcaatcttggtctgaaaaaaaaagaacacttgaagaattagaaaaattagcagaagaaggcaataaagaagctgtatatcaatatttagagaataaggattcagtaaaacaatcaaaaaagactaaaaatatgatacgtccttttattgaagaaaaagatcctaaaatgatgtatttaaaatataagttaataagtcaagatattaacttactttttgattcagcatatttgaactatcctgaggcaacatatcttctgtatcaaatctacaagggtgataagaaaaactatccccttcaagaaaattcttttttagctaatatnnnnnnnnnntatccaaactctccacaagccatgctagcgctcgctaatgtctatttaaaaccaaatagtagtttttataattttgaaaaagcacttaagctggtagagagagcatataacatacagccatctcctgaaagcaaattattattggctaaattatattctaatagtgagggggttcatcagaatattagaaaagcagttagttttctgaaagaaaacataactaatgataaattgacaggtaaaagccaaagagaattagtaaaaatatattttgattttggtgcttctgattatcttaaaaaagaagagattgtgaatattttaagagagagtgtaattaaaaataaatcagctggtacatttaatcaaaactatagcttagctcatttttatgcagatcttcttttagaagaagatgtcgccaataatgaagaatatgctttttcattatatcaaaaagcacgaggttatgcctatgaagctacttttcatcaagcaattgcgactattaaatataaaaatatgatagatgatcaagctcttattaatattgtttcagaattgaaagatgatttagaaagcagaaggttgaccgaaaaaaaacgacaggaaggatatagtattcttttccgatatggaatggattcacagtatgtaattgattttattgtggaacgttcgctatatgatgataaaataagaaaggctattcaaccattattaagtcaaaatacaaatcttgcatttcaatatacaataaagaatataatacatgagaactcagctaacaatattaatgaagataatttaaaaaaatattataaggatatatttaaattagctgaaataggttctattgatgcaattaaatttattattacaaaagagtataaagataagaatgctcgcgatgaaatttatcaagactattcttttgataagttaactaatatcactattaaggagcgtttggcttggcgaagaaaatgtgcagatttaggtgattttatttgcttaaaagaattagctataatttatcgagacggtaaagagggggttagaaagaacattgcgaaagcatctgaatatgaacgacgtattagcatcaattcgtctcactttgagctggaatcagaaaaatatgaaatagatagaagatggaaggaaaaaagagataatacacttgattatttactaaaccaaaaagagagtagtaaacaacaactagaattagcaagattttatagtattgaagatagtggaagaagtttaatttatgccaaaaaagcatatgatttaggaaataaagaagcggctgagttaatttattggtactatatgcaaaatatctgtgaagataaagataatatcaataaagcagactactatcttaaagaatggctaacaacaggagaagaacctagtaaatacagctcttctaatgaatacaaatattctagtattagtatcattgctgattattatttagagtcaccgtgtttagttgaacgaaaccttgataaggctattgagtggtatcaattatcgttagattatccatatgaaataaatgattttttgtattctgaattaaataatatgtatactaatgcaccaaaatacataagtaaggatcctttcgtgaatgtgtatttatctacactaaaaaatcataacgattatattttagatatgaatattcgattaggaaaaatgaattttgcaatatcttcttttgacaaactttatgaagcacttctactcaaaggtgatgtgaaagaagcatattattatggtttactattaaattatgatgtgaataatgtcgctatgttttattctttatctgacattgagcgtaaaaatattgaatatcgtgttgctgattatttaaaagaaatacaaaaataa

SEQ ID NO: 298373 - DNA, 1365 bp, Proteus mirabilis
atgatgaaatcaaaaataaaacaaatgattgctcactactttaaaactaaaaaagagcctaaaaactatgatttttaccctaatcatatcgccgtacttgagaaaccgccgacaccttatagtcgtattattgcaataataatttcattaagtgtgattatatttttactctgggcatatataggtaaattagatgtgctttcttcagctataggaaaattagtggtttcaggttattcgcaacaaattcaaatttatgaacatagtcgcttaagcgccattcatgtaaaaaatggccaacaagttaccaaaggagaagcgttattaacacttgatattttaggtgttgatgaggagattaataatctaaaaaataagatagaaaatctattattactaaaaattcgttatcaagcattaggtcaaaacacccgacctgatgcaattgatgattttaatttactaaataaagaaaaaaaagaagcgattctattaagttatcaaaaagaaaaggatgaatttgatgctagtattaatcacattaactctgaaatagaaaccaacaataaaaacaagcttcttactcaccaagaaatcaattcattaaatgaattaaaaaacaatattgaaaaacgttttaatataaagaaaaaactctatgataaaaaaatcattagtaccatggagtttttagaaaataaaaaggagttattagaaattaatcaaatcattaaaagaaaatcatcagaactggttattttatccagtcaagagcaacaatatataaaaaatcgcgatagattagaaaaacaaaaacacctagagtggcatgacaaatttaaacaatatgaaagcgaagtttttatttatcaacaaaatctttatcatgttcagaaacgtcaacaattaaaaattgttcgttctcctgttacaggtacagtacaacaactcgctgttcataccctaggagccgtattgcaaccttcacaagcggtgatggtgatagtgcccgatactcagcataatgttgctgaggtgaatattctcaataaagatattggttttatctatccgggtcaaaaagcggtgattaaaattgatgcttttccttatacccgttatggcaccattgaaggcaccattgtcaatatagcaaaagattccatacaacatgaacaattaggcttagtttatcccgtcctgattgaacttgataagcaagtaatgggtgaagatgaagcacaatataaactggctacaggtatgtctttagttgccgatataaaaattgaaaaacgtcgagtgattgattatttactcagtccaatagaagtttatcaacatgaagcattaagagaaaaataa

SEQ ID NO: 298374 - DNA, 921 bp, Proteus mirabilis
ttgattgatctctatacattgatttcattttataaaatatttaaacaacttagatgtaatgctgtacttaattttactcctaaaaataatatttatggaacattagcagcaaaattaaacaaaataaaagtcatcaataatattgcaggtttgggtacattatttgtaaatgatactattagttgtaaactagcaagaaacttataccgctatagccaaaaatatgctgataaaatattttttcaaaataacgatgacctttcattatttttagaaaaaaaatatgtcgataaagtacaagttgatagattgcctggttcaggtgttgatttatctcgctttacattatcattatcagaatataaacataaatttagatttctattagtggcaagaatgctttatgaaaaagggattactttttatgttaaagctgcacgtatcttaaaagaaagatatggcgataaagttgaattttgtcttttaggatttgttggtgtaaataatccttcagcaatcacacataaacaaatgaataactgggtggcagagggaattattaattatttaggtacatctgataccgtagaaaatgaattagcccaagcagattgtatagtgctaccttctttttaccgagaaggagtgccaaaaacattactagaagctggagctatgggaaaacccataatcactactgataatgttggttgtcgagaaacagttactcatggttttaatggatatatatgtcaacctaagtctgtatcaagcttagttgatgccatggatagatttattaacttaccctatgaaaaaaaactaaaaatgggtcaaaatagtaggcagaaaatcgaaactgaatttgatgaaagaatagtcataaaaaaatatttagatgcgttaaaagaaattatgtaa

SEQ ID NO: 298375 - DNA, 483 bp, Proteus mirabilis
atgaaaaatttcttcctaaaaaaactaagttctcttatagtaaaaatttatgtgtttattttttataatgagttaatttataataaaaatattgtttactttggtttttttactattaaaaatataaaaaaactctctattaaaggaaaagtaaacataaatgatcatgtatatattaatgctaaaggagggatcactcttggtaatagagtaacactctctgcaggttcaaaattaatttcaacaggtttattgattgatgataatggaattacaaccaagcatatagataaagaaattataatctcagataatgtacaaataggagctggatcgattgtgcttgcaggcgtatctatatgtgaaaatgttgttgtaggagctggttctattgtaactcgtaatattgaaaaaccaggagtttatgtcggaagcccagctaaatgcataagactatttaaacaatttaataatgattattag

SEQ ID NO: 298376 - DNA, 243 bp, Proteus mirabilis
atgattggtgtcaatatagatactgatgctgatacaatacgttgtgcaacaccaataaatccaataaattcaatgccatatatagattttgctataattaatgctatggggtttatagcacctgtaatgagtctcattgatgtaaggtgccagccttctttcaataataacttactttttgttgatagactaaagtattttttattttttattttatttatgggaagtttttttattatataa

SEQ ID NO: 298377 - DNA, 2562 bp, Proteus mirabilis
atgaatagtagacgccgtcgggttgtaataaccggaatggggattttatcatctttagctaaagatgtgcctcaatttaaacaggttctttttaatagacaatgtaatattaagcccagccaacgttatttaaaatggtttaaaaatgccaatgcatctgagattgagatggcattagattattcagatataccgcagcatatcgctcgatcactagataatgcggcattatgggcatatcgagtctgcaatgaggcattacaacaagcaaacttaatagataatcagtctattttagataataccgcgatgatcgtgggcgtctcttcagcaggaacggaagcctttctgccattatttgaacaacatattgatgatttttcgataaaaaaagccattttatccggtggattttcatcatgttgttcgagtgtatcaagtctacttggcttacgtggtggccttgaattagtggcgacggcctgtaccgcaagccctaacgcgataggtatggggtatgattatatccaaaatggcaaaaatcctgttgtgctagcggtcggaacagaacccatttatcttcctacctttgcgggtttttatgcccttaatgtgatgaaaacaacaccaacttccccattttcaggtactcctggtatgtctattggtgaaggtgctggggcgttagtattagaagattatcaacatgcggttgaacgtggtgcgacaatatatggtgaaattgtctcttacgcgacatcttgtgatgcttaccatgaaactagccctgatcctcgaggaaatggtgcagtgcaagttatgtataaagcactggataatgcgggtattactcctaatgatattgattatataaatgtgcatggtacaggtactgaagcaaatgatcgcattgaaaccatgtcgatgaaaaaagtatttcctaatatttatcatatcccattaagttcaacaaaatcttatgttggtcataatattggtgctgcgggtattgttgaaatcatcgcgtgttttatttgtttagccgaagataaacttccccctacattaaatttcactcagccaaggcatagctgtgatttaaattatgtaccgaatttctttcaagataaaaaagtaaaattttttatgaagaataattatgcttttggaggaaataactgctctattatcgcaagcccttatattacagataaaacaccgacggaatataaagctaaaaaagtggttattaccggggtgggggcgattacgtctattggcaataatataatggagataataacagcgattttggcaggagataaaacaggtacattaaaacctattgtatttgcgagtgatgtgcagaaagatatcgacaacttgatgtctgttgtcataaaagataatgattttgagcaatcgttaggacatccttattttgatctcgacattgatcatcgcttaaaaaataacgcctgttatcatgctatcactgatgttaatccgaaaaaaacattacgttattatgatccaagaaaagctattcctagcgggacttatgctttattcgctttaaatgaagcacttgctaatgctggacgcaaaattaaacgtgatggtgataacttaggttttattgttggaatgtcaaaagggccacaaagtaccgttaatcgttatttacaaagtttaattcctgatccgcaaaaagtaagaacatcagaatttcctggtactttaatgaatgcagtaccgacattttgtgccatcacagagggaataaaaggttataccacgacattggcaacaggggttaatgctgcattaggagcgttaacttatggttatgaaattatcaggcaagatctacaacctcaggtaattgtcggaggggcagatgagcacttcagttctatttcactctattttcaagcgatgagtaagaaagttaatctgaccaagaatgcgacagattatcaggtttattctaatgcaagtgccggctatatccccggagaaggggcagggatgttatttcttgaagataaagagtatgccaagcaacgaggcgctaaaatttatgctgaaattattggctacggtaaagcgaatgataatacttttttagtagacgaaaatattactgatagagtggccgccttatgtaaggctatccaacaagcattatctgaggcgcaactcagttgccaagatattgatattatctgtggtaccagtgatggtaataaagagaatgatgaagttgaaatccgtgcgattcggcaactattttatcaagcggcaaatcatataccagtagttaattacaatgccttttttggtttagttgaatcatgcgctgggatattggcgatctctttagtgattcatatgatgcaaagcaacacgataatacctattccttatacaaaaagttttatagctgatgatattcattttgttacccaaccgattaataagcagatagaaactgctttagttcttggttcatcagaaggatgtaaccactatgcaattatcatcaggaaaccgttatga

SEQ ID NO: 298378 - DNA, 1134 bp, Proteus mirabilis
  misc_feature (1040)..(1049): n is a, c, g, or t
atgatttataagtttctattagcaataaaaaacaaaccagaacttatcgtactatcagtgatgatactggttataatgatgttaattatacctttgccaacttatttggtcgactttcttataggtttaaatattactattgcaattcttatctttatgagttcattttatattaaacgtatactgaactttatgacatttcctgcattattgcttataacaactcttttccggcttgctttatcaataagcactagccgtcttatattattagatgccgatgcaggagagatcattacctcatttggtgagtttgtcattggtgaaaatcttgttgtaggttttgttgtcttttccattgtgaccatagtgcaatttctcgtgattactaaaggatctgaacgagtagcggaggtcgcggctcgtttttctttggatggtatgcctggaaaacaaatgagtattgatgctgatttaaaatcagggatcattacgaatgaagaagttcagatcagaaggaaagagttaggacaagagagtcaattatatggttcattcgatggtgccatgaaatttataaaaggggatgcgatagccggcattgtcattatcttcgtgaacttaattggtggcatatcggtaggtatggctcaaatggggttatctattacagaggcattacatacatatacacttttaacgataggggatggattagttgcacaaattcctgctttacttatctctattagtgccggatttattgtaacacgtgtcggtggtgaaaataataatttgggctatagcattatgaatgagctattggcacaagattttgctttgcttgttacagctattttggcttttggtatcggttttttaccaggatttcccacacctgtttttcttattttatctgtaatgcttggcgtttacttttttaaaataaaatggaagagtagtaaaaaagaatataaaacagaagatgaaaaagataatcataatgctactaatgccgacagtaaaaaaggacttatgtnnnnnnnnnnatattcttttttactactcttccattttattttaaaaaaggacttatgtcaaatttattttctggtaaacatggggaagaagtag

SEQ ID NO: 298379 - DNA, 459 bp, Proteus mirabilis; identical to SEQ ID NO: 296276

SEQ ID NO: 298380 - DNA, 1125 bp, Proteus mirabilis
atggaacactttactaaaaaatcattatttacctgcgataaaactaatgaaaatctccctaataaaccgggtgtaataacacactgccaagatctagcatctgacttagggttaagcgaagcttttgcgcaatacacaatatcttatacttcttgtgacagtgttcatggagaaattatccgtgaagatactggtgctgtttttattccgaaaagtcaggcacctaaagatggttggcctgtcattgtatggaatcatggtacggtagggatagcgccaacttgtgctccctcattaacgcctaaaaatagtcgcgtatcgcaatatttaaatacttggctatcccttgggtttgcgattgttgcaccagattatccaggtttaggctcatcagggttgcatcattatatggatgaaagagcaacagcatggagcgctttggatagtgcaaaagctgtcttgaaaggtgggttttcgctaagtaatcgctttatctttatggggcaatctcaaggggctcatgctgcatttgcctctgtcggctatcagcctgaatatgcaccagaattaaatatcttaggtgcgatagtgacagggacgccttattttagtgataatctacttgaaaactttattagtgatggtgttcaagatgaaggtgatagaaagctaccttacgcgatgtacttatatctttctgctgctgataaaaatccaaacttaaaagtggaagattatttccaagaattagcaataccttatgttgaaaaagcgaaaacgctttgtatcagtccattaagtcaattagtaatggataataaattaaacgcatcaaatagcttaaaacctaagttttacgagctattagagcaagaagcgtcaagtttaaattatagaaaacttcttgttgataagcccgtatttatagggattggtttagaagatattcatgtgttaactcgttggcaacaagagtttgcaagagatgtattggaagcaggcacaaatgcatatgtatatgaatatccgaatattggtcatttagatgtatacaatgtctctttgcgaaattcagtgccttttgtatttgaactgatgaaaaatgagcatagcaaaatagactaa

SEQ ID NO: 298381 - DNA, 1452 bp, Proteus mirabilis; identical to SEQ ID NO: 296351

SEQ ID NO: 298382 - DNA, 210 bp, Proteus mirabilis
gtggatgtcggtttgccttgtgcggtattaatcataacaattgggcatattgggatgatggatctgattggaggaaaaacgattagagtaactctttgtgagcgaggtaaccgtattatccctcattccatgatagtggcaggacagatgtcaacaacctcactaggtaagcagtatttttattttgatgtgagggagtatggtgggtga

SEQ ID NO: 298383 - DNA, 705 bp, Proteus mirabilis
atgaataaaaaatttaatcagagtatcagagaaactatcacattagcagagcaacatggactcttatttcaagctggagctagttcatctttatctacacctgctgaggttatatcaaaaaccagaaaagcaacttcctataaagaagtatatgacacacttgctttatctcaatcatttaatttaatgatgaaagacaagtctttctttcaatttacagaaacagagcctaacaaagaagtacgattagcatattatcctaatccttaccaattctccgagtatatgtttgaaaaaagagaagctttggatttactgcataataaagaaatcactgatattgagtatgaacaactcatgtcagaagccgatttcacaagtgatattccagttataagatatgatttatcatttaaacaacactgcaatctgtaccatcctacagcgcattttcatattggttttcatgctgagaatagatggccagtgggtagactgttaactccaaaagcattctttttaaaaaccttgtacaattattactcggaaaagtggagagagcaagaagctactgatggtagcactgtaacaaatattttggactcactttatcgttcagagttacgcaatgagtgtcccctagtatcagatttagatccaaaaaaatttgaacgaatagaagaagaaaggttacactttagataa

SEQ ID NO: 298384 - DNA, 2118 bp, Proteus mirabilis
ttggaaaaaataatagctacagagattgaacctcaaggtatagataatgaaatactacactacctagaggttaataaggaaatcttaaaaatcgagaattcggtactctattacggtttccctgtgttcaaagattatgaggatcattcagtaaaatcaaaaattgctttgttatctaaaaatcacggaataattttaatttccacatcttcacaagcaaccatacaagaagatgatgaaaacctgagtcaagtatataatttcattgaagctgcaattaagaaaagtaagttactaaggctcaataaaagagaacttgctgttgatattgaaagcttcttattttgcaatcaacagattgattttgaaggtgaaagtgaagttttagattcactacctgcaattcaaaaagagctatccgattcggaacgaggtacacctctgactgatgagcatttcaatgaggttagatctataattgagggtgccaaagccctaagtaagtcagtaaaacgacataaaatatctgaagatcctgcttcaaaactcaacattctaattcaattagagaatgaaattactaattttgatattgagcagagaaaaatagctatcagcttaattaatggaccacagagaataaggggtcttgctggttctggaaagacagttgttcttgcaatgaaagtcgcacatattcatttacaacacccgactaaaaaaatactcttcactttctatacaaaaagtttgtatggactaatagttgaaatgatcggtaaattttatcgttactttgcaggttcagaacctaactgggaaatgatagatgttcatcatgcatggggaggaaagtcaatagatggtgtttgttacaatgcttgtatagataactctataaaccctttaccatttcaagaagctaaatctttaaatcataaagatccttttgatgaggtatgcaaacatcttttgtctcgccctattctaagtaaatatgactacatactaatagatgaagctcaagatttaccaaataacttctttaagatttgttatgaactatccaaaggagaccaagctcataataaaaacataatatggggctatgatgaactacaatccatatttaatgtttatcaaaggacgcccgaggagttatttggcacacatgaaaatggcgaaccaaaaatagatcttaagaacctaagtagaaatttaggctttggccaaacgaatgatttaattttgtataaatgctatagaaacccattggaaatactcataacagctcatgcattaggcttcggtttatatagcgaatcccccgttcaaacccttgagaatgaagaacactggaaggacgttggttacagacttgaggaaggatatgacttaactgtaggatcagagactatcattacgagagatagacaaaatagccctttatctatttataaatatcaatctcctcagcagttgattgagttattccaggcaaaaaatattgacgatgaatgttcttggattgtaagtaacattgaaagctctttacaacagggccttaaacctcatgacataatggttatttcaatggatgatcgaaatgctaaagcatatttttctcgcctatctaaaatgctttcattcaaaggaatacggtcaaacaacttattaatctctacttcagcagctccaccatttaaattagaggatatggttactcttaccactgtacacagagcaaaaggtaatgaatctgttgaagtttttgctataggtcttgatgcattgtttcctttacgttctagcagaagtggcagaaataaaatatttacagcatttactagaacaaaggcttggttaaaagtcagtggagtaggtagtagggttgatggcttctttgatgagatccaaaagagcatccaaaatagccctagcctcaaatttgtagttcctgatacagaaaaaattaagagagatcatgatagaaagcctcaacaaatcttaaaaattcaagaagcttatggtgaactgttggagcaaggatacacaaaagaacaaatccaattggagtttgggttagattttaaggatgcaggtttatacgatgaataa

SEQ ID NO: 298385 - DNA, 174 bp, Proteus mirabilis
atgggtataatgttacgccatatgggttggacagaagccgctgacttaatcattaaagctatggaaggcgcaatcgaagcgaagactgttacttatgatttcgaacgtctaatggacggcgctaaactgctgaaatatagcgagttcggtgacgcgattatcaaacatatgtaa

SEQ ID NO: 298386 - DNA, 294 bp, Proteus mirabilis; identical to SEQ ID NO: 297932

SEQ ID NO: 298387 - DNA, 354 bp, Proteus mirabilis
atggcactttccgatactaaggttcgttctgcaaaatctgaagataaagcgtataagctgacagatggtaacggactatttcttctggttcatcccaatggttctaaatattggcgcttccgttatcgcttcggcggtaaagaaaagatgctagcatttggcgtgtaccctgatatctcgctagcgaatgctcgagaaaaacgagatgaagcaagaaagcttgttgctagtggtgtagatccaagtgaaaaacgcaaagaagtgaaagaagagcaacaaaaggaatttaatacattcgagaaagttgctcgcgattggcacgcgaccaataaggcgcggtttttaactaactag

SEQ ID NO: 298388 - DNA, 897 bp, Proteus mirabilis
atgaaagccacctcagaagaagtccaagtttttattgcagtggttgaaagtggtagttttacacgtgctgcagaaaaattagcattagccaattctgctgttagtcgtacagtaaaaaaacttgagtcaaagctaggcgttaatttattaaatcggactacgcgacaattgagtttaacggaagagggggagcattactttcatcgtatgcaagttatcttacaagatatgaaattagctgaagatgaattaattaatacacaaaaaacaccacagggtctattacgtattgatgccgcaacgccggttgttttgcatctactggtgccttttattaaacaatttcagcaaaaatatcctcaaataaccctctctttagtttcatctgaaacatttatcaatcttattgaacgtaaagtagatatcgcgattagagtcggtaatttaacggattccagtttacgggcaaaaccactattgaatagttatcggaaaatcgttgcgaccccggactatctcgcccgttatggacagcctaaaatcgcagaagatctgcttgaccatacttgtctaacttttactgaaccagtatcactaaacacatggcctattgagcgagataatggacaattattagaagctcctatgggaatatcgtcgaatagtggagaaacgataagacaattgtgtctcgaaggtaatggtattgcttgcctttccgattttatggtggttaatgatatcgaaaatggtcgatttatcgaattattccccgataagctgcaacctatcgcaatgccttttaatgccgtttattatagtgaaaaagtggttagccaacgcatccgtgtatttattgattctctgagtgagtatattgctaaaaaagtaggttaa

SEQ ID NO: 298389 - DNA, 1500 bp, Proteus mirabilis
atgaaattaaagcagagtgcttgtctcgcttttatgatgtttccggcgctgtcttttgctaataatgagtttaattttgtcattgaagattttgaccgttatttagaagcacaacagcccgttgatattaagcctgaaccctctgcaacaatttcatcttcatctactcccgatcagcgtagtggaacggtgcgttccactgtgacattaaaggaaaagccaccacaaaaaccacaacaaaaaattcagcctaaacagcctgttgtacggaatgaacatcaaaccgtggtacgcaatgagcatcagccagtagtggcgactccctctgtacctcaggtgactttgtctgaacaatgctctgtggtatctacaaataccaacaaaataaacagtgattacactcattatttaacaccactgctttcgtttgtaccgattaaaccgcaatttacccctgaggacttgaatcggtattatcaaagtaaatccgtggtctataatcctctaatgctttatacgcgtaagcgttatccagggcagccatatcagtctactgataatactttattagatttcattccaaatacagtgtattcagtgactgaaataccttttcattttttatatcaatttaaacgttctttgcttgaccataagcaacctctctttaataaagagctattaaatcgtttagcaaatattcgcgaaaaatatcaacgtctgtatcagaaatttactgaacaaaccgcgttattaactgaaagtttaactaaactgcaaaccgcagaagaaaaagttcaacaattaacagcggaattggcaaaaacgcaagataaactggctgtagcgaataatttacttaatgatgatagcctaaaacagtctgtggctaagttacaaaatgaattagcacagtctaaaaaagagcaggatacgttgcttgtacaattagctgaaaaagatcagttgctgtttgatgcgacagaaaaaaataaagtattaactaaacagcaagaagattttgatattcaggcacaaaaattaaatcaattgactacccatgttgctcaacttgagcaacaaaaacagcagctacaatcacaatatgggcaggctcaacggttattaacaaataacagtgctaaaaaagagattgaggtactacaaaattctttaactaatttatcagcagtgcgccaatctttagaaaatcaattagctaaaaacaaagcctcttttgaagctactctagctaagaataatcagttaattgatacccaacgccaacagatagctcaacttaacgatcacataaaaaaaataaaccaagagcaacaacagttaaatcattcgttagtgactcttcaacaacaaaaagcacaagcagatgatcaattaacacagatcccagcgttgaagcttgagttacaaaataaggttaatgaattagctgagctgaaaaaagtttatctacgggtgagaaagcttttgatgctttga

SEQ ID NO: 298390 - DNA, 906 bp, Proteus mirabilis
atgaagtatgatctaaatgacctctattattttgttaaagtggtggagtttggcggtttttcacaagcggccgaaacgttaggtattcctaaatcaaaacttagtcgtcgtattgctgatttagaagagagactaaaggtctcgctgatctatcgttcaactcgtcaatttcatgtcactaagatagggcaaactttttaccaacagtgtaaaaatgtcgttgaacaagcggagattgctcaagaggttatttgttcagctcaagggcatcctcacggcacgatcaaactctcttgcccagttgcattactgcaaatttatattcaagatattttggtggattttatggcaaaatatcctgatatcaatatacaaattttagcgatcaatcgccctgtggatgtgatcagtgaaggtcttgacttagctttacgagttagagcattacctttggatgattctggcttaacgatgaaaatattaggctattctcgccgtgttttagttgctaatccgctattatttgcaaccaacagtgcgcctgattctccagagcaacttgctgattatcctattttagctaatagcgaacattcgcagcagtatacgctaacgcttacccataatgatggtaccgtttcaacgcaacatgttacacctaaattagcgacaacggatgtgatgactttatataaagcaacattaaagggacttgggatcacgcgtttaccattgagtgtcgtagagaaagagttagcagatggctctttggtggaagtcttaccacagtggcgttttcctaaagatgttattcatgccgtgtatccgtcacgaaaaggtttattacccgctattcaagtgttattagattatttagcgcagaatatggctccatataaagagtaa

SEQ ID NO: 298391 - DNA, 486 bp, Proteus mirabilis
atgaaaataaaatcacttattgctatttcattattaagtgttagtgcttctctttttgccgctgaaagcaccagcacaacacaacaagttcaaggcgtaactcaagcacaaaaagatctcaatgattatgaaaaagtcatggtagaaaaagtttgggttaccacgcaagccattgacgagaaaggcaataaagttgacgctaataatccacaagtcagtaattattttggcctagcagaatattatcctaatggcacttttattatgtttacccctgaaggtaaacaaaaaatgcaaggggattggtcaatgtctaatgatggaaaaacgcgtacattagttgccaaagatgcacaaggaaaaacactatttactcgtgatgtagaaaatatcaccatcaataatgatgagtatacctatcgtatttacccaactgaaggggataatactgtttattttgatattattcatcacgttaagaagtaa

SEQ ID NO: 298392 - DNA, 1920 bp, Proteus mirabilis
atggatgcgcaagatgtcagttcagtctctcaagcattgcggtatacacctggcgtattcactgaatatcgcggcagttcaaaccgaaatgatgaaatatttattcgtggatatagctatgccccccgttttcttgatggacttagttatggtatgggagcctcatcttctacaggagctattgacccttggctattagagagagttgagctgatccgtggcccgtcttctgttctatatggtcaattaaatccaggtggtcttgtggcaatgaccagcaaaagacccacttcaacaaccattaatcatattcaagcacgtgtaggaaatgataaattagcagagacagcttttgattttgcaggctcattaagtgatgataatcgtattctctatcgccttaatggattagcaaaaacacaacatactcaaattaaagactataaagaagaacgatttgcccttgcccctgccatcacttttttgccaaatgagcagacacgtttaacgttattaagttttattcaacaagagcccgaagcgggataccgtaattttttgccagcttatggtacggtcaaaaaaacacccgaaggcaccattccatttgatttcaatgtaaataatgctgattatcaccaatcatggcgtcaacaatatggcgttggttatgaatttgagcatgaatttaatgatagattaaaattgatccaaaatgcccgttatagccatatcaaacaaaaatataaatatcttgtttttggttcattaagaaaagataacccttatattcttgaacgccgagctcaacaagaaaaacgagaaacagatacatttggtattgatactcgactacaagctgattttgatactgaaaaattagcgcatacagtaattataggtattgattatcaatggagtaaaaataaagacaatttattgcaagcgatgggcccagaatatgatctggattggcgaaatcctaattatcattatcctattgatatcagtttacaaaaaccggtgacaaatcaattacaaaaacacgaccagttagggatctatttgcaagatcagatccaatggaaaaactggatcttattagggggattacgccaagattgggcgcaagttcgtacctatgatcacatcaaaagcagcaaagaccaacaagacgaccagaagctaaccggtcgagtgggtctactctatgcctttgataatggtatttcaccttatattagttatagcacctcttttgaacctaatttacagacacgaagagctccgggtagtgcaccatttgagccaagtgaaggacgtcaattagaagcaggaataaaatacctcaccccaaatgaacagacattagcaacactctccatttaccaattacaacaacgtaatgtgactaactataacgccgaaaaagcctattttgagccagtgggagaaattagaagccgtggtattgaagcgcaaattaatagccaattaactgaaaatatatcatttattagtagctatgcttataccgatactgaagtgagaaaaaccatcaccgcaggtacacaaggaaaagaattaccacgggttcctaaacatatggcatcattttgggggcagtatgatgaaacatcagggctatttaatggtgctaaagcgggctttggtgtgagatatatcggtgtatctcaaggtgacactaaaaatacgattagtgtacctgcagtcactttgtatgatgccatggtaggttattctttaggcgagttatcctcctctttaaaaggggctgaagttcaactaaatatgaataatattgccaacaaacactatgttgcctcttgtgcgggtgaaactgcctgtttttatggcattggcagaaccatgacagcaacgataaattaccgctggtga

SEQ ID NO: 298393 - DNA, 1056 bp, Proteus mirabilis
atgcggaaaattattcatgtcgatatggattgtttctatgctgcgattgaaatgagagataaccctacattaaaagagatccctattgcagtcggtggtaatgcttctcgtcgaggtgttatctgtactgctaattatcctgctcgccgttttggtgtccgtagtgccatgtcaacggctacagcattaaaattatgtcctcatttaaaagtattgcccggtcgcatggcattatataaagagacttcagctaaaattcgtcaaatatttgcccgttatacagatttaatagagccgctttcattagatgaagcttatcttgatgtgtctgatagcaaacactgtcacggctctgccacattgatagcgcaacagatccgccagcaaatttttgctgaacttaacctcacggcttccgccggtattgcaccgattaagtttctcgccaaaatagcatctgatttaaataaaccgaatggacaatatgtgatcacccctgaacagatggatgactttattttaaaattaccattaaataaaattccgggagtaggaaaagtcacctttgctcgattacaagagatgggattagaaacctgtgctgatgttcgtggtacggatgttatttccttagtgagaaatctaggtaaatttgggcaaagcttatgggagcgtagccatggtattgatgagcgattaatcaatcctgaacgtttaagaaaatctgttggtgttgagcgcacactggctgaagatattgattcatgggatgagtgtttagcattgcttgatggattatatgatgaattagaaaaacgattaagccgagtgaaacctgatcttagaattgcgagacaaggggttaaattaaaatttgatgatttccagttaaccacccaagagcattctcatcctattttagaaaaaacggatttaattgatattgcttatcaggcatggcatgaacgtcgaaatggcaggggagtaagattagtcggttttcatgtcacgttgcaagatccacaaatggaacgacaacttcttttagcattataa

SEQ ID NO: 298394 - DNA, 738 bp, Proteus mirabilis
atgtatccagttgacttacactcacataccattgcgagtacacatgcttatagtacggttagcgaatattttcaacaagctaaaaagaaagggattaagctatttgcgattacagatcatggtcccgatatggatgacgctcctcatgaatggcatttttcaaatttgccggtgatccccagaatggtcgatggtgttggtattctttatggcatcgaagcaaatatcaaaaatataaaaggtgaaatcgactgtactgagaagatgagtaaaaaattagatattgtactcgctggttttcatgatcctgttatgggatcactaggtatggttgataatactaaagcgcttattgcaacaataagtagtggtttagtacaggtgatcacccatccgggaaaccctaaatatcctatagatattaaggaagtcgcaaaggttgctgctgagttcaatgttgcattagaaatgaataattcttcttttatacattctcgagtaggaagtgagaaaaactgcattgaaatagcaaaagcggtgcttgatgccggaggtttaattgcgcttggctccgattcacatattgcatcatctttggggaattttgagcgagtattagaagtattggcggagatccaatttccacaacagaagatattgaatacatcaccaagaaaggtgcttgattttttacaagctcatggcaaaaaagagatcacagcgtttcaacatctttga

SEQ ID NO: 298395 - DNA, 1497 bp, Proteus mirabilis
atgtttttatttaaaaaagctgttatcgttttgtcaattaatatcgcattagtttcttcggctctggcctgcacaacgttattagcagggagtgaagcaactaatgatggctctttgattgtagctcgtagcgcagatagtgatgctttaaaagcacaacattttgttattcatccagctaaaagcaatcagactggcatttatagtactcaagcccatcatggcgctaataactttacttatccactacctaaacactcattacgttataccactgtacctaattggaaaactcaattgcatggtgcaacgggttttaatgagctaggcgttggggtgagtggtacagaatccatttttgcctcacctaaagcattggcgttcgatccttatgttgaagatacggggatcactgaagatgatattccagatattttactctcaagggcaaaaactgcccgtgaagcaattgaattactgggaaacatcatcgaaacacaaggtgcgggagaagggtttggggttgccgtcgttgataaaaatgagttgtggtacctagaaacaggtacaggtcatcaatggatggcgcaaaaactaccaaaagataaatattttgcgacgggtaatcaagggcgtttacaggcttaccatacagatagtaatgataatttaggttctaaaaacttagttgagtttgcaatagaaaaaggactttatgatcctgccactgatggcgaatttaatttttctaaagcctatacgcgtgatgatgaacgtgatctcacttataattacccgagggtttgggttatccagcaacaatttaacccttctctgaaacagaatgtggcagatggtcgtcaatttgcgcctatgctgacaccggagaaaaaagtatcagtagaagacgccaaagcgatgttacgcaaccattttgacggtacagaacatgatccttataccaatggattgaatggcaatgaaccatggcgaccaataagtgtgtttcgtacttatgaatctcatgtgatgcaagtaaggcctgaattaccgcaagagattggtgaagtgacttatgttggtttgggaatggctgatctaaccgcttttgttccttattacagtggattaaaagcatatccgcaacactatgctattggaacagataaagcagataatgactctatctattggaaatatcgtaagttacaaacattagtaatgacagattatcctcaatttgctcctattgttaaaaaagcataccaagaatgggaagctaaaacagcattagaacaaaaagaaatggaggctaactatttgtcaatgagtaaaaagaataaagcagcagcggataacatgctgaatgaatttaacttacgtgtaatggctgatgcagagcaactaactgaaaacttaactaatcaactctttactcttaaaactaaaaatatacaagatgagatcttttttgctaatcaatctaaaaaagattaa

SEQ ID NO: 298396 - DNA, 1137 bp, Proteus mirabilis
atgaaagatataaatatagaattagattttggtgcaattacaattgataatgcgacgtttaaaggtgaaggctataggttctatgaaggtatgcttgctcagatgaggcagtttaaagaaagtcctgtacaggttcttcaaactgatatcgttcataatgaagctattaatcacattgggcaagaaatattaaaaactcgcactttaattgaccaggcattaagatcagctgataaacaattaaaaatagaatctaatattattaataatgcaagagaattactatatgttgatggaactgaagctgaaatagccgaaaaaagattagaaaaatattatgagtttattggtgctgaaaaaattctttctgaagaatatgttgaactgcctgaattgatgaaaatgtatttttctactgaggccccctttgaaacaggaaaagacaaaaaaaatgaatttccagatgccattgcactattagcacttgaaggatgggctacaaaaaatgaaataaatattgtggctgttagtcaagataagggatggaaaaattattctgaaaattcagataggatcacattagtatcatctttagctgaagcgttggagaaattccaacctcacaataaggttgcaagtattattgctcatattcgggaggattctctacttgaagatgataatcatgtattagataaaattgaaaaggctatcgagaatagcattgataatcatgatattttaattgaagcaagttcatatatgcactttgaaacggatgatacttctataacatatctttctcatgtgctggatagtgatccagatggattagttcaagttagtgttataagtattaatgatgagactatagttttaaaagtaggggcaacagttgaagttgatattgaagccagttttaatttttcagttaaagattcgatagatcgtgattatgtttatatgggaggtaatgtttgtactataactgaatcctaccatactgatatattgttgaccctttctggtgatttttctcaagattttgatgatattgaagttgaagaaattgaagtattagagactattaggcatgctgattttggtgacgtagaaccagattggataaatgaataa

SEQ ID NO: 298397 - DNA, 339 bp, Proteus mirabilis
atgatgaatattaaagctaaacgagatattgcacataaaacaaaaatcttaaatcatgcccgtgagagtaaaaatattgctaaaacttgtcgtcattttgtgatcagtagagaaactttttatacttggaaaagagcttatgaacgagatggcgagaaaggattaatcaacaataaaccctgctctgaaaatccaaccagaagagttataaaacacatcgaagagatggttatttatctgcgtacgacttaccatttttattccaacgtatcgcttggtatcttctactgtttcataacatcaaaatatcacgttctggtcgctactatgtattactaa

SEQ ID NO: 298398 - DNA, 531 bp, Proteus mirabilis
gtggagttaaatgatgataacttgcaatccagtaatctatctgaatctgattttttaaatcgcgagtttagtggtttcactatctctgatttaggcttagacattaacgtaactgaagtacttaacaaacgaattgaagaaattgaaaaaacatataattcggccgcttatctttctacgatactaatcgctggtagtaccttagaaggggtttttcttggattagcttctagttatccgcgagcatttaatacggtgaaatcatcccctaaaggacgtgatggtaaagttcaaccatttcatgattggaatcttgcagcctttattaatgttgcaaaagatttagaactaattcaacttgatacttataagttttcacatactttaagagatttccgcaattatatccacccttatcaacaaatgttatcgggcttcacacctagagagcatacagctaaaatttgtttacaagtgctcaaggctgcaattactgaaatgacatcgaatgttaaaaaactacgttcctaa

SEQ ID NO: 298399 - DNA, 1527 bp, Proteus mirabilis
atgatgcaacttaatataattcctagaaagcaaaaaattccaagttcaggaataaatactgcatatttagaagttgacctttggaatgatttttcattcgtaaccatgttttatttatcgctacatgatgaaaaaggtgttttacataatatagggagtataaaaattggctttaaggggcaaacaacagatatatcaacctattctttattaggtaacggattttatcaacttccagaagattatttttctgttgggcaggatctagaatattatcaaaatatttcaatactacctgaaaatataagaaataacttacttaatgcattgaatgatatagtttatctccctaagctaattgaatttgctcaagaggaagatgtttttcggatatcattgctaagagacgtcagtttatccgttataaagggacagttctctagagtattggaagggcttccccctttaactaattttgagtttaaatatatgaggcctgaaacaaaaagaatgtcaggtatcgagttgaagtttaaagtagaggtagagtctagaccaagcactaatattcatgcaattatcgggcgaaatggggtagggaaaaccacattattaaatggaatgattgaatctattaccagcaaaggtgaatctgaagctaagttctatgatattgaaggatggaataataatccaatagatactgattattttagtagtttagtttcggtttcatttagtgcttttgatcctttcgaaccaccgacagaacaacctaatccttctatgggaacatgctatttttatataggattaaagaaaaaaggagatgttcttaaaggacttgttgatattcatgaagattttctccaagcccttagtttgtgttttagtcaagattcaaagcgagaacgatggctaaaagcgatagatacacttgagtctgatgaaaactttgcgaatatgaaattgaaagatttagctcaattttcgggtaacaatttatccagtaatgctgaaaaaacaattaaaagaatgagttctggtcatgctgtagttttacttactattactagattggttgcaactgtagaagaaaaaacactagttttaattgatgaacctgaaagtcatcttcacccacctttattatcagcttttattcgagccctatcggaattgctttatgatcgaaatggagtatcaataatagctacacattccccagtggttttacaagaaatccctaaatctagtgtatggaaaatcaatagaattgggttaattacgaaggctagcaggcctgatattgaaacatttggtgaaaatgttggtgtattaactagagaagtatttggtcttgaagtagttaaatcaggttttcatgatttattagttaaatcagttaatagtggtcgtacatataaggaaatagttggtgattataaggaacagcttggtttagaagcaagagccttgttaaaaacaatggtaatacatcgtgatagagaaattaataaatgttaa

SEQ ID NO: 298400 - DNA, 204 bp, Proteus mirabilis
atgatggcaaataccgcagaaaaggataaccaaaaactagcggataatatggcaagcggatcaagcaataaaatcactgccgcactccaaatcgcccactgccaaggtaaaaaaagtccactacgccaatggagtaaaacccaaatagttaggcctattatcgctctggttgcggggatcccccatcctgataaagctgcataa

SEQ ID NO: 298401 - DNA, 438 bp, Proteus mirabilis; identical to SEQ ID NO: 296602

SEQ ID NO: 298402 - DNA, 585 bp, Proteus mirabilis
atggatcgtctctggctaaaaagaagaatttatattctcagtggtttaactatccttcttttcttattacaaattatagggagcctcttcccagtccatcttcttcaatatggtattattccaagaagcagcgaaggtttattcggtatctttatttcaccttttattcatggctcatggtctcacctttttagtaatttattaccttttcttatacttagctttttattgatgacacagtcattacgagaatattgctattcaagtatttttatcattatcatcagtgggttattagtttggttgtttgggcgtaacgctattcatgtcggtgcaagtgggtggatctttggattatggtcactgctaattgcccatgcttttactcgccataaaattatcgatatcgtcatcgccttatttgtgctgttttattatggctctatggcttatggattaatccccgggcaattaggggtttctacagaatcacatatcgcaggcgttatctctgggttgctttatgcttggtgtgcaagaaaaatcattcgtcggaaaagccgtgtagtagaaataataaaatga

SEQ ID NO: 298403 - DNA, 405 bp, Proteus mirabilis
atgaaaaaaatactagttttattaattggtagtacattggcttttgcatctcaagccaattcaaaccaacaaaatagcggtggttttgttgccccacaaagcgctatcaccaccacagagcaaggtggatttaaaggtccttcaattagcgaaaccaccgttgctaaagcaaaaacactttcagatgatacttgggttatcttaacaggcaaaatcaccaaaaaaattggtgatgagctttatgtttttgaagacacaacaggtgctattaatgttgaaatagaccaaaaaagatggcgtggtcaaaccgttacgcctgagaataccgtaaaaattgaaggtaagatcgataaagagtggacaagtactgaaatcgatgtaaaacaactgagcattgttaaataa

SEQ ID NO: 298404 - DNA, 336 bp, Proteus mirabilis
gtgacattagatgctattgttgaaaatagtgaagaaaatgaagaggatgagcaaaacgatgccataatagaagacagcattgatttagctcaatcacttgatttaaattcaattggcgctattccgattacaatatcttttcttttagccaataaaacattatcaattgatcaacttgaagaattaacaccagggaagaaatttattttacctgataatgccattcgtcatattaatattttagcaaatggtaaagctattgcccaaggagaattaatcaaaattaaagatatgttagcggtagaaattaacaaattatctataaaatgcgaataa

SEQ ID NO: 298405 - DNA, 672 bp, Proteus mirabilis
atgaaaaaaatatttatggttgccgttatatcttccttattagttggctgtaaggttgatttagaaacgaaaataaatacagataacttattgtctagtgagcaaaatattgttaaaggagatattaatttcgaagtctcttcatgtaatgattttgaagactcaaggaaagagtctaaatcattgatagaattaaaaaataaagttcctgagattttcagagatgcggaatatgttgaatgttataagcaaaaacttaattcattcgcccatttctcaatacctgttggtgttggcaaggttgaagacggccaaaacactgttgatacggatctaatggtcttctcttacaaagagatattggcgggggtttatgcttcagaaggggtaattaaaaggatcaagcaagcagaaaaaaattcacatcaaaagatggattttagtatcagcattattcttatgcccggtaacgtgaaaatggataaggtagttgcgttaggcgtgacatttacaggagatacatctaaaaatgatccagtattaataagcagaattaaatttggcaataaaccactgacttttaaattatcagatgtgtcagtaaaccaattaatgcaatacggtatggttccattcttagtaactcctgaatatttcacactatataagtaa

SEQ ID NO: 298406 - DNA, 897 bp, Proteus mirabilis
atggatgtttttgcagttaaaaatatttcattaaatttatctgcatcgagatctaaatactatggcaaagataatgatgtcttctttgcaagagtcagtattccattagagaataatagaggatttataaattatgatggctcaagaaattcggggaactatacgcataatatagggtactttaataccactgaagataacttagctaattataatttaaatgtttcaacgacatatggcgatgatatggatagtagttcaagcttctctggctattatggacgctatacttcaatcgctaatattaatgcgaatgccactatctcaaataaaaatacctcatcatttggtttttctgctaatgggggcttaacgattaccgctaaaggagcagcacttcacccagatggatttaatggtggtactcgcttattagttgatactgaaggtgttgcaggagtaccagttgatggtggccgtgtaacaaccaataattggggttatggtgttgttaccgatattaatagttattatcgcaatgaaacaacgatcgatttaactaaattacctaataatatagaagcgacacaggcgattgtagaatcttcattaactgaaggtgctattggttatagaaaatttgaagtgttaaaaggtgagaaggcctttgcaataattaggttagctgataactcttatccaccatttggttcaataattagtaatgctaaagggcgagagctaggaataattagtgatgatggttttgcttggctaacaggtattaacccaaatgaagaaattagagtatcttggggagctgaacaacaatgtgtcgctaaacttccaaataaaatagaaccgagtaataagatattattattgtgtgaaaaataa

SEQ ID NO: 298407 - DNA, 711 bp, Proteus mirabilis
atgaaaaaaatatcatttttattattaggattaatggttacatcaaactcctatgcagcaatttctttagatagaacaagagctatatacgaaggtgggtcaaatgcattagttattaatattactaatgataataaacaattaccttatttagcccaaacatggattgaaaatgataagaatgaaaaaattgagctagggccattaattgccacaccattagttcagcgattagagcctggtgataaagcgttaattaaagtatctgcgacaccagatattgaaaagttacctaacgatagagaaacattattttattttaatgttagagaagttccacctaaagctgaagacaataatgtattacaaattgccttgcatacaaaaataaaattgttttatagaccgaaacaaatattgagagagccaaatgctatttggcaagatcaattagttttaaataagctatctgacggttatgaaatagagaatccaacaccttattacgtcactgtattcggtattggtggttcaaagaaagaagcggttgattctgagtttaatgcagtcatgattgcccctaaatcgtcacaaagggttaatagtaaagtgtactcaacgccatacttatcttatataaatgattatggtggaagaccgacaattaaatttcaatgtcaagctaatcgttgtgtagcagagaaaaaataa

SEQ ID NO: 298408 - DNA, 564 bp, Proteus mirabilis
atgacgatttgccacggtgcgccacgcaacacttttttagtattaatcgtacggcctttggctgcaattacccaaagaattaaagcaccaattgccgctattgcactaacaggaatgcctaatggctctaaaataaaaaaaccaatgagcaataacaacaatacaagccaaccggctttaaacgtagtcatatccttaatagctaaagctggctcactcagctttttaacatcatattggttaggaatatctttacggaaaaaccaatgtagcatcacaagcgttgcaacaattcccgcaatatcgactggcaccataattgatgcatattcagtaaatccaatattaaagaagtccgcagaaacgatattcacgaggttcgaaacaatcagcggcaagctcgctgtgtctgcgataaacccggcagccataacaaaggctaatgtcgtacctttgttgaaaccaagtgcaagtaacatcgcaatcacaataggcgttagtatcaatgctgcaccatcattagcaaataaagcagcaaccattgcaccaagtagcacgatataa

SEQ ID NO: 298409 - DNA, 336 bp, Proteus mirabilis
atgaaaccattacaactgtttaaaattttaggtgatcaaaccagactagacatcgtattgcttttaaaagcatctggtgagctatgtgtttgtgatatctatactgccttaaatttatcgcaacccaagacatctcgacacttagctatgctgagagagtcgggtcttttgctcgattcgaagcaaggcaaatgggttcattatcgattatctcctgtattactaccgtgggtgaaaaatattattgatataacttacaccacagagaaaaatagagttgcagatttactcaagatcctagagaaaaaagagtctggtcatcgttgttctgtgtaa

SEQ ID NO: 298410 - DNA, 1206 bp, Proteus mirabilis
gtgaataaaagagcactttcgacaaagtatcgaaattcgatgtatccatcaatgataaaaaaaatagggggatacggtttatcgttattcttgataccaataatattctttcattccgctaatgcgttagagttatccgttcctattggctcaacaggttatttaggggaggtcactccgccagttggttcaacaacgaaaaattatgggatggtaagttcagtgcttcaggcgaatagatcttatataagttttcggtgggagcctagtcaatttgtgataagtgacctgcctttttaccccgaaatcggtcgagtgggtgtggctatctacaataaaagcaatcccaaaggggcctttattgttttagcacccagtggatatggtttgttgcgttataaacgggctaacgatacatatgagaatgcttcattttcatttagtcgttccaaaaccaccgctatgacaaatatgtataataattttccctctaattctgatgaattaagttggggtcttttgcccagacaaggcaatagtaattttttctcagcacgatacgtagatggtagtgataaagttcattcgttaacattaacaatatccagttattccgcgtatgccatcgggccattagaggccggtgaatatgccatgcgtgatgattcaaaattttatgccgtcattcgcactagttcaggttcttttgcaagatctaaaacattattaagttcagcggataatgtgaatattaaagcactcaaagcctgtgacgttatcccccaaacgtctaccaatattcagtttccgactcaaatcgcgaaaaattatgcaacacccactaaattagcagataatttagccagtatcagtgtcaattgtccttatgctaataaaaatatctatctcaccctgagcccttttaataatttagtctcaggcagtgaaacagggatggagctatccaccagtagcactgaaaatatcaccacactgccttatgtggtggcttctttaaaatctgcacaatcaaatatttgtcaagccaatgcacaagaggccttacgactcgtcggtagtaataaactagcacaacaaaatatgaagagttttacgcaaaatataatttttaacctttgtgctaatggcaatatcaaagccaataaatatacaggggcaattaatgtagcaattttaattgaatag

SEQ ID NO: 298411 - DNA, 438 bp, Proteus mirabilis
atgattacctgtgatccactggttaaatgcaggggtaaaatcttcaaaaagcatatttgggtgataaaaagggaaaaagtgagggtcagttatcgcatcttctggcggttgtcttacccattttttaccagactcccatgctgtccatgtaggttcatattgagaaatgccactttcagtggtgatagggagtgctatccagtaaaaccgttcaatacaatcttggtagatagatttcatttttataatatgatctatagtcgcagaatattgaacttcccaatcaagaaacatcacattaaattttctatgttgttttcgcgcttgtgcggcaacaagatgaaaaagcgcagtagaatctttccctcccgaaaaggagagagtgatttgttcaaaagtatcaaatatccactggactctctcttgagcagcttctaa

SEQ ID NO: 298412 - DNA, 525 bp, Proteus mirabilis
atgagaaaaagctttattgcaatgttgattgctacaacgtctatttttgtcgcgaataatgcattagctgcagatggaacaatcgattttacaggagaaattatcgataacgcatgtgaattagcagctggatctgatgctctaaaagttaatttaggtaaggtatctaaaacagcattacctagtgccggagttactgctgcggcaactaaatttacgattaaattaattaattgccctgcaacagtaagtactgcatctgttaaatttgatgcagagtcttattctggagacgatactgttattgcgctaaaacaagagtcgggagtggcaacaggtgtcggtattcaaattacggatgatgcaaataccgttgtccctttatttaccgcatctaaaacttatccattaaaagaaggtgttgaaaataatttagactttagagctcgttatattgctaaaacagattctgtcactgcgggtttagcaaatgcgaatgcaacatttactattaattataattaa

SEQ ID NO: 298413 - DNA, 546 bp, Proteus mirabilis
atgaaaaaatcattattttcactattaattctatctacactttctttatcaacacaagctattgcacaacagattcaccttggtggttataatatagatatccaaggcagagtaattgacgagaaactaacttgtgtcgttcaagatgttgctccaattcaattggatgatgcttacattgattctttactacttactcctgaaaaacgatttagtgtggatttttctggctgtactaatcaagaaagagcaagaaaagtcaaaatagttgttgcacgacaaaacactactcatttaatgaatgctagttcgacagcaaatgataccaatgctcgagtagcattattgggttctacaggtgaacttgttccacttaatggtgagaattcacaacgtacattttcttcggaggttgccggtgatagtggtagattagtattttcattaaaatatgatagacctgaatcgattgatgatgctgttaccgcaggtgctttcaaggctaccttatctcttgatgcttacatcactgataatatccaataa

SEQ ID NO: 298414 - DNA, 486 bp, Proteus mirabilis
atgaatattagtttaatcgcagcattagcggcggatcgtattattggtatggaaaaggcgatgccttggacattaccgggtgatctcgcatggtttaaaaaaaatacattaaataaacccgttattatgggccgggtgacttatgagtctatcgggcgtcctttacctaatcgactcaatattgtattaagcagtcagcctggaaatgatgacaatgttgtttgggtgaaatccgttgaagaagcactacaagctgctgaaaataatgatgaaatcatggtgattggtggcggtaaggtttatgagcaattcctaccaatggcgaataaattataccttactcatattgatgctgaagtgattggtgatacaaccttccccgattatgagcctgatgagtgggattctacttttatggaataccatgaggcagatgaaaataattcgcataactactgttttgaaatattaaaaagaagaaaataa

SEQ ID NO: 298415 - DNA, 288 bp, Proteus mirabilis
atggcaggaatactgctatttgatatcaaacctatttataagtttgatgatatcggcgttcttgaccttagagtttgctataacggcgaatggtatacttttgaaaaattatctgatgaagcgattaatgagatacgccagcacccggctatcccagcgcaaataaaagaagacatcaatgacattatacgcacaaaacaagagatacacttttatgacgtgtatttaatcgcattcgatcccatcaccaaaccgatttcgtcagaaaaattatcaccccaagtctaa

SEQ ID NO: 298416 - DNA, 258 bp, Proteus mirabilis
atgcttgtctcttgtcctcattcaggaaatatgtatgtgacattaaaaccctataatgagctagtcaatgggagtaaaactgggatgacaatgtctccaagtatccctttgaaaaataaagaagttgcaccttatatcacggtatctgatgcaactaaaacaataactaatgcagtatgtaataacaattcctccgaagctttagagttttatgcaggacaaccttcaggcaaatataatggggggatctgtttataa

SEQ ID NO: 298417 - DNA, 696 bp, Proteus mirabilis
atgaaaaaagtattactcagtcttgctatgctgagtgtaatatcaacgccggtattggctaaagctcctgtagctaacttaaaaatcaatggtgatattaagccaccaacttgtactattaatggggcgacacaaagtgatatgatttttgattacggagtcataagcccaacgcttatccctcaatcgaaaaactacgaatatcctaacggtatagtccaaaatacagttacgattgaatgtgatgctaaaacatatttaacctttgttgcatctgacacttatgacagtgcggaattagctaataatacgctagcacagtttcatttagttgataaagaaaatcctgaaaccgcagttggagcagcctcttttttgtgggaggatgtgactgttgatagtaaaccagcgtacatttcacgagcaaatgatgttactatcacagaaacaaattactataacgttctatacaaaggcgcaaccaatggttggacatcagaacaacaaaaaggcaatgttagtaaagaatctctggcactaattccaggtgaagttttccaagcagtttttaaagatgtatataaaattccttcttttcttttatccaaagatgcattaaataaaaaaggaatagatttatctaatggcttagattttatgggtgaagctgttctcacttttaactttggtgtctaa

SEQ ID NO: 298418 - DNA, 285 bp, Proteus mirabilis
atggaaagagaaaaatacgaaattgataaaacttacgatactaaagctattcatcaatacttagggaaagagatccgttcaaaaagaaaagcgataggactaacaggtgaagatttagctaaaaagttaaatgtcagtcaacagcaggtatctagatatgaaacagcagagtcaaaaataagctttgaaaagctattgttaatatctgatgttctagatcttaatattcaatatctattaaaagttatcattagtgataaatttaaaattatttctgatgattag

SEQ ID NO: 298419 - DNA, 561 bp, Proteus mirabilis
atgaaatttaataaaatagcattaacagttctattagctacttcagctatttctttaaatgctatggctgataatgctaatacaggtgttatcacatttacgggttctgttgtaaatacgccttgtaatattgctcaatcttcactgaaacaaacagttgagtttggccaactttctcgtaaagccttagaaagtggtaaaatggttgaggctgattttgatattgaatttacaggttgtgattttactaattttggtatagatgccactagtggtaagcctgttccggttaaatcaatggaacttgtctttactggacaaaattatgctgatacagcaaatacattattggctacttctgctggtaatacaaataacttgggaattttaattgatggttttgagtttggaaaagcaaaagatgttttaccaagtattacaaatctaaagggtgataatgtattaacctttaaagctcttgctaaagctgttgatgcaagtaaagatgtttctgaaggtaaatttagtgcaatttctaatttccgtataacttatcagtaa

SEQ ID NO: 298420 - DNA, 309 bp, Proteus mirabilis
gtgacattaaaaccctataatgagctagtcaatgcaagtaaaacggggatgacaatgtctcccaatatccctttgaaagataaagaagtcgcaccttatatcacggtatctgatgcagctaaaaaaataactaatgcagtatgtaataacaattctgccgaggccttagagttttatgcaggacaatctttgggaaaatataatgggggaactgtttataagtcattatcattcaacctttgtgccaatggaaatatacctacgaatacttataaaggaagtattgatgtatcgttcctgattgaatga

SEQ ID NO: 298421 - DNA, 645 bp, Proteus mirabilis
gtgttggctaaatcccctgtagctaacttaaaaatcaacggtgatattaagccaccaacttgtactgttaatggggcgacacagcgtgatgttatttttgattacggagtcataagcccaacacttatccctcaatcgactgtctactcttattctgacattggagttcaaaatacagttacgattgaatgtgatgcaaaaacatatttaacatttactgcatctgacacttatgctgatacagaattaagtgttaataatacatcaggctggtttcatttagttgataaagcaaatcctgaaaccgcggttggtgcggcattcttcgcatgggataatgtgactgtcgatagcaaacctgcgtatatttcacgagcaaacgatgtgtctattacaggaaccagctacaataacgccctatacaaagggccaaccaatggttggacatcagaaaaacaaacaagcgttgataaaaacgccctggctctaatttcaggtgaaattttccaagcaagttttagacaaggaatgacaatgagtacttttattttatctagagatgaattaagtaaaaaaggaatagatttatctaatggtttagattttatgggagaagctgttctcacttttaactttggtgtctaa

SEQ ID NO: 298422 - DNA, 708 bp, Proteus mirabilis
ttgaccaacagtgacggtgaaatcgtttggcaagggcaatacagtgcttggggacatttacagcgtcaaacccgccccacaagcacgtttaatcgtgaacagaacctgcgttttcaagggcagtatttcgacaaagagacggggttacattataatacgttcaggtactatgccccggatttaggccgttttacccaacaagacccaatagggttggcaggggggataaatttatatgcttatgcgccaaatccattgacatgggtggatccgtggggttggagttgtggtcctaaattaaaaactgaagcagattataaaaaggctattcaaaatttagaatcgcagcatggtgctttaaatgctcatggattaagaagacatggagcggggacaaccttagagcaacaacaatatagagccagaacaggtaactcacctgataatcattatacaatagttcttgatagaaaaacgttaggaagaagcgcaccttcatccacaagatttctgagttataaagatcaatatgacgctatttcgcaagtacttaaatatgctggctcgaataaagcaattgatatagatatgggacgtatagttgcagaaggatatcaaagtggtggaagaatatatggttcaacatcaaaaataagagcttattttgatgcaaatggaaaattaattacaatatttggaatcttataa

SEQ ID NO: 298423 - DNA, 411 bp, Proteus mirabilis
atgaagcaaatcattattagcgaaggttatcttgttagcttttgggtacctatttgtgaagggtatattatccctgaaaaatacagaggattaaacttaaataatcatgatagtgctgtgaaacttattaatgattacttagtccctatggctaggaaatacaaatcaaaatcatggcattatttttttaaagaaacattaagatatgctataaatttttggagtaacgaacgattaattaatatttatatgggggtattacctgaaatacctccacctcaaagtaagtatattaaaatgaaagatttttatttgttaatttggactggaatgtaccctaatgaagaatgtgttgtatatacacctgaactttataaagaagttccttccgtagaaataggatcattctag

SEQ ID NO: 298424 - DNA, 681 bp, Proteus mirabilis
atggttaatgaattcttatcggcaaaaaagagttcagtatttcctattttcgtagataaaaaaataaatcaacaacggtatattaagttagtagaaaaaataattaaaaaagaacccgttaataatgataatgttgatttagttagcagtgcaactaagcaggaaaaacaggctcaaattcatcaggaagagaataacagtgcatacaaaaatattgagtctagtatggcaatgccgctaaataacgtatcaaaagttgatacaaaagaagaaccggaaatttatcaagaaaatatcactgaaactaataaagttgttcctttttcttcgcaagttacaccaataaaaacggtaattgcattaccaaaagtagccaaaatggtttcacagctacctgcttggcaagtaatagataaaaaaatatctatgttgactctaccaccaagcattacttatacatttacaaaatggaagagtcgttatcatcaggctaaaattcattttattgataaacaagttcagttaattgcctcctcaggacgcgtttatcaaacagcattagagaatttgaagcaatataatgggggattatccatagatctaactaatagccataaaaataaatcgtggtatatcaactctattaatgctatttttgaaagagaggatgaaaatgaatga

SEQ ID NO: 298425 - DNA, 207 bp, Proteus mirabilis
atgataaaacagaacgatatgacaattcaggcgtataatatattagaaatgatatcccaatatacggggaataatataatagaaatagttactaaaacacaactaagttatgaaagttgtgagtttttacttacacaattagaaatggcgggttttattttaaagcatggcgagttttataaaagaacaactaagagggttaattaa

SEQ ID NO: 298426 - DNA, 456 bp, Proteus mirabilis
atgtcgagggatatttttaaaaaaatgcaaggatatagaaaatatcctaattctcaagattttgactttatttcaagacttattgctgaaaactacacaatttcaaatattgaaaaaccattagttatgtatcgaataaatacgcaatctttatcttttaaaaattcactaagacaaagaaaatgtcaatatcacatcataaagatgaataaaaatagaaaaaaatatggcatagataattataatgaacaaaaaatgttagattatatcaaaacaaataaagtaataaatatattacattttaacagtcaactactattagtaaaagcgcttagaatgtataatttaaatccttgtaagtattttcttttattgtgttctatattactttctccataccaaacaaaacatatattaagaatgagttattttaaaataaaaaattatttcatataa

SEQ ID NO: 298427 - DNA, 666 bp, Proteus mirabilis
atggcaaatttaaatgaaattaacgcttttcttaatgagataccaggatggttatcatcctttatcattgcatttattggggctatagttggtggaatgtttactcttaaaggtgttgatcgtgaagcaaaaatttctagagcagcagcaaaaagagaatcacttgagttacaattatcagtactaaaaggagttaaaggagagatttttactttaattaatttatacaataaaagaatgcaacatcacattaatgatataacttcaggaaaaatgttacagatgagttttcctatcggagatgacaattttacattctatgagcaaaatgcaaaatttattgcgaagttaaatgactctcctagggattcaataattaatatttatacttatgctcgctcactgatacagtcctttaaaggtaacaaccaacttgttatggaatacgaaagaattctttttggtatggctgataacaacaaagacaaaaaaatgtatgaacaattgtacattgcaaaaactgaagtaatgattgattacgcacaaggaatcaaagccattgatgctgaactcagagaggccataaaagaaggttttaatgttatcgatcatgaaatagaagcgttagaactagcactaaaaaaatgtagttttaaaaatcaatag

SEQ ID NO: 298428 - DNA, 543 bp, Proteus mirabilis
atgaaaagaaaagttatagcactagctactattctttctgctgcatttgctggctcatctatggcgtatgatggaacaattacatttacaggtaaagttgttgcgcaaacctgctctgtcaatacaaatgataagaatttagcggtaacattacctacagtatccaccactacattaaatgaaaatgcggctactgcaggtcttactccatttactattcatttaactggttgcgctgttggtatggatggtgcacaaagtgtcaaaacatattttgaaccttcaagtgacattgatgtaaccacacacaacttaaaaaatactgcacaaactaaagctgataatgttcaagttcaattacttaactcagatgcagcaacaacaatccagttaggtactgattctgcaacacaagatgtccatccagtacaaatcgacaatgctaatgtaaacctcccatattttgctcaatattatgcaaccggacaatctaccgctggggatgtaaaagcaaccgttcattacaccattgcctatgagtaa

SEQ ID NO: 298429 - DNA, 228 bp, Proteus mirabilis
atggaaaatattgtggttcatgtaaaaaatgtcacgagtcttattggtgaaatcagccttgcatcatcagaacaaagtgcaggattaaaagagcttggtcgagctgtagagcagttagaatcaataacacatgaaaatgcagattatgtctctaaagcgtcatcaatttccggagaaatgaaagaacaaacgaattatttagtaaaagccattcatgtatttcactaa

SEQ ID NO: 298430 - DNA, 402 bp, Proteus mirabilis
atggatgagatcctcacatcagttaaacatgttgaaagctcaatgactgagatcctatctgcatcagaagaacaaacgcgaggcatttctcaagtctctttagccgtcactgaaatggataaagcgacacaacaaaatgccgcaatggtggagcaatcttctgctgtagcaagtttactaaccgaaaaggcgggtgatcttgagcaaattgttgagcaatttaaaacagcggaaagtctattttcgaagaatagcacattagcaaaacccgttgagaaatcagcaaatattgggttatcgctcataaaagaaaatcaacaagactcaagaataaaagagccaaaaaaccataaacaatcgacattcaaagaagatgaagatgatgattggacaagtttttaa

SEQ ID NO: 298431 - DNA, 489 bp, Proteus mirabilis
atggtcaaggaaacttttaaaggtaataacccaataagagcaattatcataagatacttagaacacctttttactaatctgaacgatgatgaaatgaataatcttaaaaccctattaagaggtgtattccttacatctggggcactagtaacaacaggaggagttcgtgtttacatagccacagccgcatctgaacttatatataatacggtactaagaaatgccattgcccacaagttaattagaggtggtggaaatatagcaatggcttttgtgggagggtatggcatcatagagatggcttctcaagcaaaggaaagattacgctatagcaatcctactctgtattatgaccttgttttaatgaatttagaaatggggtattttatagtagaaccaaatatatcaaaatggttatatatgataggatctgaaaagaaaagtgttgatgaagtttatcgagcaataaatggattaatttataattaa

SEQ ID NO: 298432 - DNA, 390 bp, Proteus mirabilis
atgtctaaatcggcaaaaggtacgacagaacggcctggacggaacgtaaaagctaaatctggtttaaaccgctcaatactggagcagggctggtatgaaatgcgccgtcagcttgagtacaagcagctctggcgaggaggtcaggtactggcaataccaccagcctacaccagtcagaagtgcgcttgctgtggtcatacagcaaaggaaaaccgccagtcacaaagtcaattcgagtgccttgaatgtggatatacagcgaatgctgatatcaacggggcacgtaacattttagcggcaggacatgccgtgcttgcctgtggagggagggtgcagtcagaccgcccatcgaagcaggaacccgccgaggtgattcagagatcagtctga

SEQ ID NO: 298433 - DNA, 390 bp, Proteus mirabilis
atgtctaaatcggcaaaaggtacgacagaacggcctggacggaacgtaaaagctaaatctggtttaaaccgcgcaatactggagcagggctggtatgaaatgcgccgtcagcttgagtacaagcagctctggcgaggtggtcaggtactggcaataccaccagcctacaccagtcagaagtgcgcttactgtggtcatacagcaaaggaaaaccgccagtcacaaagtcaattcgagtgccttgaatgtggatatacagcgaatgctgatatcaacggggcacgtaacattttagcggcaggacatgccgtgcttgcctgtggagggagggtgcagtcagaccgcccgtcgaagcaggaacccgccgaggtgattcagacatcagtctga

SEQ ID NO: 298434 - DNA, 255 bp, Proteus mirabilis; identical to SEQ ID NO: 296430

SEQ ID NO: 298435 - DNA, 213 bp, Proteus mirabilis
gtgcgatatatattgttatttattatctctttgttttttattgtgatttttctattaaaaacacagagcagtaccaaaaacgatgttattaaccaacccacagaaatagaaagaaaattaaataaaaaagtcgaaagatgtatgtttcactcaaaaataaaaactaaacgtttgccttggataatgttaacacgtaaacgttcatgctcttag

SEQ ID NO: 298436 - DNA, 219 bp, Proteus mirabilis
atgttgaatagaagtgctgttcttgcagtaagtaatgatgtaataaaaaacaatatatataggtatatatatctaaattttttattttgcatatatatgtatattgaaagtattgctcccatattagaaataaaacctgcaacgggatatcctgtaaaatatccaggttttctaatagtatttatcatttctgatgggaattggggattgtacaaatag

SEQ ID NO: 298437 - DNA, 291 bp, Proteus mirabilis
atgcgccgtcagcttgagtacaagcagctctggcgaggaggtcaggtactggcaataccccctgcctacaccagtcagaagtgcgcttgctgtggacatacagcaaaggaaaaccgccagtcacaaagtcaattcgagtgccttgaatgtggatatacagcgaatgctgatatcaacggggcacgtaacattttagcggcaggacatgccgtgcttgccagtggagggagggtgcagtcagaccgcccgtcgaagcaggaacccgccgaggtgattcagacatcagtctga

SEQ ID NO: 298438 - DNA, 2433 bp, Proteus mirabilis
atgtcaaaaattaaaaataatgtttctatcactgaaatgagccggcgtggcttcattcagtctgcagctgttctttctggcgctgctgctgtagctggaacggtatcattacctttctctgctaatgctcaaacaccccagggtattcgtcctgatgagacgtctgaaaccatcaaatacagtgcatgcttagtgaactgtggtagtcgttgcccattaaaagttcatgttaaagatggcgtgatccgccgtatttccaatgaaaccatgtttgatgactcaacctttggtcttcatcagatccgtccttgcttacgtggacgttccgttcgttggaaaacttataatccagaccgtttaaaataccccatgaaacgtgtcggtaaacgtggtgaaggtaaattcgagcgtatctcttgggatgaagcgacttcgattatcgctgataagctaaaatatactatcgatacctatggtaatgaggctatttattaccaatatggtactggatctaccggagcgaatttacatggtagaacagcctgtaaacgtctattaagtacagtcggtggcttcttaagtgactacggtacttactcttattcacaattaaccggcatcgtcccttatgtgtatggtgatatgctggaatctctgttaacagaaatcgaaaactcagatttggttgtgatgtttggtcataatcttgctgaaactcgtatgtctggcggtggtcagttctatgaaacactgaatgcgttagataagagtaaaagtaaagtaattattatcgacccgcgtcgtactgatagtgtcacaacattaggtgcagagtggatccctatctatccgggtactgatgctgcattagtggctgcgttaggttatgtgatgatccaagagggtatcactgatgaggcatttttacgtgaatattgcatcggttgggataaacaaactctgccagcctcagcacctgaaaatggctcttacaaagactatattctcggtaatggtcctgatgggattgctaaaacccctgagtgggcaagtcaattaaccggaatttccgttgcgcgtattattcaattggcacgtgaaattggtaatgccagagccgcgtggatctcccaaggctggggtattcagcgtaccagtcatggtgaacaagcttgccgtgcaattatgatgttgccattaatgtctggtcatattggtcgtcctggtactaataccggatgttggggcggtagcattgaataccctgtcgcaagttttgccataccaaatccagtaaaaaaccagatcccaacgtttatgtggtctgaagcggttgctcgtggtgaagagttaaccagtaaaaatgccggtgtcagaaataaagataagctggatacgggcattaaatttatgtggtgttactccagtaatgtgattggtaaccagcatgctgatctcaataaaacacatgaattactgcaagatgaatcaaaatgtgaatttattttagtgtgggataaccacatgacaccatcagcaaaatatgccgatattttactgcctgatgtcactactgtggaaactaacgatcttatcaataactcttatgctagtggtgcgtatcattatatggtgcgtttacaaaatgccattgagccgttatgggaaaatcgtcctaactatgatgtattggcagatatcgctgaaaaattaggtgttaaagagaaatttactgaaggtagaacctaccaagagtggattgagtattgctataaccaagtaaaagcaaataacccagcgcttccttcttttgctgaaactaacgatatggggattgtggatagaaaacttcctcctcgtagcgcttatgtggcattagaagcatttcgccaagatcctatcgccaacccactaaaaacagcatcaggtaaaattgaaatctattctgagaaattaatgcaagacactgaaggttggatcttaccagaaggtgatcgtattcctgcaattccagaatattgtaaaaatgaagaaggtgttgaaaacgttaccttaaaagagaagttcccactgcaaatgacgggcttccacgataaaggtcacgtccactctacctattttaacgtcgcaatgttacgtgaagctattccccatcaattttggttaaaccccgttgatgcggcacagcgtggattaaaatctggcgatattgctgagatttataacgaacgtggtcgcttgcatattcgtgtcaaagtgacagatcgtgtattacctggtgtgattgcagtaccacaaggtgcatggcgttcacttgatacaacaggtgtagataccggtggatgtattaatacattaacaagctggcacccatcgccgtttgctaaaggaaatccacaacatactaaccttgttgaagtgaaacgtgcataa

SEQ ID NO: 298439 - DNA, 2160 bp, Proteus mirabilis
atgaataagattaatcaaagtaatgaacatagtagattagcttcgccttttgtttctgaagaagtaaaaaatgttattaaaaatactactaagcaagcaaatgcaattaataatataagtaattatgtgactactcaacaacagaaggagaatcaaagtaagtttgatataccacttcttagagctcctcatgaacaggagaggaatgagaaaagaattaatattcaagatgatccacaatataaaatgacgacattttcactagaaaatgatgaagacaatactaagccttccttagcagaagaagaaccgaagaataataaaaaaaaagatgatcatcttgacgtatctgcacaacaaaattcatcattacctacttccggtcccgatcatttagaaaataaaaaatccaacaaagattatgattttttatttttacaattatcttaccagcatgttatacatgaagatattttgaataaaattaaagatccagagaaatttgattattacagagataaattacaaaagctatctaatggcatagatgatttaaaagaactttttaaatctggcttcaatgagcttgataaaaccaaaggtgcttttgttgattactggatggaagtttataaccaaataaaagaaaagaatttcaaaaaagagtctgaagttaaaagttttttaaataattgcaatattcctgattcattaattcaacagttattattaggaaatattcactctaaagcggatatggaaaaagcccttgaagatgttttccctttcttaaactttcctagtgatttttctaagctttcattagatgaactagataatttatctaaaaaattggatggtttttttgatgattcttttaattacctaccaaatatttctttaagtgaagataaaatcaataaaattacttcacatactgatgaattaaaggcattgatcaacaaaaaagaaagtgaatcaataaaaaaacaattagcagaaataagaggtctatttaaagaactgactatttcacaaagttccttggagcttgaaattgcatctaactctttatccggtatgtcattactgacatttctgttatctaagacacgtgagttgacgttaaaggtcatgttacatcgttcggaaagtgaacagaaactttttaatgaaatgcaagaggtgactgaaaaatcacttaaagataaagttgaagagcaaaaatcattaatcaaaaaacaagaagaaattcagttttgggctggtattggtttaaaaatattaggcggattattaacgcttgttgcaggtgtttcttctatttttaccgctggctcttcaatggtattagtaggagtcgcaacaaccttatttgttgctgatactgggttaactattgctgatgaggtgtatcaatctattcataataaatcgtttatggatgagattatgcaacccatatcagatgcggttatggaagctatcgataaggttagtgatttcttagtgagtttagttaatagttctttggatggactcaaagaattagggctagataaaaaaatcatcgaagagatgaaaaattcaatacaagacaaattgaaaatggcaactaaaatactggtcacagtcgttttatttgttgccgctacggcattgagttttgttattgggcctgctatgaaaggtatttcagatgcggttaataaaatatcgaatcagcaaattagacaaatactaaaaaaagtgctcaatgatggacttgaagcggtattggggaaaatgatcaaagatatcattattaaagcgcttgaagaagcactggaaaaaattgataagcagttagctaaagagatttctaaaaaagcaagtattatgttgaatagaacggtggttgcttctaagttaaccaattcagcagcaacaaatactgttaatatttatggttctgttatcgcgtcaaaaataatccagtctattgccggtagtaaaaaattaactgcagttttagatattattcaaaaattaatggataagataatggaaacttatcatgagaatattgattctataacagatattttaaaaaacctcagcgataaatcttcagtaagtaataaattaaaatcagacatgataagaaatatatctatttaa

SEQ ID NO: 298440 - DNA, 2868 bp, Proteus mirabilis
atgggattttcattattccgctcacgccggaaagcgcaggcggtttctgctgaaaaaacggatgaaaacaaggctgacaaaaccgtacaccgcagtacaccggcagagaatgccggtttaggccgtcagccgctttcccggccgggaaaaatgacccgggcggatgagcagaagatttaccatgcgaatccgtcctttattgattacctgccctgggtggaatttctggatgaggagcaatgcctgctgcttgatgacgggatgtcggtcggggcggtgtatgccgttgagccggcgccgacggaagggcgctctgccggccgtctgctcgaaatccgggatgcggtggaggatgcgcttcaggacagtctggatgagcatgatgataacccgtgggtggtgcagtttttttgtcaggatgaggacgacgtgagcgtcacactggccacattgcgggactatatcctgccggcggcccggggcaccgcgtttaccgaagcctggctgaccgaaatggcgcgtcatttacgggggattgcccgtccggaagggctgtttaaggacacggaggtgaccggacaaccctggcgcggacagcagcgccggacccggatggtggtttaccgccggctggggaacagctataccgatccgatgccgccggtggcgatgctcaatcagatgtgtgaccggctggtcagcagtctgggcagtgccggcgtgcagtgtgtccgccaggacgggaggcaggtgcatcagtggctgctgcgtcatttcaatccggcccctgactgggtggaccgggagacgctgtaccgggaaggggcgtactggccggcggcggaggaagccccgggcaccctgccggtgctgaaggattttgcggaaacgctgtggtttaccccgccccggtcggatgtggaaaacggcgtgtggtggtttgataacctggcgcacggtgtggtgaatatcgaaaaactgcgtaaagccccggggccggggcacctgaccggggagcagaagcgcggtgacaaaaatatcaatgcgctgatggacctgtttccggaagggacgatgctgtcgatgaccatcgtcacacagcctcaggatacgctggagcaggaatttacccggctggggaaaaactcggtgggggaaaacaccgactcgcaacgtacccgccgggacgtggaaaccgccagaggtttactggggcaccgccataagctttaccgggcctccctgtcattgctgctgcgtgccggctcggtggaggaactgaacaaaaagcgcgtggatctgacggccacgctgctgaatgccggtctggagccggtgaagccggaatatgatgtggcgccgctgaacgggtatctgcgtgccctgccgatgtgttttgacccgcagacggataaaaaacactggtatacccggctgacctgggtacagcacctggccggattactgccggtgaccgggcgcaccagcggcaccgggcatcccggctggagtttctttaaccggggcggcggggtgctgacctttgatccgcagaataaacaggatcgtacccagaatgcgcatctgctgttattcggtcccaccggggccggtaaatccgccaccttatgcgcacagttatcgcagctgatggcggtccgccgtccgcgtctgtttattgcggaggccggtaactcctttggtttactggcggactattacgccagtctggggctgagtgtcaataaggtcagtgtcaagcccggcagcggggtgcgtctgccgctgtttgcggatgcgcatcagctgctgatgatggatgaacagcgtctggcactgaatgcggatgaactgccagagacggacagtgaatctgaggatgatgacgggcagcgtgacattctgggggaaatggaaatctccgcccgcatgatgatcaccggcggggatgtgcgggaagaagcggagctgaagcgggctgaccgggcgatgatccgccgggcgctgatggcgggggcccgggcgtcttatgccgccgaccggcagatgctgccggcggatttgcaggaggcgctgtatgccctctcccggggggaaggtgaagaggaagggcgggcattaaatccgcagcgccgggcgaaagcggccgaaatggcggaatccctggggatgtttaccgaaccgggcagttttgagcatgagctgtttaatctgccgggggagctgtggccggaggcggatgtgaccctgattgatttggggcacctggcgcgggaagggtatgaggcccagatggcgctgacgatggtgagtcttatcaactccatcaacaatattgccgagcgggatcagtaccgggcccgggacattaattttgtggtggatgaggcgcatatcgtgacggtcaacccgctgttatccccctatgtgaccaaagtggtgaaaatgtggcggaaactgggggcctggctgtggctggcgacccagaacctcgatgactatccggactgtgccgagaaaatgctcaatatggcggagtggtgggtgtgtctgacgatgccgcagaaagaggtggaggcaatcgcccgctttaagacgctcagtgaggagcagaaacaggtgctgctgtccgcagccaaactctccggctgttacacggaaggggtggtgctggcgcggaaagtggaggcgctgttccgggtggtacagccgagcttatatctggcgctggggatgacggaaaaagaggagaagcagcaacggcgggtgctgatggagcaatacggatgcagtgagctggaagcggcgttcagggtggcagatgaacttgaccggaaacgggggttaccgccccgggtgccgggatga

SEQ ID NO: 298441 - DNA, 2226 bp, Proteus mirabilis; identical to SEQ ID NO: 190872

SEQ ID NO: 298442 - DNA, 573 bp, Proteus mirabilis
atggatgagttaattagtttatttttagctggagctatgattcctacaattgcaattcttgtgaaaaaatttcttgtagaccgagcatttaaaaagatacaaagcgaaattcttgttaaaaataaagatgggaaaaaactaaaattttttaccacattaaatgttactgacgaagaagttaaaaaaatatttgagtcagaacttaactttgaaataaatgttaaaaaaaatatagataaatttattgctgctcataaaaatctcaattttgagttatcaaatggaaaatatgttgattttattttatcttatgctgataaagtaatcgccattgaagccaagtcaaatgctaatttattcaaagccgaatggatttctgattattttaaagaaaatgctgatgttgatgaattaattatgataatcaactctaaaatccctaaagaatttatcgaagaaaaaaataaattaagcaatggaaaaaaaataagttttatagctgcacctagagaaaaggaactaaataaattacttactaatgttttagttaacggcttaggacttaaaaaatga

SEQ ID NO: 298443 - DNA, 972 bp, Proteus mirabilis
atgaacccattaacgacattacgtgttgcaagcgtacaactacaacataaggctaatgataaagattataatttagccaaaatacaccagtttattgagatggctgccagtgaaaaagtgaatcttctagtatttcctgaaatgtgtatcacgggatactggcatgtccctaaattaccagcgcaacaggtttatgcattaagtgaaaaactggctgatagcgcatcattaaaatccattaaacaaaaagcacaacagtatgcaatggctattggtgttggattaattgaacgggataacaataataatttgtataatacttgggttgtttgtatgcctgatggttcattacaaaaacatcgtaaattgcatgcatttgaacatccggttatttgtagcggagatcaatacaccgtatttgataccccatggggggttaaaataggtattttaatttgctgggataataatttagttgagaacgcacgggcgacggcgttattaggggcagatattttattggctcctcatcaaactggcggaacccactctcgtagtccacacagcatgaaacctattccaatggcgttgtgggaaaatcgtcagcaagatccacaagcgttacaagctgcttttcaaggtgaacatggcaaaggatggctaatgcgctggttacctgctagagctcacgataatggtatgtttatcatcttcagtaatggggttgggcgtgatgaagaagaggtgagaacgggtaatgcgatggttatcgatccttatggacgtattgtaaaagaaagctatgcgatagaagacgatatggtcgttacggatattgatttaacgcttttgcctgaatcaacagggagacgctggttaacgggcagaagaccagagctatatcagatcctcaccactcgacaaggtaatgaacaagatccgatttccgttcgttttggtaacaaagactaa

SEQ ID NO: 298444 - DNA, 951 bp, Proteus mirabilis
atgaaaaaaaataaaatttcagtcttgctttctatatataatgaaatagatgaatgggttattctatctattaactcaataatagctcaaaagacgtataatgaatttaaaatccaattagtcattattatagataaccctaataaatatgatcattataaaggtataattgataatttagaaaaggaaaatattgaaataatagttgtacaaaataatataaatcttggattagctagttcattgaataaagcatttgaatatagtgacggaaattttattgctcgattagatgctgatgatatagcttatccagagagattatatacacaatacaagtattataaatccaattcttttgcattaattggcactggcatagatagaatcgatgagaaaggtaattatatatccacatccactttatcaaaaaacttcttaaaactaaaaaaaacattaggttataaagctgtttgttatcatcctacatggtttatgtcgagggatatttttaaaaaaatgcaaggatatagaaaatatcctaattctcaagattttgactttatttcaagacttattgctgaaaactacacaatttcaaatattgaaaaaccattagttatgtatcgaataaatacgcaatctttatcttttaaaaattcactaagacaaagaaaatgtcaatatcacatcataaagatgaataaaaatagaaaaaaatatggcatagataattataatgaacaaaaaatgttagattatatcaaaacaaataaagtaataaatatattacattttaacagtcaactactattagtaaaagcgcttagaatgtataatttaaatccttgtaagtattttcttttattgtgttctatattactttctccataccaaacaaaacatatattaagaatgagttattttaaaataaaaaattatttcatataa

SEQ ID NO: 298445 - DNA, 1098 bp, Proteus mirabilis
atgaaaaatattttaattttatcaaactctctttctaatggtggtggtgaaaaaatagcttgtaatctagctaatggattcaaagagaataattataaagtatatttttatataatagaaaataatatcacctatactttacagaacgatataattttaataaagaaccctataaatattaaaattccttttattggaaagataataaataatctttcagcaactattcatttattttttcttctgaaaaaaagtaagataaatacaatcattagtcacttatttagagcaaactatatcaatatagttttatcattatttacaaaacataaaagtataattgtcactcatggttcaattttaaaatattctaataatgatttaaaatctaaaatgaatatttttttaataaaacatacatttaaatatgctacaaaaaaaatatttcttactaaaagaatgttaagtgactatttacctattgtcggagaaagaaacaacttcgttattcccaattgttatgatttagataatataaaaaaattatcccaatcaaatatatatgacaatccctttaataagggcgaatactttatatttataggtaggtttcatgctgttaaaaatatttctttcttattagatacatttaaaaaaaccaattataaattacttttgatcggagatggagatttatataaaaaatataaagaaaaatatgaagataataatatcaggtttttaggaaataaagagaatccatatccttatataaaaaatgctaaatcaaccgtacttgtatctatatcagaaggctttccaaacgtattaattgaatctctttatctaggcgtcccaattattagttcagattgtagaactggcccgagagaaatattaagaatagataatgaaattaccacagggaatattatatataataagcttggtatactatttaatgtaaatgatgatgaaggatttttattagcattacataaaatgaatgtaacaattacagaacccggttatttaaaagaagaaacaaagcaatataatataaatcaaattgttaaaaaatatattagtttaatttaa

SEQ ID NO: 298446 - DNA, 1077 bp, Proteus mirabilis
atgatcggaccaattaatactgcaacttcgacaaatggtgccagcaacagtattagtaaagaaagtcagcaagacatagaatataagcaaccacaaataaacgaaagtgaaaattatcaaaatcaattaatagaaatatctgatgatatgtctatggtggcaactcttttttctcagcgattaggaaaattattagacaaaaaagccaataaagggcaagaagctttatatattgcagaagatggtgctgatgagaaacttgataaggtgatgcttcaatttagaaaatcggggagaagtttacaggaattattgcaatatttacgtaaaatgttccctgatcctagtgatctcgttatggttttacgagaattacttaggaaaaaaaaattaggtgcacaattagatgcaggtattgaaaatgagatcaataggttacttgcaggtgaggagggtaagcaaattaaggcgggcattaatattgctctccaagctaaagcctttgctaaattactttgtttagatgcatcagtattaagagacctttaccgtagttacattattctggatattgaacctatttattttttcaaaatgtggatagaaaaatatgatataaaaaaatgttcaattattttgaattttctaacacagagcttgatttgtgatatgaaatcgttaatgccaagttgctcccaaagttcagagtttggttatcttttggaaaaggtaaataaattacgattattatatagctttatagaaatgaatatagaaaatttagttaaagaagatttaaagagttttataaaagaagatgatttttatcaactaactattaatggaatgatatctccagaacaaatggaaaaatatttaatatcacttatggataatcaatggaaaggttattttattaaaataaaaatgaggttgctacaacagttaaagacaatgttcaataaatatcctgaattattatacttatctgatgattttagaaatgaatgccaaataatgatacaaaaaattatagataattatattaagcaagagcaatatcaattaagaaaataa

SEQ ID NO: 298447 - DNA, 720 bp, Proteus mirabilis
atgacttggtcagaaattatattacttttactagggaatggcgttgtacttactatattcggtggtatttataaagtttttttagataaatctttagataaaaaaataaagcatggtttagataatttagatttactcacggaatctcaagttacaaaagtgttacaagataatattaaaatagatgatcaaaggaaatttatcagacaagaaatgacaagtaataatatatctcatatgagacaagcttggattaatgatttaagggctaaatcagcatcatttattaatgcgaccactaatattgttgctaattctgatttatattttaatcttaaaaaaattccttgtgataatgaaaaacttcctgagtatacacaaaaaatagataacctacagctggaaattgataccaatatacgtgaaattagggggttagctagttatcttgacctgcttcttcccttcagttcttctgaatttaataaaacagagccagaggcggataaaataagagaattacttcaaaaaataaaatctaaagcacattatgtattgactgacgactacactaagttaattaaactacttgatgaattaacaaagcttactgattatttagttaaagagttaaaaattcttttatataaagaatggaaggttactagctcactgaaagagctagaggatatagataaaagaaaactgagtaattattaa

SEQ ID NO: 298448 - DNA, 534 bp, Proteus mirabilis
atgaaaattgaacaatctcaagttactaagttagtaataacagatgttgagcgacacgaccctatccatgtttaccttgaggattatggagataatcaaaacggtcgtgtcacaattagcgaatggggcaattcatggtcttgcttttggggctcgatgggtagctcactaattaagtttattcataggattaacaatcactactggataggcaagttagattctaatttaatctatgagatagattgtgataacgatgcaaatgctaaatacgctaaaaagcaagttatcaaactacgcaaagatgatgaaatagataaatacgaagcaagggaatattgggatttaatcgaattatcagatgatgttaaagatgattgttgcaatagttttataggcggtaagttgcttagattgtttggtgatgatgcttggtacaacgattggcccactattcctaaccctgaatatctaagaatggaatcacgattaaatgctgttcgtgaagcattaaagcaaataagtgtgaattaa

SEQ ID NO: 298449 - DNA, 495 bp, Proteus mirabilis
atgaaagatagaatcaagtttaacgatgtaatgctaaaggctgtcatagatggcaggaaaacgcagacacgcagaccgattaaaccacaaccaaaagtaaccgaagatgggttacgctatcttagcgcatggcaagatggttacacactatcagagcaagtatgcgcagcatggcggcatggatttgttgatgttgattgcccgtatggtgagattggcgacattatcaacattgcaaacaaggacggtaatatcaaaggaaaaattgaaattactgatatttggttgcaacaggttcaggaaatatcacagcaagacgcaatgaaagaaggtgcgccaccaaatcactcctccattgacgctgtatcgcgtgagtatggtttccctgatttttcgcgttcatggttcgatcaaatatggatagatatatacggaaaagacagctgggtaagcaacgaatgggtatgggttattgagtttaaaaaggtggagtga

SEQ ID NO: 298450 - DNA, 936 bp, Proteus mirabilis
atggcccgtatcaggactattaagccaacattttggactgatgaggatatggctgaaatatctgagtcagcgtgtttattggcgatagggctattaaattacgctgacgatgaaggctatttcaatgctaatccgaagctaataaaagcggctgtttttccaatacgtgaaacctcccgtagtattccggtactactacaggagctttccaactgtggctatatcagcttattttctgccaaaaatgggaagcactttggattaataaataatttcacaaaacatcaagtcgtaaacaagaaaacaccaagtaaaatcaaagagatgaacctactaccgtatgactacggtagtgatacggtaggactacctttaggaaaggaagggaaaggaagtattaaaacaactctctgtaacgcgcgcgaaggaaatttgcctgatgtggataatgctattttaaatgacagagttcctgctggtggttttagcgttgacggtaaatttgtgatgtttgatgaatgggaacctgatagcgattttttacgtaaatctgctttttggggacatgcactaacagatccagttaaaccaactgaacttgccgaatttattacgtactggaaagccgaggggaaagctaaacatcacgaacaatgggaaatggcattggcaaaaagtattaaatttcaacgtgctaaagcgaataatagcaatactggagtaaataataatggcaaatcagaatttaaattcgatccaaacagtggcaaatcaagagccgtacaactcgtggaacataagatcagagaaaaacatgggcaagagtatctcgactctttggctacaaatgacggagttctatggggagaaatggacaaacaagaacgggacggaaccctcattgatgtggaaacgagcactcagcggattgaatag

SEQ ID NO: 298451 - DNA, 180 bp, Proteus mirabilis
atgaagattggcgataaagctaaaattaaacgtttaaatccaagcaatggaatatctaagtttagtgtaggcgatgtgcttacagtggatattatcaacgaagaaccatacaaatatttctgtattgataatgttgattatggtgaatggttcagcgaatcggagatagaggcatgctaa

SEQ ID NO: 298452 - DNA, 1851 bp, Proteus mirabilis
atgaataaaagtaaatttcgtcttgatattaatggaattagagctgttgctgttttattggttgtcttgtttcattataatagagaatttatacctggtggctttattggtgtggatgtattttttgttatttctggattcttaatgacaggaataatattcagaggtattaagtcgcaaaatttttcgttacttaaattttatatatcaagaggaaaaagaataataccagccttgacagctgttatttttgcagttctaattcttggatatctactaattgatcccattagttataaaacaatgggggatcatggaatagctagcttactttttatttctaatattatatataagaatgaggctggatattttgatgtcgattcttatgataaatattttttacactcatggtctttatctgtagagtggcaattttatattatttatccaatagcattactcttattaagtaagttcttttctattaaaaatttaagaaaaataattgtctttttagttatatcactatttttatatggttggtattcaactgggaaagataatatttcttcgtattttatgcttcaatccagggcttgggagatgttacttggtggtattgcttatctatatccattcaagtttaaagattcaataaagctagttatttattatttatctattttttctttaattatatcagtgttttttattgattatctaattccttggcctggatatttatgtttattaccaacgattttcacatatctaataatatcttgttctataaatagttttgttttatcaaataaattatttcaatttatagggttaatatcttattctgtttatttagttcattggccaattttggtttttattaacaaattagacttaaatttaaatcttgttatttatcttataattgtattgttattatctatttctttatatattttagtagaaaaaaagagagattatggatatggattaattatagtatatctaattgttttcttatttggctttttggtatcaatagatggtgttaactcaagagtaaatcctgattttcagattactagagcagagtttaggaagaaattcgaaggccatttaggtatgcctcaaagtagtggtgttcaatattttaatagtgatgaatctgattttgattatattttaattggtgatagtcatgctagacatttcttttcttatataaatggtcataatctaaaagttgctagtctagcattagatggttgtacttcaacaaaaaattacttttcatcatataataaagcaatgtgtgaaggtagatatgatttagaggttgattttattaaaaaacaccctaataaaccagtgattatatctagatattggcctggattatttcctagtcacataataaggaataatggtagtactataggtaaaggtgatttaaaccataaaataatcaaagagttagattacttttattctgatattaatagaggtcaagatatatatatattaggtgatacaccaggaagtgagaaaataatatttgaatgtttagctaaagctgacttaccaataaataaagttattaatttttcaaggtgtaaggagacacaaaaaagaaatgttaatatttcaaatgaagatttattaattttttcaaataagtatgacaacattacttatatagatacatactcatttttatgtgatagtaatgaatgcttaattattaaagatggagagcctatttatacagactctagccacctatctaagtatggggctgaaattgttggcagtggtatattttctatagttagtaaaaaaagataa

SEQ ID NO: 298453 - DNA, 981 bp, Proteus mirabilis
atgcctgctttaactctcgttgattgggctaaacgacaaggccctgacagcaagcaagcgaagatcgtcgaattgctgaatcagtctaatgaaattcttgatgatatggttttcgttgaaggtaacttaccaacgggtcaccgtacaactgttcgtacaggtctgccgtcagcaacatggcgtttgcttaattatggtgtaccaccaagcaaatcaaccacagcacaggttactgatgcgattggtatgcttgaaacctattctgaagttgataaagatcttgctaacttgaacgggcaaaagaatgaatttctattgtctgaatcaattgcattcttagagtcaatgaaccagcaaatggctgaaacggttatttatggtgatgctacggttcatcctcagcgctttacgggattagctgcacgctttaacgatatgaaagcaaagaatgcagtcaatatcattgatgctggtggtactggcagtaacttaacttctgtgtggttagtggtatggggtgaaaacacggttcacggtattttccctaaaggttctaaagcaggtttagagcaaaaccatttaggtgaagttactttagaagatgaaaacaaaggtaaataccaaggctttcgtactcacttccaatggaaaaatggtatctcagttcgtgactggcgttatgttgtccgtatcgccaatattgatttatccaaaattggtaaagatccagaaaaagcggacacactcgatttgccagacttgtttattcaagcaattgagaagatccctaacctctctatggggcgtcctgttttttattgtaaccagcaaattcgtagctggatgcgtcgtcaaattaaaaacagcaaaaacgtcaatatttccatggcagaagttgccggtaagaaagttgtttcattcgatgaaattcctgttcgccgtgttgatgccattttaacgactgaagatcaggtgaaataa

SEQ ID NO: 298454 - DNA, 462 bp, Proteus mirabilis
atgtcgattagtattgatatagctaatgcctctgaagcaaaagaacttacaacaatcgctctggaatctaagcaatactggggatacagttctgactttattgagatgtgccgtgatgaactcacattgaaagaagccgattttgttaactctttaattttggtcgcaaaaaataatgaaaaatattgtggttttgttcaactcaagtttaatgataacgcaggacaaggggagctagaaaagctatttgtcgccccctcttttattggccaagggattggtaaaaccttgtatgaacgagctgtggaacatgcacgaaagatgaatgtaaaagagctagtacttgatgcagatcctaatgctgaaaatttttataaaaaaatgggcgcaataacgatgtacaatacaccttcagagtcaatccctggacgatttataccaaaaatgaaaataacattataa

SEQ ID NO: 298455 - DNA, 702 bp, Proteus mirabilis
atgtcaattaaaaataactataaatctgtacgaaaacctagaccagtatatggaagtgtttcaggatactttgcttttaggggtcaagatactatttggtttgaatcaacattggagagggatctaatacaaaaacttgaattcaatgataatgttatgcaagttgtatctcagcctattgaaatcacatatagaacaaacttaggtaatctctcaacgtatactccagacttgttggtacaattttttgagtctcccctacagcaatcacctttattgatagaagtgaaaccaagagcaaagcttcggagagattggaaaatcctaaaaccaaaattaaaggctggttttcaatacgctaaagatcgagggtgggatttcagaatatatgatgaatttcgtataagagatacattattagctaatattcaatttttaaaacgatatagaaattcagactttcaaaaggatgaatctatacaaattttgaacagattagatgattttggtgctcattcagtaaatggactagcgaatagtttatttaaagctgatcagaagattcttcaggcaatagcccatatctggttcttagttgaaagaaggtatattagctgtgacttaacacaacagctaaagcctacaactatgatttgggtaaataatgagcgaaaagatgatttaatacaggagtatgtatga

SEQ ID NO: 298456 - DNA, 1899 bp, Proteus mirabilis
atgattcaagaaaacataaccctcgatagacggctgttagagttgaagattggcacggtcgtttggtggaaaggtaatgagtaccaaatatccgatatcctcagttttagcgaagtagtagcaacacacctagagacttataagtcatcaattattcctatcaatgaattaggtttagacaaagtagaaaataacatcacaaaattaagctgtgatgatatcgttatctctgaaaaagattggtctaccgcattaaaacgttattcaatcatccaaccttttatagatgaatctagtaaaactgaaattatcaaactcgcagaagaagagggataccattacacaacaatatataactggctttcagcatacagaaaaacaagatcaatattgtcattggtgccgaacaaaaggggttggaaggaatcaaagacacgcttaaaggacaccacagaactcatcataaaacaagtgttaaaagactattatcttaccgaacaaaagccaagattaagtagtgttgcagaaacaataaaagcattatgtattaaaaacaatattgatccacctcatcctaatactgttaggtacagggtacgtcaaattaatgagcaattaaaagtaaaatcaagagaaggtaaaaaaagtgcccaagataaattcacccctaccatcggtcattttcctcatgcaaaccaccctttagccgtagttcaaatagatcatacacctctcgatatcattgtggttgatgaaacacaccgattacctattggtagaccgtttctaactttagcaatagatgtatatagcaggatgattgttggcttttatctttcattggactctccgagtgcaacatcggttggtatgtgcattgtaaatagtattctacctaaaaatcgtattcttttagagcatgatattaacgcaacatgggatgtatggggcgtaatggatactattcactctgataatggagccgatttccgtactgaatttatgcaaagatcatgcttgaaatacggtattaattgggaatatagacctattggtaaagcaaattttggtgggcatattgaaagattaatcggaacaattaatcgggaaattcatcttttggaaggcacaactttttccaatgtcgagatgaaaggagcatatccatctgaaaaaaaggctgcactaactttacgagagctcgaacaatggctcgtatcatggataaccagaatatatcatcaacgagttcactctagtcttgatataccgccggtcaaaaagtgggaacaaggtatatggggaacaaaagaacatgcaggaacaggactaaaaccacgcataaacgacgaatttactctactaattgatttcctgccagaatataagagaacaatccaaagatacggaattagcctagataatttaaattattactcagaaatacttcgtaaatggattgcctgtcctgatcctgataacccaaaactaaagaggaaattttcatttagaagagatcctcgtgatattagctatatttggttttatgaacctgacttaaaacaatatttcaaaattccaactgcaaaaaaagagataccctctattagtatttgggaatatgagtcagttcaaaaatcaatgcgagagcttactactaaggatttatctaaccaagatcatatttatcaggcaattttagagtcaaaagaaatgatagaaatagcatctagtaagacaaaaaaagctagacggcaatatgaaaaaagtcaatcaagagataaaaaaggatctaaaattattcctgaaaaatcgatagaaaagtctcctaaagttctgatggcactagaaagtagcttttgggatgatccaattacaacgtttgatgatattgagtaa

SEQ ID NO: 298457 - DNA, 912 bp, Proteus mirabilis
atgagtgaattacaacatttacaagaacatattaaacctatcgtattcttaccgcaaaaggacagaattacctatttgtattctgataagtggataggatatgaccgtgctagaagcataatggcattattggatgatattcttagccaacctaaaagaatacgcccccaaagcctccttattgtaggtgaaccaaatattggcaaaacaacaattgtacgaaaatttgtggaacgacacccacaaacaaatattcataatcaattaaatgaaatcatcgaagcacgtaagcatcatttgttgatagatgctcctataggtgctgacgaaaaaaaactatatattgctatcttagaaaaatttttagtcgcatttaaacgtacagctcctgctattgagctgaggtatcaagtaaatcatttaattagaaagtttcatattaaaatgctaataattgatgaaattcataatttcctaactggaacggccttaaaacagagggaggtaatgaacgtactaaaaaacttgagtaatgaactatatttatcaattgtaggtgtaggaactaaagaagcagtacaaattctatactcggatcctcagcatgctagtcgctttgatattactgaattaacttcttgggggcttgataacagtttcagaaaacttctagcaagttatgaaaaattattacccttaaaaaaaccatcaaatttggcagaaagagagcttactacggcaatatttgaaattagctctggtaatttaggtgatgttattcgactacttattgattgttcaaaagaagccattaatagtgagaaagaatatatagacataggtattatcaatcagtttagaaagcaaaagaacacaaattcctatagatctattagaaccataatgttatga

SEQ ID NO: 298458 - DNA, 1056 bp, Proteus mirabilis
atgacattatggtttatacaaccctatcaagatgaaatcttaagctcatggttaatccgtacggcaataagccacgggtgtacgcctttaactctgactcattcaatatggggaaatagctggcgtccatggacaactgatttcgatttaaatattcctaagcaaaaactcatttccttatcatctagcacattatcaactcaggaactattgaaattaaccttacaagatattaaccagaaaataaacactgataatagccaagcaagaaaatggatcactaaacttggaattcgcaatctagatcgaacaggtggattaagattttgccctttatgtctgtctgaacgaggttatatcaaaaagttatggagagtggcatggaatatctattgtgaagatcacaacattcttttgcaatcacattgtgagaaatgttctttagcctttactcctcataaaatatcttttgataatttagatatgactcgttgctcaaggtgtgatcatcagttatcaaaacaaatttatgaattccaaagtgaggagattaaagaaattcaacaagagcttaatataatgctgctacaagataaaaatgaatgctctacagaaaattttcatgaattactgactatgtatgccttttttattaggtttacaaatagctctagtttacttcgctctagtgcagatcaaaagctcattgaggacttaggattaaattttaataaaaagactgatacaaaagaagaaattgaaaaaatgtcttcagaatggttctctgagcttatgaagatactgattattattagaggtaaatcaatcaaagatttatcagaatattttaaagcattaggatatacacaacagagttttacctcacgtttaccaaatcaaaaattagcatttatacaaagctttatagatttactaccatcacgattccgagctcctaaaaagattacaaaaactagattgatcgaagttgttacccccctacccagagaagaggtgatgaaaaaatgggaactattaatgatgagaataaaataa

SEQ ID NO: 298459 - DNA, 1431 bp, Proteus mirabilis
atgggaactattaatgatgagaataaaataatactttgtttcggttgtaaatgtgaacttgaaacagctaaaagaaaatactttggtaagtatttttgtaactactgctaccagaaatattttataaaaaaaacatgttttacgtgcaaaaaacaaaaaaggatctataagagcgaacaggtttgtcaatcctgtctaacaaagataatgccttgtatccattgctctaagactggtgtaaaaataggattgattttagatgcaggtattgtttgcaattcttgtgcttatcattttagagcattaagaatatgtgatctctgtggtcaaaaaaaaagaaatgtacatatatacaccataattgatgaaataaaaaagtactgctatcagtgtgttaaatttaaatttcatgaaaaatgcacagcctgtaaaaataaagaattaatccattactgtgatctacaaagacaaccatattgtaaaagatgcacattgatagaaaaaacttgtcaaatttgtcatcaacgaatccctgcaggaaagagagctaacaaatgtaattcatgctcatacaaaattctacttaatagtaggacaaaaaaagcacttcatggcttagaacctaatgtaatgaatctgttcgaatgtttatttaatcacctttatgatcacaaaggcgtagaaaatacggctaaagttattccgtatttacaccccgtcatactacaaattaacaattactttcttcagtatcaaaagcttccaaatatgctctcggtagatttgttaaaaacatctaaatttaaacactatcattttattttaagttttttacatgattatatgtctcaagactacaaagattttaaagtttcacaaattattagtagacaaaccaataaactcaataaaaactcccctcactttaatgagtttaaaaaatatattgccaaaatacaaaaacgacaaattacattacactcaaagaggttagcgataacatctgcagtaatgatacttacattcacaaaattagtcggagccaattgtttgtgccaaaaaatcgtagatcaattttgttggttatattggggtcagcgggcttctataacaggttttattaatcacataaacatgacttgtaatttatctttaaaaataaaaaaagaagaatactttaaatttgaacagcgtcgagagtctaaaatgagattagagcaacagattcttgatatctgtatagaattaaaagttatagacaaaaatactcttctaaagaaaatacttgcttatatgcataatattgaattgccaaaagatttagaaaagcttgatttaatcaatattatgagcttaaaagataaaattagattaagaaatttaacatttcccctacctttaattgattattacaaaataaaatgctactaa

SEQ ID NO: 298460 - DNA, 1860 bp, Proteus mirabilis
atgcatattgatagtttcccagacgatgataaattacgcgtagtttatgcaacaggttctgtacctaaaaccaatgatttcgtttctaatcctttagtgaatatctttgttgctttagttccccaaaaagatcaatcacgtgaacctcaattactccaaatcccaatatcagatttagatatagtacgaagaggatctgtatggttggggcaaaaacgagtttctataaatgaacaagaatattttgaatttcgatcaaatattttaggtaaatatgagtgtttcgaagaagattttgtgattgatgagattccacttgataataaactattaaaatacaatacaaaattcgaaaatggtgagtatctaattccctataattacttccctttacctaaaagtggagatagtgattggagagttgattataaaaatcgtacgggaataatgaatagttactgtaacgtatttgaaaataatggcatcgaatatgtcataccttgtatggaaatattttcatctctctatgcaccaatgcgcaaagatttaagacgcatgatcatgacacactcgaaagaggacatattaaaaaaatacattgcaatagatgataagagctttaaggttcattcaaataaagaagtttcgctaaaactaacaacaagtctcggtgatagttctacagtacttttaggacatctactattatctgaatatacaaataggatgtttgaagtcataaaaaacagtattcatacagttgatgacttcaataacatttatccaatagttaaaccatattttgttggaaaaactaaaattagtggtagaggtgtttggctaaatgaagataaaactaaaatgctcgtactccgcattaattcctttatgcttccaagcgatataaaaataaatgtggtagaaaaaaggaatgtaacatcagaaacagaaagtaacataaaaccaaataccgagcttacagttactcgtctaataataggtaagcctgagttaaatatcaccatagatagacccacagagggtggagaccgaaaggattatgtactgaccgaagttcagacaactatatcggatggcgttattacgagagtgagcgaactaaaatatatcccgcatattactgaaaatattgatgaaaattctgaagacgatgagggcgaatataattatggtatagaaactataaaaattataaatcctgaacgcgaaattataattgatgtatcttctggtcaaaaatacattgaaactgataagaacgtgcattcaatagaacttaaagaaaaaaatccaataacagaccctgaaagagttccctttcatgtgtttgatgcaattatggaattaaagaagggaaacgataatatcctttataaggtcaagactaatagtggactaaattcggaacaatgcgaagattttattattagttataaagactttccacaaattgaggcaaaaaaatgggttgttaaacatcaaactaaatatcgggaaatactactattacaattatattttgcttttaacaagttcagtaatgtagatactactaaaaaatattacttattagaaatcatgaggcgtgatcagaatgataaaaatacaggatatattttagtatcaaataattctatggaccacgttcagatagaatatttattagagtctctagcagaagagcagggaaaactaaaatcaaatgatttacaaagatatactattgaggttaagccattcagacataccaagaaaaccatgagttggtatgacaaaatgagaagcacattaataagaaaacttaatctaaaagaaatctcagatagccaagagttttag

SEQ ID NO: 298461 - DNA, 312 bp, Proteus mirabilis
atgacaccagtctatagatgtaatggcaaatattttgggtttattataaattctggatatttctttgatgctgaatcgcaatatataggatgggtcgatgataatgctcttgtatggcgtaaggatggatcattcttaggtgaaattatagatgagaattatattatgagacgtttatctagtgcttcatatgctaacagaactagacgaccaactcctacaactccttctcgctgtacccgctttacaaatcgtgctaagagatgtaatcaagcaggaagaattgatgctcttgatgagtttttagaataa

SEQ ID NO: 298462 - DNA, 2718 bp, Proteus mirabilis
atgaaaatagaagtcgcaagtttagatagtgatacaactaaagataaaggggatcttctagaaaagttagctagcgatttactaaaagcccagaattacgaagtaattgaagagattaaagtgactggggcagaacttgatctattatgtaaacataatgtcagtggtaaaaaaatttacgttgaatgtaaagcgcaaaaagaaaaaataggtgcccccattttaaggcagctattagggaccgtcattgcctatgattatactgaaggatggattattagcactgctgaatttggtaaggaagcaaaaggcttcattgatatgttcaaacaaaaaccaggtatacaagcaactcaattaagtttttacagtcctgagctcataattactactttatccaaagcatcaattattgttcctgagccaatagaaagagcgaaagaattaaccctaaacaaatttgaactgggggattgggtattactcatatctaagtatggtaaattttggtgtgtgtatatattaatgggtggagtaccaaatgatgtcttggttttctgtgcaaaaaaaggttctttgattactgataaactcatattagagaacctaaaaaaactaaaaagtagtattgcggaattcagtttaaaccctattatagaaacaaacaaaaaagacaaagaaaatcacataagcataaacttactaccaacagttattgaagtacaaacaggtgaatcatggatcgattatcgacctgctagaccagaagactttgttggcagagataggttgcaaacagagcttttagactatttaaaagatatacagaataaaaaacttagaatatttgctattactggtaattctggactaggtaaaagctcattaatagcaaaattaagggatcgctctagaaatcagcattatcgtaaacgtatttttatatttgcggtagatatcaggggagcaagaaatacagcatatatacatgcctccttgttagaatgtttgcgccaagcccaaaaaaacaattttggcgaccagattgaattacaaattacaaatcctgatgcgcctttaaattctccccaaattatcgattatttaaattctttagagcagaaccaacaaaccatatgcttagtttttgatcagtttgaggagttatattctaaagttgatttatttgatatttttaaaacagctaaaaatctaatgttagatgtagcgggtatacaaaagaactttgttttaggttttgcttggaaaacagacagtacaacacaacaagatcatccagcctattatatgtggcatgaactttcggactaccgaatagaatacaaactagatgtttttactaatggtgaaattgctaaatccttaactaaatttgaaaaatctcgcaacaaaaaactccctattgaaataagacatcaattgactgaatcaagccaaggatttccgtggctattaaaaaagctttgcattaaccttactaaatctaatcgaaaggataatatcattgacttagatgtaactaagttgtttgaagatgaccttgaaaaactaacccctcaacaattaacttgtttaaaaataatagcacacaacgctccagctgactggagtgagataatcgaactttcgagtgtaaatgatgtaaatgccttagtaaatcaaagactagtaataaaaagtggcgaccgattgaatatttattgggatatttttcgagattatttaattacaggaaaagttccaattattccttttaattatattcctacgactgaccctacatctatttttaaagtatgtagagcactacctacaaatacatacttaacttctgaaagtttagctgagctaactaatttaaatacacgaacagtatggaatataggtgctgacttaactatgttggggattgctgaaagaaaaggtacagaatttaaattacatagtaagatccagacatatgataaagatcatattttaatggttttaagagaaaaatttgataagcatgttgtaaaaatagatttatataaaaagttttcaggtcaatccatatcaatggataaagttaaagatgttgtaaaagattgctttatgagaaaaaaacatgccgataaaacttggaatgtttatactaatagactagttaattttttagtttatacagggtatttaaccagaagtaatcaggatgttactgttggagatttaggtaggccttttgctgatttaaggaatttatcgacccaaagaagaaataaaggtaaagcttttactacaacgatatctccttataaggtatatgaggtattaaaagaccttaaaaatggaactaataagaatgagctagaactaaaggcttctattgtcttaagaagatataatttaatttttgtgaaaaatgatcttacatacattaatcaagaactaattaataagcatggtggagttaaagaagctctttgggcaatggcaaaaaatgagaaggctttttctctgtgtttagaaatattaaaagaacaaccgaatattgaccgagttactttagcaaaattaattgctcagcgatttaatttaacatgggctgaaagctctttaaaaagaaatggcaatatattcttacaatggtcctcttggataaaagaaggactagaaacgtccttagtacccgttcctccggggaaaagaggtgactag

SEQ ID NO: 298463 - DNA, 579 bp, Proteus mirabilis
atgagcagtgttgagttcccaaaggaatggtgccttacaaatttaggaattatagttgaattaaaatacggaaggtccttaacagcttctaaaagagatggtggtaaatttccggtatatggttcaaacggtgttgttgggggtcattctgaactattagtagaaaaagaagggattatagtggtagtgggtcgaaaaggctcatgtagagaggtgcaattatcagattttccgttctttccaatcgatacaacttattatatagatgagctgtttagtcagccattaaaatactggttctatcaacttaagtttttgcacctaacagagttgaacaggtctacagcaatacctggtttaaatagggaagatgcatatagtcaagatatagcactcccacctctagctgaacaaaaagttatagctgacaagctcgacattctattagaacaggtagaaaaaaccaaaagtcgccttgaacgcatatctgaaatactaaaaaccttccgccaatctatccttgcagcagctgtaactgggaagttaacggaggagtgtagggatgaagtgaccccataa

SEQ ID NO: 298464 - DNA, 183 bp, Proteus mirabilis
atgattgtcttttgcatcctcgttggcggctggtttagccgtgagtggattgctaacgttaagggagactctctggatatattttggctgaaagataaaggtagtgtcgatactgctaatctgccagagccagggatattggcaagtgaagtaaaagaggagttggaagcgggcttcgagtga

SEQ ID NO: 298465 - DNA, 339 bp, Proteus mirabilis
gtgttatttttcactaaaggttctgctaaaaataaatttcaaaaggaaagttgtactgaaaacgtctggatatacgatctacgtactaatatgcctatttttggtaaacgtacgccatttggtgattatgacattggctttgcgtcagaagagttaggtacagatcagcaccttggtgcgttcgagaaagtgtttggtgagaaagctaatggaaccagtaagcgtaccgaaggtgagtctagttttgaagtacaagatattgaagtggatgaaaatatcttagaggaaaatccagatatagatgattgtcttttgcatcctcgttggcggctggtttag

SEQ ID NO: 298466 - DNA, 216 bp, Proteus mirabilis
atgctaactcatctaggtgcaaatgttgaaaatgaggttataagagcaatttacgcatttcctacaacggctttcccccattctgaaaatttaaaagctgtgataaatggaatatccaaaattgaatggcatcgagtaggaaaagatgggtttggtgacctctatagcggtttaattgataagagagctcaagatgcccgttcgggggctgggtag

SEQ ID NO: 298467 - DNA, 819 bp, Proteus mirabilis; identical to SEQ ID NO: 289162

SEQ ID NO: 298468 - DNA, 333 bp, Proteus mirabilis; identical to SEQ ID NO: 289163

SEQ ID NO: 298469 - DNA, 867 bp, Proteus mirabilis
atggcattagcagtaatatatacgcgagcctcattagggatctctgcaccacttattactattgaggctcatattagccagggattaccaggactcactttagttggtttacctgaaactgtcgtaaaagaagcgaaagatagggtaagaagcgcattaataaatagtggatatagttatccagcaaaaagaattacgattaatctttcacccgctgatttacctaaagaaggagcccgctatgatttacccattgcgttagctatcttaattgcctcagagcaattaatctctgataaattaaatagttatgaatttatcggtgagcttgcactttccggtaaattacaaaaagtgaatgcggttattccctcaattttaagcgccaacaaagataatagaatatctatcatttctattgaacatcaatcagaagtttcgctcttacctaataaatccgcgttattagctagccatcttttggatatttgtcatcatttagaaaataacaccccattaattgaagctaaaaacaatattaatcacaaaacaattgaaaaccaaaataataaagatattagtgatattattggacaaaataacgcaaaaagagctgcagaaatcacagcagcaggaaatcacaacattttatttcttggccctcccggcacaggaaaaacaatgttggcgcaacgcattaatactctcttacctccacttacagctaaagaagcccttgatgtattaattatcagtagcctatcaaatacgatacatcatgatggtaaatggcctttacgtccttttagagcacctcatcatacggcatctgccgttgctttaaccggaggtggatgtcaattctag

SEQ ID NO: 298470 - DNA, 168 bp, Proteus mirabilis
atgaaaacgtatttacgttgcacccttgctataataacactgatttctctttctggttgtggcttgaaaggccctctctatttcccgcctgaagatactcaggcaaatatgactcagtcatcccagccaacccagcaagttgagacttcctcaacacaaaacaattag

SEQ ID NO: 298471 - DNA, 450 bp, Proteus mirabilis
atgcaagttcttgcgacccatctctcagataaagcggttgattttcgtgagattgattacacacaaccaacctgtattattatggggcaagaaaaaactggtatatcaccagaagctattgcgctggcggatcaagatatcattgtaccgatgatgggtatggtgcaatctttgaatgtttctgtggcgagtgcattaattttatatgaagcacaacgccaacgtcaggcggcgggcatgtataatcgaaccgaaagtgcattaactgcagaagagcaacaaattttactctttgaaggtggctatccagtacttgctgaagtttctcgtcgtaaaggactgcctcgcccttatattaatgatcgtggtgaaattgaagcaccggactcatggtgggcagaaatgcaaatgacacaaaaacaacttaggaaatttaaactgacggagtaa

SEQ ID NO: 298472 - DNA, 2088 bp, Proteus mirabilis
atgaaaggaaaactgcttgatgcaatccccttaaccactcttcacggcgtaggtgcaagtcaggcagataaactggccaaaatagggttagtcactgtggaagacttattgcttcatcttcctttacgctatgaagatcaaacccatctgtatgccatcagcgatctacttcctggtattccagccactgtttccggtgaaatcttaagaactgaagtaaattttggtcgtcgaaaaatgatgacctgccaaatttctgatggttcaggtattttaaccttacgcttctttaacttcacggcagccatgaaaaataaccttgctcagggtaagcaagttatcgcttatggtgaaataaaacgaggaagtcgaggccctgaaattattcaccccgaatacaaaattaaagtagctggctcagaagttaagttacaagaaacgcttacccctatttattcaacaacagaaggcttacgccagacatcattgcgtaaattaatagaacaagccttaaccttacttgatacttgtgccattaatgaactgcttcctgatcaatttatttatggtttaccgccactcgctaccgcgttacgaaccttacataatcctccccctgatattgcatttgctgaacttgaaaaggggcaacatcctgcacaaaaacggctgattattgaagaattattggcgcataacttaggtatgcttaatgctcgggcaggagcacaatcctatcgtgcagaacccttattaatgccacatggctcaacattacgtgaacaatttcttgcaacattgccctttacccccaccacagcacaacagcgcgtcgtcaatgaaatagagcaagatctagaaaaaaattatcctatgatgcgcctaattcaaggggatgttggctcaggtaaaaccttagttgctgcactaagtgcattaagagcgatagccaatggtaaacaagtggctttaatggcacccactgagttactagcggagcaacatgccctcacctttagaaaatggtttgagccttttggtattcaagtggggtggttggctggcaaacaaaaaggtaaagcgcgagaagcacaacaaaatgcaatagctaatggcgaggtttccatcattattggcactcacgccatttttcaagagcaagttaagtttcactctcttgcattagtcattatcgatgaacaacatcgctttggggtacatcaacgccttgcattatggaaaaaaggcgaagagcaaggctttcatccacaccaattggtgatgaccgcaacccccattcctcgaacactggcgatgaccgcttacgcggatatggatacctccattatcgatgagctacctcctggtagaaccccagtaacgacagtggctatccctgacactcggcgaaatgacatcattgaacgtatcagggtggcttgtagcgaagaaaatcgccaagcctattgggtttgtacgttaattgaagactccgaagtccttgaagcacaagcagcacaagttatttatgatgagctgacgattgccttaccggaaatcaagattggattggttcatggtcgaatgaagccggcagaaaaacaggcggtgatggccgactttaaagaaaacaaactacagcttttggtcgcaacgaccgtgatagaagtcggggtagatgtacctaatgccagtttaatgatcattgataaccctgaacgattaggtcttgcacaattacatcagctacgagggcgtgttggtcgaggtgctgtggcttcccattgtgtcttattatatagaacgccgttaactcaaactgctcgtttacgtttacaagtgctcagagacagtaatgatggctttgttattgcacaaaaagatctcgagataagaggaccaggtgaactattaggaactaagcagacgggcaatgcacaatttaaagtcgcagacttattacgcgatcaggcgcttattcctgaagtacaacgtattgctcgttatttacatcaacattatcctaagcattcgcaagcgttaatcgaacgctggctacctgcaaagacccaatatagccaagcttaa

SEQ ID NO: 298473 - DNA, 1689 bp, Proteus mirabilis
atgcgctggctgataaaaagtttggtatctctgatacttatcgttattttatttattattgtgatttatgcctttcttcagacacaatggggtgcgcaaaaaaccagtgaatggttaacacagtatagtgattatgacattcgcttttccggtattgaacatgatttaactcaaccagaacaaattgttgtttatgatctgtccattaaccccaaacaagataaaaccgccgtattagcccaatcagcacaacttaggtttaactggcaattttttactacgccttctcatctgcaaaaaattactttagagaatggtaaaattattttagctaataaaatagctccccttcctgttagtgcagatattctccagtttaaaaatatgcagttagatagcatgccaacatctagcacaacattcacctttagtgctaacaaaataacgggaggtatcacaccttggaaacctacctcgaccgatcctattggtgcggggcattttcagttttccattgctgatggcatgataggaaaaaatagctttaataattttattgttgctggcgaatatcaaccaaatcgtattttgattgaaaaattagccacccagttccttaatggctcactctctttatcaggccaatatcaagataaccaatggcaacttaatgatgtttacttaaccggactgcgttggcaatccacaaaaaccttagaagagttacaacaatcattaagtcaatctccagcaatgactatcaagcaattgagcattgttgattttactgccgaagggaaacagtgggcaataagtggatttgctgggcagttttctcaagttgcgtggaataatagcctatcactgacatccggtgagctaaacaccgatgatattgtgtataaaaatcaacatgtcactgatgtgatcgctaagttaaatcagcaagataatttatttaacatagataatttaagcttacgctatgaaaaagggctaataaaactagcaggacaatggaacagcgagacaaagactttaaatattgaagatgcaacactctcaggtattttatataccctacctgagcaatggctctccttctttgctaaacctattgagcaagatgtgaagagtatcaatattaagcagttatcattaaaccaatctatcctcattgatattaatcccctctttccttttcaatttaccggcctaacaggccaactgaaaaatttaatcatcgccaaagatgggcaatggggattatggcaaggcaccgcgacgttaagtgctgatagtggtacattaaatggcgtagagcttcgccgccctgacataacattaatgacacaacaagatactgccattattccacagttttctgctttcgtagataaaggcatcgtgcgtggctctgctgcattagaacaaaacaataaccaaagactattttctcttatcgtcaatgggctgaatgtgcccctctctttgcctaataatatgggttggaaattatcgcaacctaccgatgaaacaggacaatttaccttaaaactgaaaggcaacttagccgctgacgctgttataccgaccttaaatggtacattaataggtaaaaaagatgaccaaacgcctatcgatgacaggatgcaagacggcgaaataataaataatttatccttttga

SEQ ID NO: 298474 - DNA, 579 bp, Proteus mirabilis; identical to SEQ ID NO: 298324

SEQ ID NO: 298475 - DNA, 1005 bp, Proteus mirabilis
atgagtctagatattaaccagttagtcttgcaccaacttattaagcgtgatgagcagacattagaagtggtacttcgtgattcactcttagacattgagccggttgttcaagagatggtcgaagagttacatcgtgtttatagtgcaaaaagtaaagcctatggtttatttaatgaagagagcgaattagctcaagcattacgtttacaacgtcaaggtgaagaagaatttttaggtttttctcgtgcagcgacggttagacttaaagatgagttagcgaaatacccttttgctgaagggggaacggttcttttttgtcattatcgttatctcgcggtggaatatttattaatcgctgtattgaatagctgtaatagcatgtgggtcaatgacagtcttgatgtatcttcaacacgctatttagatattcctcatgcagatattatcgctcgtattgatttaactgaatgggagacttcacccgattctttacgttatttaaccttcttaaaagggcgtgtaggacgcaaagtttcagatttctttatggactttttaggggcgcaagaaggtttaaatactaaagtacaaaataaaggcttattacaagcggttgatgacttttgcgaagcatcagacatgaataaacaagagcgccaaacttgtcgtgaacaagtctacagctattgtaatgagcaattgcaatcgggtgaagagattgcattaactgaacttgcacaagagttaccgccattaggtgatcaaaactttgcacagtttacagaagaaaaagggtatgaattagcggaaacttttcccgcagatcgcagtacattacgccaattaatgaagtattcaggaagtggtggggggttaacggttaattttgatgcgaaactgttgggagaaagaattttttgggatcctgctaccgatacactgacgataaaaggaactccacctaatttacgcgaccagttacagcgtagagtctcagaaaaatag

SEQ ID NO: 298476 - DNA, 948 bp, Proteus mirabilis
atggtagaggtagagaagcttaaagaagaatttccagtacagttacgggaaataatgaataaaattctttatgaagaaagtataatggatgaaattcttaataaagcgaatattgattgcgtatataagtattcacttaaaaaagtgcaaaatatttggattgaagaatatataaataagttttatggtggtaaagaaataataatagataaaagaacagatgataatgtcgcttattttgtggggggttttgagtgggatgatgatgatcttgatggagttaatagtactaataatgtcaagttagattctgaacgtaatctttctgaagtaagtgaaattattcagggaaaattaaataaatatgttaaaggcgatgaaatatctgatttaacttctattctggaacaaatagaaatagataaaataggaggaaaagaaacatatactttaatttctattctgaaagagatagaacgaggtaaattagaagataacgaaatatatactttaatttctactatgaaagggatagaactagataaattagaatgggacggaatatatactttaatttctattctgaaagggatgaaactagataaattagaatggaaagaaatatataatttaatttctattctgaaaaagatagaactaggtcaattaggattgaaagaaatatatactttaattcctattctgaaagggttagaactaggtaaattagaatcgaacgaaatatatagtttaattcctcttctgaaagagatagaacaaggtaaattagtagggacaggaatatataatttaacttatattcaggatgaaaaagaactagataaattagaaaaagaggaaaaacatgcttcagtttctcttgtggaagaactaggtgaatatgtcgttgaaatgggaaatgacaactatgtgtcttcatttttataa

SEQ ID NO: 298477 - DNA, 411 bp, Proteus mirabilis
atgtcattaaaaattactaccaccccgacgacgaatgaaatcaacgaaatttatgaaggcttattaacacataaccttcagtatattcagatggagcaatatacgcccttagccgtttttaaagaggaaaatggtaaaaaaataggtgggatcactggtgatatattaggtaattggctacgtattcgttatctatgggttgataaggcctatcgtggtaacaatattggtacagaattactgcaagcaatggaaaatacagctaaaaagaaaggtgccaaatatgctgaggtggatacttttagctttcaagccctgcctttttatcaaaagcagggatttgaaatttttggcaccttagaaaattatccgattagtgacaaaaaatattatttaaacaaagtattataa

SEQ ID NO: 298478 - DNA, 480 bp, Proteus mirabilis
atgtctgacgtaaaatacttaaccttaaaaggtaaaaaacaaggattaatatcagctaattgttctacagttgattcaattggtaatagatatcaaacaggccataaagatcaaatacaggttttaagtttaaattacacaataagcaggatgcaaaattcagtccaccatccagttttattcattaaaccaattgataagtcatccccgttattaggcgttgccatatctaataatgaattattagatgctaattttgactttttcaggataaaccaatttggtattttagaaaaatattttgaaattaaattgagtaatgcaactattgtggattttacacaatcttcaccagaatcatctaacggatactctatcgtctcccatgaaaaaatattactacgatatgagtctatttcatggaaccatatttgtgctggtacaagtggatattccataaacgagcaaaatattatttga

SEQ ID NO: 298479 - DNA, 702 bp, Proteus mirabilis
atgaacaacaacaacgacgaactcaataatgctctatatcgagtcgctttagtgttagataaagggcttgaatcaacaagagaactagcagctggttatgtagaaacaatgggattggggtttgatagatctgttaggaatctatcgtatttttttgatggctatgaagatgtctatgaaaatataaaatatgaagatgatagattttttttaatggtcaaggaaacttttaaaggtaataacccaataagagcaattatcataagatacttagaacacctttttactaatctgaacgatgatgaaatgaataatcttaaaaccctattaagaggtgtattccttacatctggggcactagtaacaacaggaggagttcgtgtttacatagccacagccgcatctgaacttatatataatacggtactaagaaatgccattgcccacaagttaattagaggtggtggaaatatagcaatggcttttgtgggagggtatggcatcatagagatggcttctcaagcaaaggaaagattacgctatagcaatcctactctgtattatgaccttgttttaatgaatttagaaatggggtattttatagtagaaccaaatatatcaaaatggttatatatgataggatctgaaaagaaaagtgttgatgaagtttatcgagcaataaatggattaatttataattaa

SEQ ID NO: 298480 - DNA, 831 bp, Proteus mirabilis; identical to SEQ ID NO: 298198

SEQ ID NO: 298481 - DNA, 1482 bp, Proteus mirabilis
ttgccactggtagaaatcatgatgaacaatacttcttatgcatggaaacaacagctactgacagcgcttgatgaacagcaagtcagtagtgctgtcaatgataatgatgccgactgggaatatattgacagtgaaatgataaagttcggctcacttagtcatggtcaattagatattaaagagatccagcgtcgctgtttacacctatttgaaacgcagactaaagattttcggatcttagtccatttattacgtactttacagcatgctggagagccaaaagaattagtattggcagcacagatcctaactgattttaatcgtcaatattggcaaagttgctacccaaccaatatgaaattgaaatcacgtttagccaatcaagttttgaaacgttttgaaacagcgagtgagagtttttgtcatgcagccaacagcgcgatgcgtgatgatattctaggctcgttcgcctttctagcgcaattttggcatgaacaaagcccggcacttgcagaacaaattgatgatttaagcagagattataatcgtattgaaaataacgatgcgccgattattgttgcttcacctgtcgagaaagaagaaaaagtacagactccgccggttagcgagtctatagaaacaccgacaaaaaatagcttaacaccaactattaacgttaaccatcaagatgaaagacaatggaaacaaacattacttcaagtagctgatgttatctgccaacaagcccctgaaagttcagtaggatatcgtatacggcgttatgcaatttggcacgctattacggtcttacctcaagctaatgctcaaggtaaaacgcctttagcccccgtatcaattgaccgtgtaatggattacaaagctcaactgactcaagcgtccattacgctattaaacaatattgaacagagtctctcactctctccttactggttagaaggccatatgttagctgcacaagtagcagctaaattaggttatggggaagtagaaagtggcattattgaagagttacgtatttttttagcgcgtcttcctgaacttgttaacttgcacttttcggatatgactcccttctttcctgaaagtgtacaacagtggttagagcaatataaccaaactgaaaacggtcaattgccaccatcgaatacaaatactgcgatcctagagcaagaagtcttgcaatgttatgaacaacaaggtcttgaagcagccctgaagcttattgaattaaaccttgctagcagatcagagcctagagatagattttatggacaattattgtctgcacaactatttgaattgtcaggtatggattatatggctacacagttataccaacaacttaatacctctgcctcacattattcacttgcagattgggaacccaacttaatacgacaactcatgcaaaaaatagacaaaaagacagaaataacaatgactatggatagggatcaataa

SEQ ID NO: 298482 - DNA, 990 bp, Proteus mirabilis
atgacaattaagaaactcgaaaatggtcaatatgaagtggacattagaccggctggccgtcacggaaaacggatcagacgacgctttgaaaagaagcaagaagctattttatttgaacgttattcactggctaatcagcaaacaaaagattgggtagaaacatcaaccgatattcgccctcttagcgacttaattgatatttggtgggaagtgttcggcaaaaatacaccttatggaagaatgacgcatctaagggtaagacgtattgctgaatcactgaataatccccctgtttgccaattaaccgataagcaattggtactctatcgtgaactcaggctcgcttctggcgtaaaagcttcaacgataaatagggatatgtcagcactcggcggtatgtttactgcgcttaaaaaaacggatttctttttaagtaaacatcccgttcaaggaatatcacggttaaaacagcaaacgactgaaatgtcatatctaacagataatgaaattcagcaattattggcattattgaaaggtgacaacctaaaagttgccgttctctgtttaagcactggcgcccgttggggcgaagcgctcaagctaaaacgtgaacatgtgatccaaaataaggtgagatttacgtacaccaaaaccaataagccaagaattgtgccaatttctcaagctgttgctgacatgatttgtacaaagaaatcaggattgctctttactgaaacgtcttatcacatgtttcgtagagcaattaaaaaagtgaaaccaagtatggcattaggtcaggcaacccacgcattgcgccatacattcgccacccattttatgatgaacggcggaagtattattacgttacaacgcatcttaggacacactaatttgcaacaaacgttgacctatgcacacttcgcaccagacttcttacaagatgccattcaatataaccccttgaaaggtagtacagaattactggtttag

SEQ ID NO: 298483 - DNA, 300 bp, Proteus mirabilis
atgtcaatagatcaaagtgagaaattaaaactaattcgtgagtcagaaagactgaaagtaaaagaagtcgctgatttagttgggttaaattactattcctatcatggttatgaaacaggaaaagctaaaatgccaatggaagcgggcatgaaattatttaaacacccacgattcaggaaatatcgagactggtttatgttcgatgaagttaatcccgatgctgggcaaatcgcaccggcactcgcacacagtgggcaagacaacacgcaatcatcccactcagacaagaaaactggataa

SEQ ID NO: 298484 - DNA, 261 bp, Proteus mirabilis
atgagagagaaaatcgtaagtctgtcagatggcgtgactgaggaaaaatttgctgaattaatcggtaagccggcgagtgcagttgcagatatgcgtaaagcaggaaagttacccattattcaaatgaaaagaccaggttcaagtagagctgaaaactatgtttatctgcctgcatggaataacggtttaaagatggcttatgaatctttaccaaaagagatgcgtgacggttggttggtgtggctagggctgaaatcatga

SEQ ID NO: 298485 - DNA, 201 bp, Proteus mirabilis
atgatacgacaaataacagagcatagttttctgtatcgtggttttacgattattaagttaccacgaaaagcaatgaatccagttactcgttatcacgtttggttagatgatcagtcattcggtaagtttgatgcaatggctgaggcggttaaatatattgatgggttaaagaatgaaatatattcaaatgataatgtttga

SEQ ID NO: 298486 - DNA, 276 bp, Proteus mirabilis
atgataaaaacacctatccaacaagagttagaacctattgttaatgcgcttaaagaacttaatttcaaaataaaactacaacaagagttactcattgccgtaatgagtgaactacctgacggtacttttgttaatggaactccttttgatctagcaataaagaaatgcttagaaaaatactctgtatatggtgatgatcattatgatgccaatgaattttttgaagaatgtaaagcactagctcaacattaccgttcaaaagcacctgttatttga

SEQ ID NO: 298487 - DNA, 150 bp, Proteus mirabilis
atgaatgaattggtaaagcaaagaaacaaatacaaattaagtagtgaatcttttactaataaaagtaaaaagtattcaaaagctgataaagcaacactggctttatgtgccattgttattgtttcatttcttgtgaaagtttctatctag

SEQ ID NO: 298488 - DNA, 396 bp, Proteus mirabilis
atgaatgctgcggagcttattcaagcaagagagcaactacaaggcaatgatgattttcatcagtctaaagtggtaaagcactatcgcaatgatggtatttcatttgatgagcgcgtcagtggtatgaataaaacagcagaagttagggctgatttattaagtaagttaaataaaaatagtgatgatattttgattggtgagtttcttgattatttaagaaatgaaaataatcgtatatatcagatgatttattaccttgctgagatagaaaaagaaaagagcggaatagattatttattattaaagaggaaagataaaataaaaataattaatgcacttcaccaaataaaagtattgagcgcattaattccgaataaattagcaatgcctatttaa

SEQ ID NO: 298489 - DNA, 207 bp, Proteus mirabilis
atgtctaaagaaagtgatgtaaccgatttaattaatgccgttcgagaagatgaaagaaaatctcgggcggttcttttttctgcccgtttacgcaaattagcatcaaaagcactaagtgaacgaatggagccttcacaagtatttcaattattagaaggtgaagccgagtctatcgaacatcaagcacaggaatggaattatgtctaa

SEQ ID NO: 298490 - DNA, 222 bp, Proteus mirabilis
atgtctaaagaaatggatttagcctgtgaacaatcacagttattacttgataaacaaataaaagcagtaacagggcgttacgtcggtgtatcagcgtttgaatgtgaagattgcggtcgagaaatatccgaaaaacgccgtattgcggtaatgggatgcacccgctgtgcagattgccaaacggtgtacgagttgaaatctaagcattatcggagtgtgtga

SEQ ID NO: 298491 - DNA, 828 bp, Proteus mirabilis
atggctaataaaaccattctgaaatgggctggttcaaaagcccgcatcatggataaattaattccacatttgccaaaagcaaaacgcttagttgagccgtttgcgggttcttgtgcggttatgatgaatacggaatatgaagagtatttaattgctgatgccaatcaggatttaattagtttatatcgtaatgtcgtagaacatactgaaattatggcacgtaaagagttctatgcatgggaagaaaataatcataaaaatgattacatttctattagaaagttatttaattcaattaaggtattagataaaagtgaatgtgataaatatatacagtcagcaagatttttatatttaaatcgtcattgttttaatggtttatgtcgatataacaattcaggtgaatttaatgtgccatttggaacatatggccgtgtttattttccagaggaggaaatcagacaatttgctgaaaaagccactaatgccattatcgcatgtttagaatggcaagatactttatcactcgttgacttcggggatggtgtttattgtgatcctccatatatgggtgatgagaaaagttttactaaatatcatcaaactgattttactcacactcatcaaattgaattagctcaagcgttaaagatattaaaccaatcgcaaggtaacccgattaccgcctctaattcaattcacgccaaagagccgtatgccgatctcggttttattattcacgagattgatgcgcctcgttctatttctgcaaatggaaatcgccaatcagcaaaagaaattatcgccgtattgccagaggtgtgctga

SEQ ID NO: 298492 - DNA, 324 bp, Proteus mirabilis
atggaacagggctatgttgatattcaagatccaaaaaatggggtgcatatcaccggcacccgttttgctatcgtttattggaaaaaacaatttgggttaattgaagtcacctttattgatggtcgggtgcgacgtgaagtgattgcgtggtatgactctgcggtaaatgtgacggctggcgttgttggcgcgcatgtgagtcgtgttatttgcgcagaaattaagtctatctctgaattgatagagataatgactcacgtcgctaaactgtgcgaaacagccattgaaattattgatccgaaacgtttaggcggtgtgctgtaa

SEQ ID NO: 298493 - DNA, 2379 bp, Proteus mirabilis
atggctagccgtctaattgatttttctcagcctcctgtttcttatcctgctgatatgcaatggacatattggtggaatgggaaacagcacgagcctgttgtttatgaaagaccgcttacccgtgagcaattggctcaggggcaagcgattttattcgatattgaaaagttgcctcgctttcttaaatcccgcttatttaaatacatcgaacatcttagaaaagaaaaaacacctaaagaagttcataactggttggtatttaagtttcataaaagtgtctatcagcgtttgcaagctgttaatgcgcgttatggtttagcaaaagataagcgtcaattcttgttagatagagattttgatcaagccatgttctttaatcgcttgcccgatgcgcatgacaaaatattgcgtcatatggcgaagtcatttgcgaatgcgtgtgacaacttattcgatgaattagctgatcaggcaattgctgaaaataacggtgatcgtgaggttttacttaacctaaaagtgattaaccctatttatcatcaattagggcagttgattacctatttacatgtaacgccattgttttggggaaaagttcaaaaagggaaattaacaccagaagatgcgttatcaggattaagtcggttaactaatgaagattggtggctgaaaaagttaaaggctcatcgtcagcgttggcgtgagtctttgcatattgcctttggtgatgtgaattcagataagacgccttacgccagtaaaaatgcagtacgcgaagtcagggcgcaacgtttagcgaatatgaattatcttgaaatgatggatattcaagacgttgaatcgggtgaccgctttgatttaatggaaaaagtattggcgagtatcgctaaccctaaaattcgccgtatggaattaatggcacaagccgcaggcattcaaaaagttgcggaagaacggggcgatattggtttatttatcaccttaaccactccttcaaaataccatcccaccaagcaaattaacgtttctaaagatgagaaaaagaaaaaagttctcattaacgagaaatggaataacagcgcttatacccctaaagatggtcaacgttatttagtgaaagtttgggcgaaaattcgcaccgcttttaaagacaacgctattcgtgtttacgggatcagggttgttgaaccacatcatgatgctactccgcattggcacatgatgatgtttcttaaaaaatcagatcgtgcatcagcgattgagataatgcgtaagtacgcgcttgaagaagacggcgaagaacggggagctcagaagcaccgttttgaagcgaagcatttaaataaaggcggtgctacgggttacctcgctaaatacatttcaaaaaatatcgacggttatgcgctagagggtgaagttgatgacgaatcgggagagttattaaccgaggttgcatcagcggttactgcgtgggcatcaacttggcgtattcctcaatttcacatgtttggtttgccgtctaaaggtgtctggcgtgagtgtcgtcgtgtgcgtggcgtgagtatcgctgataagttgggtgatatagccgaaaaggtaagagcgtctgccgatgcaggcgatttcgccgcttatattgaacaccaaggagggccgaatgttcgtcgtgaaatacaaacactgttaattgctcatacgattgcagatgaaccgaatatttatgacgaagaagttttgcgagtcatcggattatattcaccgttaaaaagtggtgatgtagtaaaaacacgtgaacgtcagtatcgtttagtccgtaaatctaagcaggatattgaggcgattgagcataagcgtaagttagaaacgggtcgtgttttgactttaaaaagcgcgatcagcgcgcctcggagtcctgtcaataactgtggatcgggcagctcacccgatattaaaaacccacacgatagaggcttaaaatcgcccgtatgggggatttctgagcctgatgtttttgacctacgttcacaatatagcgattgggataaatcatttggcgaggttttagagcacaaaaagagtcaacgaataatttcaaccgtgtcattaagtgaaaatcaggcacgtttgatacctgaattcaaagcctttgccgaaaaaatgggattagatttaccgccagactcaatgtggtcaatggtgatgaacggtatgcgccttagttatggcgatgaagtgatttggtttgaaaatgggaaaattcaaatttcatcaacgaaaagtgaaaaagttaattttgaagaagtgaagcaaaagaatatctcaaatacacgagatagggtaatggctaaggttaataaattaagagggataaatatttaa

SEQ ID NO: 298494 - DNA, 687 bp, Proteus mirabilis
atggccagatgtacagcacctgttcgtggacatagttcagccgcggcggcggcggcttgtccagcatgccgtggtcgtagtagttatcgctatagtagttcttattttccagctagtaatagcggagtaagctatggtagtagtagtagtagtagtagtagtagtagttcaatacctcgttggtctaaatctggctcatcaataccatatacaactgctcaggttcaatcacttacaccaattcgagaaactgttgaagaacgagcaataaagcaacctgatcttcgagatgtatttctttgtcatgcgtgggatgataggcagggtgtagccaaagaactacatgatttactggaagcagcaggtgtcaaagtctggtttagtgaaaaagatcttaaccttggtgttcctatgatgcgagctattgataagggattagctaattctcggattggattagtattggtaactcctgcattgttggagcgtattcaaagagaaggagttgctgataaagagctttccgtgcttttagctggtaatcaactcgttcctatcgtgcataatacaacatatgaagcgcttcgcaatattagccccttacttgcttcacgaagtggattagatacaggagaagatacattagaaattgttgcaacaaaaatttccgagctggttactatttag

SEQ ID NO: 298495 - DNA, 411 bp, Proteus mirabilis
atgttagaaataaaaaaaatcgaactaactcatgtaaaaaataattgtttaaaagaaagaatggaaagagcatcttcaggtattagttcagagtacattgcatttatggatggtatagaagtaggagttctgtctttggaacactgggctaaaatatcaagtgcatttatatatgaaatatatgttctacctgactatagaagaagaggaattggtgaaaagttgcttacttttgccgaagaggaagcaattcaacttcattgtgatcatataaaattagagccaaataatttcgataaaactgtagaactagaaaagttaatttattggtatgaaaaaaatggctataaaaaaacgactaaatatgatgggcattggattaagaatcttaacaaaccattaagagggtaa

SEQ ID NO: 298496 - DNA, 1029 bp, Proteus mirabilis
atgagccgtaaaaataaaaagagttttaaagcacaacaaacggcaacccccaataacagtatggaagcctttacctttggtgatcccgttccggtattagataaacgagaaatctttgattatctggaatgtgcgcaaattgataattggtatgagccaccgattagctttgatgggttatcaaaactgtttcgtgcggcgactcatcatagcagtgcgatttatgtgaaacgtaatatcttagtgagtacgttccagcctaaccgttttctctctaagttagactttagccggtttgcgctcgacttcttaacctttggcaatgcctatcttgaacggcgtaataatatggtgggtaatttattaaaactcacaccaacactggcaaaatatacccgccgtggcgttgccgatgatagctattggtttgtgcgttacggttatgactcacaaccttatgagtttaatcccggtagcgtgtttcagttatacgaacccgatttaaatcaagagttatacggcttgccggaatatctggcgtctactatgtcagtgttacttaatgaagccgctaccctctttcgccttaagtattatcgcaatggtagccatgcgggatttattttatatgtcagtgatgcatcacaaaaccaaagtgacattgataaaatccgtaaagcaatgcaaaactcaaaaggccccggcaattttcgtaatctatttatccacgcgccgaacggcaagaaagacggggtacaagttattcccttaagtgagattgcggcaaaagatgaatttcttaacattaagaatgtcagccgtgatgacatgttagcggcccaccgcgtaccgcctcaaatgatggggatcattccacaaaataccggtggctttggtgacgttgagaaagcggcaaaggttttctttcgtaatgagctgtcaccgctacaaagtaaaatgttacagatcaatgattggttaggtgaagaagtgattaagtttgataagtacacattggctgatgagtaa

SEQ ID NO: 298497 - DNA, 1755 bp, Proteus mirabilis
atggctattaccgaaacatttgataaccgaaaaaaagcaatgcacctgtatttttcaggttaccgcattgcccgcatagcggaatcgctaggcgaaaaagcgtccacaattcacagttggaaacgccgtgataattgggatgaaattaacccgaccgaacgcgcagagttaaccgttgaagcgcgttattgcaatctgattttaaaagagagcaaagaaggcaaagattttaaagaaatcgacttattagggcgtcaacttgaacgcatggcgcggatcagaaaatatcaaaacggcggtaatgaaactgaccttaaccctaagattgccaaccgcaataaaggcgaacgccgtcagccagagaaaaacttcttttcagaagaacaaattgagaagttagaagatgagtttcgcaatacgttatttgaatatcaaaaagtgtggtatcgcgccggtcatcaccgcatccgcaatattttaaaatcccgtcaaatcggcgcaacattctactttgcccgtgaagcctttattgatgcgctgacaactgggcgtaatcaagttttcttatccgccagtaaagcacaagcctatatgttccgtgaatacattatcaaaatggcattagaggttgatgttgaattaaaaggcgacccattgatgttaagtaatggtgcaacgctctatttcctcggcactaatgcacgcacagcacaaagttatcacggcaatttatatctggatgaaaccttttggatccccaagtttcaggagttacgcaaagtgacttcaggtatggccatacaaaaacattggcgacaaacctacttttcaacaccgtcaaccatgagccatgaagcgtaccccttttggtcgggtaagttgtataaccgcggacgtaaaaaagaagatagggttgatattgatatctcacatgacgcgttagtgaatgggcgtttatgtgaggatgggcaatggcgacaaatcgttaatattgaagatgccctgcgaggtggttgtgatttattcgatttagagcaactcaaaaaagagtatagcccggacgaatataacaacctgttaatgtgccactttatggatgatatcgaatccctattcaattttaacatgatgcaaaactgcatggtggacagttgggaagtgtgggatgacattcaaccattagcgctacgcccttatggttatgatccggtttgggtaggttacgaccccagcaaaggcggtgaaaatggtgatagtgccggttgtgtggttatcgctccccctaaagtaccaggaggaaaattccgcatattagagcgccatcaatggcgaggcatggattttcgcgcacaagctgacgccattaaaaaaatcaccgaacgtttctatgttgaatatatgggcattgataccacgggcttagggcatggtgtttatcaaaatgtcatccagttttttcctgctgcgcgtgagtttatttataacccgaatgtcaaaaatgctttagtcattaaagcttatgacgtgattagtcacgggcgtttagagttcgatgcacagtgcgttgatatcattcaatcttttacttccattcgccgtactaccaccggaagcggtaaccgccctacttatgaagcctcacgcagtgaagaaagcggacatgctgaccttgcatgggcaacaatgcacgcccttttcaacgaaccattaactggcaccaccgagaacagtaataacattgtggagatttattga

SEQ ID NO: 298498 - DNA, 810 bp, Proteus mirabilis
atgtcgaagaaatcaaaaccggttcgtctttgtgttgaaggggcgacaacggacgggcgtcgagttgaccgcgagtggttaacccaaattgcgaaaaactttgatcccgcggtttatggtgcgcgagttaatatcgatcactataactattcatgggcaccacgctttggtgatgtggaatcggtgtataccgaggaaatcaaagaaggggcgctggcgggtaagttggcattatatggcgtgatcaatccaacacctgatttaattgaactcaataaaaaacgtcaaaaagtttatacctctgttgaaattaatccgagtttttcagataccggcgaagcctatctggtcggtcttgctgtaaccgataaccccgcgagtttaggcactgaaatgttgcaatttagtgccaatgcacaaagtagcccgctttcagagcgcaaacaaagcaaagataacgtcttcactgcggcagaagaaacgcatctcgaatttactgacgaaaaaccagaaagcgataagccgggactttttagcgtcattaaagagatgttttctaaaaaacaacacagtgatgatgcgcgatttaccgatgtgcatcaggcagtagagctgtgcgccaaagaagtgcaaaccctttcagcagaaattaccgtattaaaaagcgccgatcaaagcgaagcggtaaaagcgctcacgcaacaactcacggaattaaaaaaccaatttgaaaatacagacgcctcgttctcacatcgtccgccggcaacgggtggcgaaaataacggcgaagtgctgacggattgctaa

SEQ ID NO: 298499 - DNA, 1143 bp, Proteus mirabilis
atgaaaaaagaaactcgttttaaatttaatgcgtatatgacgcaactcggtaaaatttacggtgttagtgcccaagagttcagcgataccaaagtaccgattgagccgtctgctgctcaaaaattagaaactacgatccagcaatcggctgagtttttaacgcacattaatattgtgccggttgatgagcaagtcggtgaagcgattggtttaggcatcggttcgactatcgcgggaaccactgacacaacagcaaaagaccgtgaaacaagcgatccgattaagctgacaaagaacagctatctttgccagaaaaccaattacgacacccaccttgattacgcaaaaattgatatgtgggcgaagtttaccgactttcaaacccgtatccgtgatgcaatcatccgccgtcaggcattagaccgcattatgattggttttaatggtacgcaccgcgccgataactctgatcgtaaaaaatatcccttactgcaagatgtgaattcgggatggttacaaaaagtacgcgaacgtgcgcctgaacatgtgatgggcagtatcacgcaagacggtacaacaacagccaaaccggtttatgttggtaaagggcgcgcgtatcaaaatttcgatgcgttagtccaagacaccattgataaggcaattgatccagaatatcaggacgatacggggcttgttgtgatttgtgggcgtaaattattagcagataaatacttcccactggtcaataaagaccaaaacaacagcgaaaagctggcagcagataccattatcagtcagaaacgtattggcggtttaccggctgtacgtgcgccgttctttcctgaaaatgctttttttattactcgtcttgataacttgtcgatttattttcttgcggattctcgtcgtcgccaagtgctggataatgcaaaacgtgatcgcatcgaaaactacgagtcagtcaatgaagatttcgtggttgaagatttccgcggtgtggcactcgtcgaaaatatcgtttgcgaagatgccgaagaaacaccacccgaaaccactgacgttatcgcgcctgaaaataacaccggtacagacaacagcgcagtaacggaagaaacaccggctgaaaataaaaaggcgaaataa

SEQ ID NO: 298500 - DNA, 672 bp, Proteus mirabilis
atggcgttatctccgtgggaaaaacaccgcatgagcctaagtgcgcaacagtccactcaattgggtgggcatgttagtcgcaatacgaaaggctatcacatgatgctgttacgtcttgcgacagataaaaaagagctaaaacattttcagtcacgcgaacgcaaagaagcttataaacgcaagatattagccaattatcagccgtgggttgatggggcgttgtctggtggtagtggtgtgcaagatgatgtcttaatgaccattttgctttggaaaattgatgcgggggattatgagggtgcgttagatattgccgtttatgcattagctaaccgtttagtgatccccggtgttaaccgcaccacgggcaccgtgattgccgaagaaatcgccgattctgccatgcgagcgtatgccgtgaaatcaccggtatctttagcaacgttagagcgtacacgcttactgaccgatgatgaagatatgcccgatgaagtgagagcaaaactctataaaatcttagggttagtgctacgcgataataatcgaccacaagaaagctactgcgtattaagccgagccttagagttaaatattaatgtcgggattaaaaccgaattaaaacaactcgataaagtgctcaaagcccagcgtgacgctgaaaaagcattgtga

SEQ ID NO: 298501 - DNA, 456 bp, Proteus mirabilis
atggattatgtttctgctaaccctgtgccacaaaaagacgaaaccattaaaaataatggctttttccctgatattcagactcgtgattttcaattgcaaactcgcgtcgatggtacggtgacaccggaacgactgaaaagcacgttactgaacgccatgattgaagtgaatcgagagttgtatcagtggcgtattggtcaatctgagaaaacattaaaagacgtacctgctgaacaaattaacggtgaaagtgaattgatgattttatatcaacgtgccgtgttctgttttgcaaaggcaagtttaatcgaacgttatcgcgatattgatactaccgcacaaggcaataaaaaagccgacaccatgacaccagtgattgatgaagtgtggcgtgatggtcagtgggctttacaacgtatcaaaggggaaacccataacacggtggagcttatctaa

SEQ ID NO: 298502 - DNA, 207 bp, Proteus mirabilis
atgcggatttacacccaacaaggggataccgtagatgatatttgttggcgttactttggtcagtcatccggcatgattgaacaagtattagaagctaatccggggcttgttgaattaggggcaatattacccacaggcacagcgattgagttaccggacacgccacagcaacacagcacaacaccgattttacaactttgggattaa

SEQ ID NO: 298503 - DNA, 315 bp, Proteus mirabilis
atgaagaagatgccctataaagatccaagtaatattaactggtttaccgccttattaattgccggaatggcggtttttggtggtattgccagttatgcaaataaaatagtgaaaggggagccgttccgctttgccattttacttgcacaaattgttgtctctatgttttcaggggcattgattttattcggtgccagttattttcagtggcaaccagaaattgccggtggtatagcgggcatggcgggctggatgggatcagcatttattagcgcagtcggaaagttattcttaaggaaggttgccggtgagtaa

SEQ ID NO: 298504 - DNA, 405 bp, Proteus mirabilis
gtgagtaaatttacattgagtcagcgcagtaaaaataatcttgttggcgttaacccgctgttagtgaaaattgcttatcgtgcattagaaatttcaccggttgattttgcagtaattgaaggtgttcgcacacttgaaaagcaaaaagaaaacgttaaaaaaggcgtttcaaaaacattaaacagccgtcatttaacaggcgatgcgattgatattttaccctctgcgattaaaccggggatggaatggcaaccgtatttttttgaacccgtattaatggcattcaaacaagccgcagatgaagaaggggtaacattgcgttttggtaaaaactggaaaagtgatcccagtttacccgttgaaacccgctttcctgactatcctcatattgagatcccacgatga

SEQ ID NO: 298505 - DNA, 516 bp, Proteus mirabilis
atgaaaaggaacatactacttattattgtggcgggtgtgatgggcttgctactgatatttaagtttgatgccttgctcactgaaaatagccagcttaagggtgacaacctcgcccttaaacaaaatgttatcagtcatcaagacgctattgaacgctatcagaaagaacttacccgtttatcagaactggataaacaacacacaaaggcgctaaccgatgcaaaaaatgatattagccagcttaatgatgagttgcgcaataatactaagcgggtgtacatcaaagccgattgccccaaccccgataatcacaccgccgccaccgccggcatgggtaatgcaacccccgcacgacttaccgaaacagctcaacaagattatttacgtctcctcgaaatgatggcggagaatcaggcgcaaacagaatatttgattgattatacaaatcgattattacaatacatcaatgagttaaaccatgaaaaagcctgcaaatctacgagataccttaattaa

SEQ ID NO: 298506 - DNA, 441 bp, Proteus mirabilis
atgaaaaagcctgcaaatctacgagataccttaattaaaaaggtcgcttatttaggcgaaaatcccgataggctatacacctttattgatggtggggcgattgtggcaacgggtgcaagcagtcaatcttatgagtatcaatacaatctcaatattattattgatgattatcccggtgaccaagatgtgttaatggcggtgatcattggttggattgaacaacatcaacctgatattttccttaatcccgataaacgccaaagtcattttacctttgatgcctttattgatagtcaccagaccgccagtattagcattgatttaaagctgactgagcgtgtcctcgttaatgtgcaagcggataaactggttgtcggtgcagttgaagagccgactgatccgtttgaaagttgggagagtgtggctcatgaacgccgatga

SEQ ID NO: 298507 - DNA, 636 bp, Proteus mirabilis
atgaacgccgatgatttcagcccgttaacccaagcgttagccgtcatgttggcaaaagcgtcacccaatgaacgtaaaaaattggcccgtgaaattgcccgtgatttacgcaaaagcaatttacaacgtattcgtgcgcaaaaaaatcccgatggaaccgcattcaccaaacgaaaagcctcaacggttaccgtattacggggtatgaaatttgtctggaaagggcaaccgcgcagtttaaaaaattggcgactacgcaaaacaaaaaaaggtgaggtgatcaccggttacgatttggaaaagagagccgaacgtagtttttataagcgcgatattttgcgctttattgaagtgaaaaaagacaaaatcagtacgtcaaaacccaataaacagactcgcatgtttaagcgtttagccaccgcccgttatttgcgaatgtcagcaaacgataaaggtgtcaccctctcttttgcccctcaagttgcgggcattgctgcggtgcatcattacggtttgaaagagcgtgtgcggggcaagtcattagaaattcaataccctgaaagaaagctattaggcttttcaccggtagatattaaacatatcgaaaatcaattactggaattcctttcccgttaa

SEQ ID NO: 298508 - DNA, 627 bp, Proteus mirabilis
atgaatatcgcagaacttatccgaaaaatacaaaacctgatccgcactggcgttgtgattgatgtcagcgcagaaaaagggtgtcgagttaaaacgggcgacaatgaaaccgactggcgtccgtggcttactgcacgtgccggtaactcgcgttcatggtgggcgccgagtatcggcgaacaagtgttattgctgtcaatcggtggcgatttaactacctcgtttgtgttgccggcaatatttagtgacgatttttcagagccgtcaacctcattaaccgcccatcgtcatgagtataaagacggtgcagtaattgaatatgaacccgcaaccggggcgttaatagtcacgggaattaaaactgccaagattaaagccagcgagtcggtcacggtcacatcacctgacattacgtgtgtagcgacaagcaaaattaccttagatacccctaccgttatttgtaccaacaacttaaccacgggatcactgacggtacaaaaaggcggcacgatgactggcgatattacccatgttggtggacaaatgtcttctaacggtgtggtggtttcaactcatacccacggtggcgtgcgcaccggtgatggtaatacaggacaaccgcaatga

SEQ ID NO: 298509 - DNA, 339 bp, Proteus mirabilis
atgaactacctcggcatgaacagccaaaccggtgaacgtattaccgatattgagcatgttcgccagtcggtgagagatatttttaacacccccattggtagccgattgatgcgccgtgaatatggcagtttgcttgccgatttaattgacggccctgttaacgccaagatgcgactgcaattaatgtcagcgtgttacaccgcagtttatcgttgggagccacgcattgtgatgactgctattgatattcatagccaacacgaacaggtgattgtggatatcaccggctattacgcccataaccaacaaccgattaatttatctttaccggtgaaataa

SEQ ID NO: 298510 - DNA, 909 bp, Proteus mirabilis
atgccaacgattaacttaagccaattaacaccgcccgatgtgattgagtcgttagatgcagaacaactgttgcgtgaacgcaaaacggcgttgattgctgcgatgccagtccatttacgtgatgcggtggctaacacgttatcattagagtctgaaccgctaactaagctgttagaagaaaacgtctatcgtgagttgctattacgccaacgtattaatgagtctgcccgtgcagtgatggtggcgtatgcgaaaggggcagatttagatcaattagccgcgaattataatttatcgcgtttagtgttgcgccccgccaataacaaaactattccgcccacgccagcgattttagaatctgacgatgatttgcgtttacgcattcccgccgcgtttgaggggctaagtgttgcggggcctgtgggcagttatgaatttcatgctcgcagtgccgatggtcgggtgtccgatgtgtccgcgatcagtccaacaccggcaaatgtcactatttccgtgttatctcgtgagggtgacggcaccgcatcggaagaattactgcgcattgttgagcacgcattaaacgatgaagatgtgcgaccggttgctgaccgcatcaaagtgcaatccgccaaaattatcccttatcaaattgatgcaacgttatttctttttccggggccagagtcggagccgatacgcaaagaagcgaatcaacgactgacacaatacatgacagaacaacaccgattaggacgtgatattcgcttgtcggcgatttatgccgcgttgcatgtggaaggcgtacaacgtgtggaattaaaacaacccactaaagacgtggtactggataaaacgcaagcctcgtattgcacccaaagtacattaaccattggtggctcggatgaatag

SEQ ID NO: 298511 - DNA, 612 bp, Proteus mirabilis
atgaatagcttattaccgtcaggcagtagcccattagaaaaggcagccgccattgcctgccaatccttgcaaaccttgcccgtgcctttacgccaattatggaatgccagcacatgccccgttgatttattgccgtaccttgcatgggcctggtcagtggatcgatgggatgaaaactggtcagaatccgttaagcgccaagtggtacgagattcgatgtttattcatcgccataagggcacgattggcgcacttaagcgtgtggttgagccgttaggttacatcatcaaagtcactgaatggtggcaaaccgacgatccgccgggcacatttcgccttgatgtgggcgtgcaagaaaacggtattacccaagaaatctatgacgaattagaacgtttgattgccgatgcacgccccgtcagtcggcacctcttggggttatctatcaatcttgattcacaaggtgagttttatctctccgccgccacttttagcggtgatgagttaacggtttacccgtattttgcggaagaaattactgtgtctggtgcgccattaacggcggtcggagtacacattattgataaagttgaggtcgcacatgagcgctaa

SEQ ID NO: 298512 - DNA, 1917 bp, Proteus mirabilis
atgagcgctaagttttttgccttattaacagtgattggggctaataaattggcaaaagccaccgcactaggcaccaccttaaaaattacccaaatggccgtgggtgacggtggcggtacattaccgatgccaagcgcagagcaaacaaaattagttaatgaaaaacgtcgagctggaattaataccctgtttattgatccaaaaaatacgaatcaaatcgttgcagagcaggttatacccgaaaacgagggcggttactggatccgcgagattggattgtttgatgatgagggcagtttaattgcagtaggtaattgtcctgaaacctataagccccaattgcaagagggtagcgggcgaacacaaactattcgaatgatattaattgttagtcatgctgaatcagtcgagttaaaagttgatccatcggtggtgctggctactagagaattcgttgataatgccattgaaacagcatcaaaatctattttagatactgttaaaaaagagtacgcaacaaaagaagacgtcaaaaagaaatttgatagcagtaatgttgtgcatgaaaaaggggcatcaagagaaaaagtcattagtcaaaagggagtgactgaattatttcaacccaagggaagttatccaacaaatacagaattaagtgcggaactcaataaaaaaatagataaatcaaacatatctcaacaattagcgaatgatgtaaataaagtacctagccttgatttagtaacaaaagagttaggtaaaaaacaatcgtcgggaaattatgcaaataagtctacaacagccattcaattgttttctggcggagtgagggctccttatgttgatgctattcaaggggagttgtatgtaggattacgtgcattcaatgagaccccctctctttatatatcaaataagggcattggatataatatttatataccttcagtaagtggtacgcttgcattagagagttacggatattccaagacagaatcaaatttaaaatttcagcccacaggtaattatgctgataaaacgaccaaatatacgcaaaaatttgaaagtgcattagaagttacgggagaggttcaatcttcaacgggtggtataaggttagcgctaaaaacggcatcaaatgttcccacaatagttgtcaaatacggagcatcaggagtttggaaagttatcaatgttcccgataagtctggaacaatggcattagtgggagaaagttacacaaccactcaatcagataataaatatcaattaaagggtgattatgcggataaatcctcccgcaccccacaatattttaatgggggaattgtttcttcgggtgatgtaggttcgagaacggatacatttgagctatttttaaaaacagaccaaaaaccctcattattacataaatcagaggggatatattatcggtcaacacttccacaaaaaagtggcactttagcactgctcagtgatattgatgaggccaacaacattcctgtcggttcccctattccttggtcattaggtacagcgccatccggttatttaatctgtaatggtcaaacatttaataaatcgacatatcctaaattagctatcgcatatccagctgggagattgcctgatttacgtggtgaattcattcgaggtattgatggtgggcgaggtgtcgactctgggcgacagatgttatctgcacaggtgggtaacagcttgttatccagtaatatttttggtggattaagttcatcagaatcaaataaatggcataaaacaattaattatatcggtatttcaggtactgataatgacggtggttatggggtttaccagcaaatagaaggcgctaacggcaatgaaacgcgcccacgtaatatcgcctttttatacatagtgagagcagcataa

SEQ ID NO: 298513 - DNA, 621 bp, Proteus mirabilis
atgagtaaatatagtttagacatccagaaaggaaaggtcggtgataatggtttggcagaaatcgcaggttgggttaagtgttatttagcccactcaattacgcgtgaatatatgggcgcaaccatggaaaatgtcatgtttgatgtttcattatctgcgggtgcttatttagatgaaccgccattacccaaaaaagaaaatcaagctgttagacgtagagaagatggtaatgcatgggagattgttgacgattatcgtgattcagtcgcttatgatacgcaaacaaaacaacctattatgattgattttataggttcattacctgaaacgctaacactgttaaagccgactagtcagttcgataaatggaacggtaagaaatgggttacagatgaacaagcgattaaaaaagcacaaattaacttagtggcaaagcaaaaagaagaattatcgaaagaggcagaagctcgcattgttcaactagaacgtaaagttaggttagaactggcaacagatgaagataaagcgttgttgactgaatgggaaatttacacggttaaacttggcgatgtaaacccagaattagcccctgatatcgaatttccacaaaaaccagaataa

SEQ ID NO: 298514 - DNA, 1173 bp, Proteus mirabilis
atggcacaagattatcatcacggtgtgcgcgttattgaaattaacgaaggcacccgccccattcgcactatcagcaccgctattgttggcgtggtttgcaccgctgatgatgcggacgaaaaaacctttccattaaacaaacccgtcttactgaccgatgtatcacaggctatcggtaaagcagggaaaaccggcaccttagccagcaccttaaaagccatttccgatcaggctaaacccatcactgttgttgtgcgtgtagaacaaggtgaaagtgaagcggaaaccaccaccaatattattggtagcactaccgaagaagggctaaaaacaggattacaagcgctgttagcatcacaagtccaacacggcattaagcctcgtattattggcgcgcccggtcacgatactttagcggttgccaatgagattgcggtgatttgtcaaaaactccgcgcctttggttatgtttcggcttacgactgtaaaaatatcagcgaagcaattaagtaccgtgacaactttggtcagcgtgaattaatggtgattttccctgatttcacgtcatgggatagcaccaccaacagtgaatcaaccgcttatgctacggcgcgtgcgttaggtctgcgtgccaagttagacaatgatattggctggcataaaacgctatcaaatatcactgttaatggcgtgactggtatttctaaagatatctattgggatttgcaagaccccgccactgatgccggtttactgaatgaaaaaggtgtgacgacacttatccgccgtgatggttttcgtttttggggttcgcgtacctgttcggatgatccgctgtttgcctttgagtcttacacccgtagcgcgcaagtccttgctgacaccatggcagaagggcaaatgtgggcgattgataagccattaacaccgtctttagcgcgggatattgttgaaaccatcaacgcaaaattacgttcactggtcagtcagggctatttgttaggcggtgaatgttggtatgacccgacatcaaatagcaaagaagcactcaaagacggcaagctcacactggattatgactacacaccagtgccaccaatggaaaatctgatgttacgtcagcgtattaccgataaatacctgatggatttcggtaacaaaatcaaggggtaa

SEQ ID NO: 298515 - DNA, 516 bp, Proteus mirabilis
atggcgttaccacgcaagttaaagaattttaatttatttatgaatggcgccaattatgtgggcgttgcggaagaactcacattacccaaaatcacccgcaagttagaagcctatcgcgggggcggtatgaatggctcggtgcaaattgatatgggccttgatgatggtgcgttagacactgattttaccctcggtggtgctgatattgacgtttaccgccaatggggcgcatccactattgatgcggttcaattgcgtttatgtggcgcttatcagcgtgatgatacgggggaaacattagccgttgaagtgattctgcgtggtcgttatagcgaaatcgatccgggtaactggaaatcgggcgataacacacagaccaaagtcaccgtaaaacccacttactacaagttagtgatggacggtcaagaaatcattgagattgatatcgtcaatatggtggaaaaagtggacggtaaagacctgttacaagcacagcgtgatgcgctgggactttaa

SEQ ID NO: 298516 - DNA, 348 bp, Proteus mirabilis
atgaaagagccaatcaaagaacaaaaccaagagccaattgaatgggttgttgttaacggtgaccaagccacggtgacattagaacaaccacttatgcgcggtgaaaccaaaatcgacaaagtgacggtacttaaacctaattcgggcgcgttacgtggtgtgcgtttacagcccttaatggatatggatgttgatagcatgatgcaggtgctaccgcgcattactatgccaacgctaaccaaaaacgatgtgctgtctttagccgcgggcgacttggtaaacctgagtgtgcaggtggtcaattttttattaccgaagtcggttatgcccgattccctagcgaattaa

SEQ ID NO: 298517 - DNA, 2862 bp, Proteus mirabilis
atgagtaataacttaaaattacaagttgtactgagtgcggttgataaattaaccgcaccgtttcgcagtgcgcaagaaagcaataaacgactggcgtccgctgtacgccagtcgcgtgactcgttaaaaacacttaatcagcaagcttcacaaattgatggctttcgcaagattaaacagcagttaacctctacacagcaggcgtaccaatccgccacacaacgtgttgccactctcgccaaagaaattgccaacagtgagaatccgacaaaaaaacagttagaagcgtttaaaaaagcgcaacgggaagcggggcaactcaaaaccaaatatgagcaattacagcagtcggcacagcgacagcgctcggcattacaagccaatggcatttcgactaatcaactcggtcaagcacaacgacggcttaatggtgatattgaacgcaccacgcaacaactccgccggcaagaaaaccaattaaggcgcagtgccgaacaagaacggcgcatggcagtggctaaatcgcagtatcaaaagacgctcgatgtacgaaataaaatggcgggtgccggtgccactatgacggcaaccggtgccggtatgttgtattccgcgaaacaaaccttaatgccggggtacgagtttaatgtcggtatgtcaaaggtgcaggcattaacgcgcttagataaaaactccgatgaatttaagatgttacgtgaacaagcgcgagagctaggcgcaaccacggcatttaccgccaaccaagtggcacaaggtcaggcattctatgccatggcaggttttaagcctgaacaaattaaaaatgctatgcccggaacgctggcaatgtcattggcaggtgatcttgatttaggcaccacggcagatatcggctccaatattttaaccggctttaaactcgactctgaccaaatggggcgagtgagtgatgtgttagtcggcgcttttacccgttcaaataccagtttaaccatgcttggcgacaccatgaaatatgttgcaccggtggcgtcagggttaggggttgacttagaaaccgcagcagctgcaacgggtaaattgggtgatgcgggtattcaaggttcaatggcgggtacttcattacgcgctatcttagggcgtcttgctgagccgccgaaaatggccgccaaagcattagaagaactcggtattaaaacccgtgatgcaaaaggaaacttacgcgactttcctgagttattagccgaattggataagaaaaccgccaatatgggtaatgcgcaacgtgcgggattctttaaacacattgccggtgaagaagccttctctgcgttatcggtacttgccgaacaagcgggcaaaggggagttgcaaaaccttgtggctgacttaaagaaagccaaaggtgaagcccaaaaagtcgcgggcaccatgacggacaacttaagcggggatatgaaaaacctgcaatctgcatgggaagatttaggcattcagatttttgacggcattgatagcccattgcgccagatatcacaaagtattacccgtgtgatttctaaagtcggtgtgtggatgaaagaaaatcctgagctggcaaaaacactaacgatggtaggtttagccattgcgggcattattaccacgctcggtgttctctcgttatccattgccgcaatgttagggccattagctgctgcaaaattaagcctgtcaattttaggcattaaaggcggtggcgcgttaacactgttattaaaaccgataaaattattaggcagtgcttttttatggttgggtaaagccatgttagctaacccaattttattggcgattgcagttattacgggtgcgttttatctgatttataagaattgggataccatcgcaccctatgtttacaaggtgtgggagtctgttaaaaagtataccgctattgcatggcaagcattaaaacagactatcttaacggcatgggaagccattaaatatattttctttaactggacgataccgggcttaattgcaaaacattgggatagtattgtcggctataccaaaaccacgtgggcgtctgttaaatctgtaatttcgggaatatgggaaggcattgaaacctttttcatgacacaaacgttaccgggggttatttatagcaattgggatcaaatcgttaaatacacacaagaaaaatgggaatcccttaaaacaacgatatcgactaaatgggatgaaattgtcgaagataccaaagcgttaccagctaaatttttacagtttggtagcgacctgattgattccattattcagggaatcaaaaacaaatggacagactttaaaaatagcattggggaactggcaaccgccgctaaagaagcgctcacaccggagtttgctaaaacttccgatccgaaagtgcagtctgcgttagattcttacaatagcaactttgctggtatgtatgatacaggcggttatatcccgcgtggcaagtttggtgttgccggcgaaaatggccctgaaattgttgagggccctgcgaatatcaccagtcgtaaacacaccgccatgttagcaacagccgcattatcgctaggcagtgccttttcattacaggcacaaaatgccccgttgcacccacacagtttacccgttgagagctatcgctcggcaccggctaatgtgaatattcaacatcaacgttatcaaggtgcgccagcacattatgaaattaatattcatcctcaatcaaaccaatccgcgcaagatatcgcacatcttgttatcacggaaattgaacgccgtgagcgtgacaagcaagcacgattaaatagccgttatcaagacagtgaggtgtggtaa

SEQ ID NO: 298518 - DNA, 465 bp, Proteus mirabilis
atgatggcagcacttggggtatttgtgtttgagttacgcaccgtaccttatcaatcgctacaaaaacaacaaacatggcgacacggttttactcaacgtgtcgcacgccggccagcacaacaatttattggccctgataccgatgtgatcaccttgtcgggggcgctttatccctcattaacgggcggtaaagtgtcgttgctggcattagagttaatggcggatagcggtaaagcatggtcatttattgatggtacgggcaccattcatggcatgtttgtgatcaccgatttacaacgcacccacaccgaatttttccaagacggtgccgccagaaaaattgatttttcactgacattaaaacgagtggatgactctatcagtcagatgttgggagatttaagcgaccaattaggcatgatggccaacggtgccggtgaagcgataaaaggggttttatcataa

SEQ ID NO: 298519 - DNA, 1098 bp, Proteus mirabilis
atgttgccagaaatgatcaccggtaaaagtagcacgccagcttttgtgttaattgctggtgatgaagatattagcgccaaaattcaaggacgattaatttcgctttcattaacggacaatcggggctttgaagctgaccggcttgatattgagttagatgattctgacggcgcattaatgatgccaaagcggggtgaggtgttaaccttacatcttggttggcagggtgaaaaccttattcataaaggctcgtttacggtcgatgagatagagcattcaggtgtacccgataaaatgacattgcgcgcccgtagtgcggattttagggcaacgctgaatgttcgccgtgaaatgtcataccatcaaaaaacattaggggatatcgtcaggaccattgcagggcgtaataatgtcacggcggtggttgatcctggtcttgatactataaaaattgaacatatcgaccagaccaatgagtcagacggcagttttttaacgcgattagggcaattaaacggtgccaccgcctgtgttaaaaacggcaatttactgtttatggtgcaagggggcaataccaccgctagcggtcaaacattaccgttagtacaaatcacccgtagtgtgggggatggccaccgtttttcattagtagataggggcgcttatactggcgtgactgccaattatttaaatacccgtaaaccgcaagagaaaacacaatcacaaattcgtcgtagaaaacccactactgataaaccgaaaaaagaagaagagaaacaaggggagtatcttgttggtgaagaaggtaacgtaatggtgttgtctcatacttacgcgagtaaaaccaatgccgaacgtgctgctaaagccgcatgggaaaaaatacagcgaggtgttgcatcttttagtattacccttgcgaaagggcgtgcggatctctttcctgagctaccggtacaagtgagcggatttaagcctgagattgatgaagcctattggacgttggtcacggtgagccattccctgaacaatagcgggtttaccacctcgttagaattagaagttaaaagcagtgagatagatatggataaggaatag

SEQ ID NO: 298520 - DNA, 210 bp, Proteus mirabilis
atgatgatttgtcctgtttgtggtcatgccgcgcatactcgtagtagtcagcaaatatcttctgataccaaagaacgttataaccagtgccagaatataaattgtggcgcgacgttcgtcagccatgaaaccgtaacgcggtttatttcaaagcctctgttggtagaggcagttgtaccacatggagagcaaaccatgttgaatttatga

SEQ ID NO: 298521 - DNA, 1149 bp, Proteus mirabilis
atgtttaacgcgacaaatcttttaaaatctgaaaaaaactattttattttagttggtaagaatggtagtggaaaaagtagaatgttgaatgagttggcagaagaacagcatggtttgggatataatgttgtgactgtatcaaatacattatttgataaatttcagctacatacaacaagttttacttacgattatatcggcagtaagttaggtaggaattttccagcacaagctataaaaaaaactttttctactaatagtatagataaaataaaacgtgttttttctgttttagagcatataggttataagccagaaattggaataaaaataaattttagaaataaatttaaagaatcaatgagatattctagttatttagataatattgatgaaaatattcctgatgaactaggtagagcaattgaaaaggcaatgcatcagactggttatggctataatactgttattcgattaactccttatgccaatgtgtttgatgaaggaggctttagtttttatttgattttacttaaatacgaaaaaatattaaaaagagctaatataatatcaggtatagaaatttttttaaataaagaaaatgaattattccctttgagtcaagcaagctctggagagttatcttttattgctttacttgtccatataacattttgtgtatgtaataactcttttatttttattgatgaaccagagaatagtttgcatccagaatggcaaagaaattattttaattttttaaagggtgcaattggatataatcaatgtaaagttgtagtagcaacgcattctcctcttataataacttcagtttcagacgatgatcaatttgaggtttataaaagtgaaataaatggttttaagaaagtagattactttagtgataatgctgaagaattgtatattgattactttgatacattaacgcctaaaaatagagaattatctaatcgatgtgttgatattatagatcaattagatattgggaaaataacattagagtctgcaaaaaaaaacatatcaaattttatagatatgacaaatgattcagctcaaaaagaatttcttaagggagtaaatatattacttgaaaaagttaacaataagagagggatagctaatgagtga

SEQ ID NO: 298522 - DNA, 633 bp, Proteus mirabilis
atgagtgatatttcatttactgatgaagagatagaattaatgaaaaatgctatcgcaagagggcatcaattttgggtagatgaatctctaaaagatctaaaaagaagaattaaaaatcatttaagacaacatcaagaggaatgttgttgctattgttctaggaatatagatgatgaatttaatatggtactcgatatagagcatattataccaaaatctaaactagtatctgaaatgtttgaaatgaggaatttagctgtatcttgtaaaagatgtaatatgagaattaaaaaagaagatatttcatttattaatgaagattttgagtcttttaaaaataatattagttattatcaatcaggaaaatataaatttattcatccgaatcttgatggatgggatgatcatctaatttaccaggtgcagcaacaaaatagaaaaaaaatagtttattatcaggttgttggtgatagtagtaaaggcgaatatacaaaaaactattttgaattaagtaagatacaggtaaatacatttgatgaagctcaaggggcctgcaacagaaaagaacctttagattctaaaattgctgaagaattctctaaattagaaatttcgatgttaggaaaagagtaa

SEQ ID NO: 298523 - DNA, 633 bp, Proteus mirabilis
gtggcgacttatgaagcacaaattagaaaaaatcaggcaacactggataccgcaagaactaatttgcaatatacccgtattactgcgccgatggatggtgtggtcacttttatcaaaacccttgaagggcagacagtcattgcagctcaagaagcaccaaccatattaacattagctgatttagataccatgttagtaaaagccgaagtttctgaggcggatgttatctatttaaaacccgatcttaaagcctcttttactgtgttaggagcaccagacaaagccttcaatggtaagttaaaagatattttacctacacctgaaaaaatcaatgatgcgattttttactatgcacgttttgaagtccccaatgaacaacatttgttgcgtttacaaatgacagcacaagttaaaattctccttgagcataaaaaagatattctcttagtgccattatcagcattaggggaagatgtaggcataaatgaatatcaagtagaggttctcgtcaatgggcagcctgaaaaacgcgtagttaaaatcggtattcgtacagatgtttatgcagaagtcattagtggattaaatgaaaatgatgacgtgatcctcggtgagattgcaggagagtcataa

SEQ ID NO: 298524 - DNA, 1944 bp, Proteus mirabilis
atgtctgcattactagagctcaacaacgtaagccgtttatataccaatggtgaagaagacacggtggtactggatcagatttcactgacgattaatgctggggaaatggtcgcgattattggtgcatcaggctctggaaaatcaacgctaatgaacatattaggttgcctagataagccaagcagcggtgaatataaagtggctgggcaatgtgttgcagatatggaaagtgaccaactggctgcgctacgccgtgaacattttggctttatttttcaacgctaccatttgatggcgcatttaactgctgagcaaaatgtggagatccccgccatatatgcaggtaaaagtacagagcaaagaaaagagcgcgcccgtgcgctattaactcgccttggtttagcagagcgtattcactatcggccaagtcagctttccggaggtcaacagcaaagagtcagtattgcccgcgcattaatgaatggcggagaagtgatcctcgccgatgagccaacgggggcattagatagccaatcgggtaaagaggtaatggctatcttaaagcaattaaatcaacaagggcatacggtgattattgtcactcacgatccattaattgcccaacaagccgatcgtattattgaaattaaagatggtcaaattattagcgataataataatcaccattctgcaccagtgaaaaaggtaccacctgcgatccaaaccgcctcttattttcagcaagtcattggacgttttacgcaggcattaaacatggcttggcgagcaatggtggtgaataaaattcgtaccttgctgacaatgttggggatcattattggcattgcctctgttgtcaccattattgttattggtgatgctgccaaagatagggtcttagcagatataaaagcgattggcgccaataccattgatatctatccgggtaaggagcttggtagtgattcaccagaagataaacaatccttaaccattcaagatgttgatgcgttaaaacagcaatcttatatacaatcagtgacaccacagatttactttagctctcgattacgtcgtggtaatcaagatgcgccggcaacagtttctggtgttaacgaggattatttttcagtgtatgcgttgaaatttgcacaggggagcacttttacgcctgatatgatccatcgccaagcgcaagtagtcgttattgatgaaaatactcgtcatcgttttttcccgaataaacaagcggtgattggcgagcaaattattattcgtaatattccttctactatcataggggtggttgcagagcaaaaatccacttttggtgataataagtcattacgtgtctgggtgccttacagtacgctaagtagtcgaatttataatcgtagttatttagataacatcacggtaaaagtaaaagagggctatgatgcgagtgttgctgagcaacaaattctccgcttattaacgatccggcatggtaaaaaagatatttttacttataacattgatagctttattaaagcggctgaaaaaaccacgcaaactatgcaactgtttttaaccttggtagcggttatttcgctggtggtaggcgggatcggcgtgatgaatatcatgttggtttctgttacggaaaggactcgggaaattggtattcgtatggcggtaggcgcacgagccagtgatgttatgcaacaatttttaattgagtcagtactggtgtgtttggtgggaggattattaggtattagcctctcatttgcgattgctatgtttgccagcatgatgctacccaattggcattttgtgttccagcccacggcactgataagtgcttttgcttgctctacagcaattggggttatttttggttttttaccggcgagaaatgcggccaaaatgaaccctattgatgccttagcgagagagtaa

SEQ ID NO: 298525 - DNA, 2295 bp, Proteus mirabilis
atgcttaatcacgaattagagcttagtcttaacattgcattcgcgaaagcccgtgataacagacacgaatttatgactgtagagcacctgttgctggcgctattaagtaacaaatcggcgcgtgaagcattggaagcttgtaaagtcgatttagcagtcttacgcgaagagcttgaaatctttattcgtaaaacgacacctattttacccgagcatgtcgatagagaaacacagccaaccttgagtttccaacgtgtattacaacgtgctgtgttccatgtgcaatcttcaggtaaaaatgaagtttccggtgccaatgtgctagtggcgatttttagtgagcaagagtctcacgccgcttatctactacgtaaacatgatgttagccgtcttgatgtggttaattttatctctcatggcattttaaaagatgatcaacaaaacagtgatgatcagtctgatatgggcgatataaatgcacaatctcaacaagagatgccacaaggcgatgatcgcatggataattttaccactaacttaaaccagttggcgcgtcagggtaaaattgatccacttatcggccgtcaagcggaattagaaagaacgatacaagtcttatgtcgtcgacgtaaaaataacccattactggtcggtgaatcgggtgtcggtaaaacggcaattgcagaagggctcgcatggcgtattgaacaaaatgatgtgcctgatgtgatgaaaggctgtacgctctattctcttgatattggatctttattagcaggaaccaaatatcgtggtgatttcgaaaaacgctttaaagcgttattgaaaacacttgaaaaagatgaaaaaagtatcttatttatcgatgaaattcataccatcattggtgctggtgccgcctctggtgggcaagttgatgccgctaacttaattaaaccactattatcaagtggtcgtattcgtgtgattggttcaaccacttatcaagaatttagtcagatctttgaaaaagatcgcgccttggctcgtcgtttccaaaaaattgatgtaattgagccttcggcagatgaaaccgtattaattattaagggattgcgtcagaagtatgaagcacatcacgatgtgcgttataccaataaggcaattcaggcagctgttgatttatcggttaaatacattactgatagacaccttcctgataaagccattgatgttattgatgaagccggtgcgaaaacccgtttaattgcaccaagtaaacgtaaaaagacgattaatgtctctgatattgaatcggtagtagcaaaaattgcccgtattccagaaaaaacggtttctagcagtgataagtcaatgctaaaaaatctggataaccaattaaaaatgttggtgttcggtcaagatcaagccattcatgccttggctgaatctatcaaaatgagccgagcaggtttagggcaagagaataagccggttggctctttcttatttgccggaccaactggggtgggtaaaacagaagtaacggtccagttggcgaaagcgcttaatattaagctactgcgctttgatatgtctgaatatatggaacgacatacggtaagccgtttaattggggcacctcctggttatgttggttttgatcaaggtggattactcacagatgcggtgattaaaaatccttattctgtagtgttacttgatgagattgaaaaagcacatcctgatgtgtttaacattctgctacaagtgatggataacggaacacttactgataataatggccgtaaagctgattttcgtaatgtgattttggtgatgacaaccaatgcgggtgttcatgaaacgcaacgtaaatcgatagggtttactgaacaagatcatagcactgatgccatggttgaaatcaaaaaagcgttttccccagagtttcgtaaccgtttagatggcattatttggtttaatgcgctatcagccgatattattgctatggtggttgataaatttattgtcgagttacaagctcaattggatgataaaggggtatcgctagaggtaagtcaagaagctcgccaatggttaagtgataaaggttacgataaagcaatgggagcaagacctatggcgcgcgtaattcaagaaaatctgaaaaaaccattagccaatgaaattctgtttgggtcgttagttaatggcggatcggtttctgtgaccttaaatgaccaagaaaataaattacagtatcaatttactagccaagaaaaattggctaaaaaagaagataccgttatttaa

SEQ ID NO: 298526 - DNA, 1320 bp, Proteus mirabilis
atgatatatttaagtctgttcaacggaatatccgctggacgtttagcgctgtctcgcgctggaattaaatttgataaatattacattgccgaaatagataaattcgctaataaagtatctgagtttcattatccagacaacatccaattaggcgatgttaataattggctcgagtgggatattgactggtcaagtgtggggttagttactgcggggttcccttgtcagtcgtggagtttagccggaaagcaattaggcgataaagacgagcgaggtaaattattctggacgacattagaaataatgagccatgtattagaaaataatccagatgctaaatttatgctcgaaaatgtaaaaatgaaaaaggagtttgaggaatatataacactgcatacggagcgagctcttggttatgtaaataaaacgcttattaatagctcgttattatcagcacaaaatagacagcgttattattggactaattttgaaattagccaaccagaagataaaggtattttactgaaagatattattgatgatattaattcgcatggattcaaaaataacaaagctataaacaaattatttaatgtaaatccatcagggaaaggaatgaatggaaatgtttatagtgtagatgggattagcccaacactaacaacaaataaaggagaaggaataaaaataacaggaggtgctattagaggtcgttatattatcaacggggtaagacaagacaataaagtaaaaacagctggccttactactcagagattagagttaagaagtgatgaaaaaacaaacacattaaccaccgttcaaaaagataatgtcgttgtttacagaccatgcgaaccaagagggcatattaagcaatctaaagacggattaattcatgttgctaatgcctcagacattaaaggtaatgaacagataaaacgcatttattctgatgctggaaaagcccctacattgtcaacatgccagggcgggcacagagagccgaaagtcgcaattagagataagaataaaaccattcgttcatctggacgcaactcgtatgataggcatgagtgggattctattagtaactgccattatcgcaaactaacacctactgaatgcgccagattgcaaacattcccagacgggtggtgtgaaaatatcgtctcaaattcacagtcatataaatgttacggcaatgcttggactgttgatgttattgctcacatatttagatgtgcatatagagaaaatatacatgaagctattcgtcctgttgttaattatgaacaatcatgcggtgccaatatctga

SEQ ID NO: 298527 - DNA, 270 bp, Proteus mirabilis
atgaataaaaatgagcttcaagtattaatcgattataccaaaggaatgattgcagataataaggagccagaaaagaaagttattattgcattgtgtaatgagttagagagaataactgatttagaaccagcagcatttgccagacgcacgggaatgcaaaggcctctagatttaactgtatctcagacagtattaaatgaatgggtagaatttaataataaaaacccagaaataaaagacgatatttaccctctatttattttagattaa

SEQ ID NO: 298528 - DNA, 282 bp, Proteus mirabilis
atggtatgctatttaatgttctatgcagacggaacaactgaaaaaaaagaaaaaataagatttgaaagccctatactatcaataccgccaaataaccctgtcaattcaacatcaatcgcctcaaaagcaaataaattttccaaaaagtttcacacttataaagtaagagatgaacataataataaatatgccattgcttacgaggttggaatggaaaagccaagtgataaagacatattgaagctaataaaagaaaaagatattacaccaagcttaatctag

SEQ ID NO: 298529 - DNA, 456 bp, Proteus mirabilis
atgaaagatagaatcaagtttaacgatgtaatgctaaaggctgtcatagatggcaggaaaacgcagacacgcagaccgattaaaccacaaccaaaagtaaccgaagatgggttacgctatcttagcgcatggcaagatggttacacactatcagagcaagtatgcgcagcatggcggcatggatttgttgatgttgattgcccgtatggcgagattggcgacattatcaacattgcaaacaaggacggtaatatcaaagggaaaattgaaattactgacgtctggattcagcaagtaaacgatatcagcgaaagtgatgcagaagccgaggggtttgacgggaaactaaatgcacatacttctgactttgctgcggtatggattgcaatatatggaattgatagttgggtaaataacgaatgggtgtgggttattgagttcaaaaaggtggtatag

SEQ ID NO: 298530 - DNA, 285 bp, Proteus mirabilis
atggcagtagttcaattttatacaacaagaagcaaagacgaagacccatcacaaattactaataacctcagatatgaaataccagatgatcataatttcagttctgatgatgacgactttaaattttgtattgaagcatgtgcagaatattatcacgatgactgtgatggatgcgaggatcgatggccgttgttattcatgttatggattgacgaccaatatcttggcacgtttgaagttgagcgtgagtttgacccagcattctcagcaaataaggtcgagtaa

SEQ ID NO: 298531 - DNA, 489 bp, Proteus mirabilis
atggctgagagaggcgtaaataaagcggtcatcattggtaacttaggtgatgatccgacagttaggtattcacctaacggaacagcattcgctaatttctcagtcgctacaagcgaaacatggacggataaaaaaactggagaaaagcgagagcgtacagattggcacaacatcgctatacaaggaaagttagcggaaatagcaggtcaatacttgaaaaaaggaagtcaggtgtacattgaagggaaaatgcgcacccgtaagtatcaaggtaatgacggtcaagataagtacattactgaggttatcgtggatatgaagggaacaatgcagatgttaggtggccgtggtggtcaagataatgcaccttcacaaggccaaggcggttggggtcaaccacagcaaccgcaagcaccaaaacaagcatcgagtaatcaagcaccgcaaaatgagccaccaatggactttgatgacgatattccgttttga

SEQ ID NO: 298532 - DNA, 570 bp, Proteus mirabilis
atgaaattgaatatcacagtagatttagattggttagaagaagatggaaacattgatgaagaagttaaacatcaaattatacagggtgtaaaaagtgccatttccaagcagtgtttggataaagtagaaaagaaagcatcagaacaaataaatcaagccatcaatgattctatcacagccgcgaaaagagcaattgagcaaaaggcgattgcatttgccgatgagtggctagaaaaagaagtaactattaccgataaatggggtgatgtgcaagattgcctttcaatcaccgaccttattaaacgaacatttgacaatcttctggagaagaaagttaatgataatggaagctttaccgattcttatggaagtgggacacgattaattacatggctaacagacaagcgaattaaagacgtcgttcaggaaaaattaaaaggtattaataaggatattgaccgacaaattactgaagctgtcaacgctggaattcgaaaaaatgtctctgataagtttgctgaaatggttgtaatgacagcaaaacatcaaaacgcactcgaacacaagtaa

SEQ ID NO: 298533 - DNA, 942 bp, Proteus mirabilis
atggcaaatgaattagtcgtaattgaacaagcgacagccctagatttatttacagcaccagaaaaagtaaatcagatgctagagcacattaagtctcttgcagaagaagagcgtaaagaactcgacagtgatttctcagtagctaaaaaccgaaaggcttttgcatctctggcgtacaaagttgctcaaacaaaaacgtatatcgacaaggaaggtaaagcagttgtcgataagttaaaagagctacccaaaaaagttgatgctagtcgcaagatgtttcgtgacgaactagatgcgttaagcacagatattcgcaagccactaacagagtgggaagcacaagaaaaagctcgcgaagaagccgaagcgcttaagaagcaaatcgaagttgatcatgaagaagctctgcaaatgaacgagctgtttgatttacgcaaagctgaagaagaacgcaaacgcattactcgtgaagaagaaatgaagcgacaagctgcggaacaggcaagacttgaagctgagcgaaaagcacagcaagaaattgaagcggcagctaaacgtgagcgtgaagcaaaagaagacgctgagcgtgcagagcgtgaaaagcaggaagcaattcaacgtgcagagcaagcagcaaaagaagctaaggaaaaggctgaacgtgatgctaaagaagctcaggagcgagccgaacgtgagaaacaattagctatcgaagccgaacgcaagaaagcacaggaagcagaacaagcgcgattagcagaagaagaacgtaagcgtcaggaggaagctaaacgtcaggctgataaggaacatcgtcgcaagtataaccaagaaacattacaggcgttagtcagtaacggatttgatgaaaaattagcaactgaatttattaagctagtcgcaagtaaacaaatccctcatatgacaatgaattactag

SEQ ID NO: 298534 - DNA, 246 bp, Proteus mirabilis
atggggaaaatgacattcgtagttgagtatgaagatggcaaggagccgtctgtaaacgcaggaacggagatattaggtggtcgattaacagccgtagcattctatgattaccgtgatgatttgcttactcaggatgaggctcaagctgtaaacaattccattgaatttactgtactgcgagactactgcgaagagtttgaagttgatttcgacgaagttgtcgctaagttagaatcgccactctag

SEQ ID NO: 298535 - DNA, 696 bp, Proteus mirabilis
atgtttattattgaacgtatggtacaaactaataacgtgcgtgaattatttgccaagaggcttgcgcaggcttcaagagatgctggttttgatgaccatggcaaagcgacagaaatagctaataaacttggcgtaaccaccaaggccgttagtaagtggtttaatgccgaatcactaccaagacaggaagtgatgaataagctagctaaattactttcagtggatatagtctggttgcaacatgggcaagaaaatgtaaataatgcaaatgttagtaatccaaggccttatagaccagcacctaaataccctgtaattagctttgttcaggctggtaattggacggaagcttgtgagccatacacgctaagtgagatcgatgagtggtacgagtctgaagtttctgttcaaggatctgctttttggcttaaggttgagggcgactcaatgacggctccaacaggggttagtattccagagggatcattagtcctagtagatacaggaagagagcctataaatggaagcttagtaatagccaaattaacagatactaatgaagctacatttaaaaaacttgttctggatggcgctaaataccttaaagcattgaatccagcctatcctgtaattacgataaatggaaattgcaagattattggagtggttgttcaaatgatgatgagatttgtttaa

SEQ ID NO: 298536 - DNA, 228 bp, Proteus mirabilis
atgcacgatttaagggagccaattaaacagattggcgttgcagaagtagcaaaggcatgcggagtaagtgagcgagctgtttataaatggattgataacggttttctaccaaaaacagaattctttggaaaaactaattatgcaaaaacaatccaagccctgtccaaagggaaaataaaagctgaagacttactagctattagccaaaaaaaattactttctgcttag

SEQ ID NO: 298537 - DNA, 957 bp, Proteus mirabilis
gtgaagacggtagaggcagtaataggtcgatggcctgagatatttgagtattacaaattaccgccaatcacagggaaaaaacactatcaaggggaatgccctatatgcggaaagaaaggaaaattcaggatagataataaaaacggtaagggaacttggatatgctcatgtggtgctggtgatggctggaaactactggaacttacccagcaaaaagattttagagttttagcaagtgagatagatcggttaatcggaaacagttattcaggccaagtagtaccgcacgcaaaatcagatgtaaaagccactcgttcaaaagttatcgcaaggttcgcttcactaatcccactcaaagatacatcagctcatagatatttgatgagcagagggatcaacgttttaccatctcagcacgtcagatacagtaacacacaacaaaatggatttacttcgctctggtcaattgcaacagatgatcgtggtgctggctgttatctgcataggacgttcttagagggcgaaaaaaaagcaaactttgaagggaataaacgacttaccaagttacaggaagataactatttagattttgctggctctattgcaattcgaatgaccccagtagcatcaacgctggggatcgccgaggggatagaaacggcgctttcttgtcagcaagtctacggctgtaacacatggtcaacgttaaatgccaatttcatgcggagatttagagcgccgaaaggcgttaagcatctgatcatatttgcagacactgacagcaacggaacagggctagcagctgcctttgaatgtggcaatcgaaatattctaagtaataacgatgttgaaaaagtcagcgtccgatggattgacggaactggcgattttaacgacatgctagtcaatggggcaaaagtatttcaacaagagttgtggcgcaaacaagcagtttaa

SEQ ID NO: 298538 - DNA, 168 bp, Proteus mirabilis
atggaatatttacgagatattttaggtacattgtttttcatgctagtaccgattactggatttttatctgttgcattcctgatgtatcacgaaaaatcaggttggggatggttacttttagcagtggttgccatatcaggaagtttaaaaattagttatggcgattaa

SEQ ID NO: 298539 - DNA, 222 bp, Proteus mirabilis
atgaaaggaacagaatttaaaaagttgatgtggctctacgctgatgaggcaatgatacgcaagcgtagatatgtgaggggcgggaaaaatacagcggaccgcaatcgaaaaatgcacaaaccatatcgttgtgaaaaggttatgaatcgccttttaagaattgattctgatgcgtttgttaaaagactaaaccgaaaggaggcatctaatgcagggaactaa

SEQ ID NO: 298540 - DNA, 258 bp, Proteus mirabilis
atgcagggaactaattgggttaagtgtagtgattcactaccagacatggaaacaccagtatttgctggatggttcagaggtgaagagtttgtataccatgtttttatgcgttctgatacatgcggagaaggttggacatggtcaatctcattcgataattacataagctgtggtgaggatttcatagaggatgatgactactcaatgataactcattggagagcaatgcttaccccaccaatgccagagggtgaatga

SEQ ID NO: 298541 - DNA, 225 bp, Proteus mirabilis
atgacagacaacgtaaacaatccatcacattacgcatcaggtgatattgaatgcatagatgccataaaagccagcatgaccaaagaggcgtttctaggctatctcaagggtaatattcaaaagtacgtctggcgatacgaaaagaaaattaatccagttgaagatttgaaaaaggctcgttggtatatggaacggatggttagtgagatggagagtgagaaatga

SEQ ID NO: 298542 - DNA, 423 bp, Proteus mirabilis
atgactgaagaacaatataaagcttacgctaaggcgatagttattggccgaaattacagtgaattcacacataagcatgtagctttggaattaggcattcgactaaatgatgcaggaagaattctaagtaaattacatgatatgggatgtctgactattacagggaaaaggagaaatgaatactccaggatgtttaatatttacaaagttaaatctgactcaattacaacactacgtcagcaatatgaacgtgaatatttagagaatatgcctgttaagccaaagttagtgccagttaaaaaacaaaagaccccagaaaaaccaaagtgcggaattaagtttgttgataaggccagcgtctcaggaatgggtaatccgatgttgatgaagtttgattcattattgagtggggtgagagtgtga

SEQ ID NO: 298543 - DNA, 135 bp, Proteus mirabilis
atgaactgcatgtcatgcaatagaccactaacggatgatgaaatttacgtgtgtgcccagtgtgctgatgaatacgctcatttggaagtgatggataaaatcaaaggagagggagatgccgaggtatcgcagtaa

SEQ ID NO: 298544 - DNA, 159 bp, Proteus mirabilis
atgccgaggtatcgcagtaaatataaacacaaacataaacatccaaagaaaccacaaaaggagtttgaaccaatgcttaatgccaatttattacgctatggaaaatttgtcgcgatatggtttattgccatgttaattcttggagttattttggggtga

SEQ ID NO: 298545 - DNA, 621 bp, Proteus mirabilis
atggctaaggctaaaaagccgaagctcaaaacctgtaaagtctgcaacaaagaattcactccctacctatctacccaaaaagtctgctccacatcctgcgcaataaaattcgcctcaaatgaaattaaacggaccgaagaaaaggaccgtagaaaacgcttatctgaggaaaggaagttattgcggatccgaaaggaaaagttaaagacaaaatcagactggaacaaagaggcccaagcggcagtaaataaatacatcttttggcgagactatggtcagccatgtattgcttgcggtcggcccttaaattatggggtaagaggtgggtccgtagatgctagtcattacaggtccagaggttcggcaagtcatttaagatttaatctactcaatattcatgctggctgtgttcactgcaatagggacctgtcaggaaatctcattccatatcgcattaatctcatcaataaaataggcgaagagcgagtaactcgtttagagcacgataacacggtccgtaaattcgacatcgaatatctcaagcgaatgaaatacatattcactcgtagggcccgttggtatgagaaaaggcgaaaggatcaatattcggaggtggcttaa

SEQ ID NO: 298546 - DNA, 192 bp, Proteus mirabilis
atgtttactgacttaatcgcagctattgaagaagcaagatatttaaaatccagatcaggcggtcgagttaacttctgtgtaatgcaggttatggactatatggaagtggtaagcgggctgatggatggtgtcagggttttatatacaactgccaatgatgattatcacacagtattaccggaggcgagatga

SEQ ID NO: 298547 - DNA, 615 bp, Proteus mirabilis
atgagggaatgtgatccgttcaatctactgtctctttactcaagcaaaaatgaattaaggcggatttggggttctaatcgaaaaaacgcattagacagtaagcgagtctgggttcgctacatgctaatgacgtggggaaaggagtacggtggcaatgactaccctcatgctgggtcagatagtgtcattggacgattaatgattaggacggaatggagcgaaacagaaggggaaagaataatcaaggtagttaatgatttacataaaatgggatatcaaggagaggagttattcaaaaagtcacatgagatattaaatcctaaaaataaaataagcgacctcattgctctcgccaaagaatcagatgatgccgcttttgtagaaaatgtaataacgaagacatttgctaaaaacaatccgattcgtcatgtagctattaaacgatattgtgagcgcaaatacccgcaaaagatggcgcgtgaattgagttatcaaactaaaatcagcatacagcaagcggtgaggaggatcggctgggcggaaagcattcttgaagaggagatgttttacgcaatgaaacatgaattagaaagggagttatgtctgatttcataa

SEQ ID NO: 298548 - DNA, 405 bp, Proteus mirabilis
gtgactagaccagcgcgcggtgaacgcaataacaacccaggcaatcttcgacacggagaaccttggcaaggactatcagcacagcaaacagatccgagcttctgccaattcgtatctacagagtacggtattcgtgcaatttatgtattgatgcgaacctacgaaaagaaatacggattatgttctatccgtgaaattattaatcgctacgccccgccaaaagaaaataataccgagggttacattcagcgagtcgctaaagaattgaatgtaagcacggaagattgtgtatcagtcagcaaaaaagaagttgctattgcattagctgcggcgattgttggcgttgagctgggttatcagccttacagtcagaaagtctttgaagatgcttggttgttgttatga

SEQ ID NO: 298549 - DNA, 453 bp, Proteus mirabilis
atgaatctaggcgaaacaatagtgtccgtgggcgttattctggcaatgatcatcactattgggtggcagagtggcagaattgataagctgaaagattcaaatgctgaactaaccactcaattatcacaacaagtcgaaatcaacaaagactatcaagcccgcatcactcgactaaatcaactcgatattaaatacactcaggagttagccagtgcaaagaatgaaattgtcactcttcgtgatgctgttaactctggtaataagcgggtgtacatcaaagccgagtgtccaacagtcaccaagaattccaccgaaagcggaagcgatgaagccaccgcacgacttaacaaggcagttgaacaagattatctacgtctcagagaaatgatagtcgagaacgaacagcaaactttgtatttgcagaattatattaaaacggagtgtttacgatga

SEQ ID NO: 298550 - DNA, 1446 bp, Proteus mirabilis
atggctacatggaaccagcaagggtcagggggatttcttggcggtattggtttaaataatactaatgcccccaaagcaagtgacgcaaacgcaactcttgctatgatccgagaaaataatgacatacaaaggtctggagctaataacatcggtttgcagttagcccaagggcttggtgggcttggtgaaatgtacaagcaacagcaagctcaggagagggataaggaattccaatctttgtggggtaaggcgtacgcatctggagatagagacgctatgagacagttaatggctacatatccagatcaggctgagaaaataacctcaggtatgcagggaatatcagaggacgtcagggaatctttaggaaacatagcatctggctaccggatggctattaatagtggtaatgccactgattatatccgtaaaaacgctgatgagttaagacgattaggtattgaccctcagcaggctctggctatggcaaatgaaaaccccaaaggggctatagagttagctgaccatatcggcatgtctgcattaggccctgataagtattttgatattcaggataaaatcgaaggtcgttctattgatagagataaactttccgagacagtccgtagcaatcaagccagtgaagcgttaacaagagaaggtcatcaaatacaaattagagggcaaaatatctccgctcaaaactctattagatctgctaactcttcaggaagtaagcctgcatctgtgcaagagtacgagtacatggtatctcttacccctgagcaacgtaagcagtttttagcgttaaaaggtaggggagagagtgaattacaacaggctcagttatccaatgggcaaactgtaatgattgaccctaaagctcaaggcgcaggagattctaagtattacaagggtttcgacgctaacggtaatgtagtcaccattcctgtcaatgctttatcaagtgtgtcgtctacagcaaataatgcatcaaccacacgcatgaatgaggatttatctttaatcgcaaatgcgcctatatctcaattaaatgctatcactggtattactggagggacaggaacaacgcctataacagctgacgcaggaactaggacagtaaatagagaggcaagatctttatataatgcagctcagcgtatacaaggtaatatgcaaaatcaaggtattagcgcagctagagaaatgggtgctagtgggattaatacggttgcagaagcaaaaatgttcttccagtcaatgccacagcttgattattccagccctgaagcattacagaattcggtgaaaataattgaccaatacacgaaggcatttaattcaaggaataacgccaatctaggtgcaccatcaagcaagcaagcaacacagcaaccggctagcagtaaccaaagcggatattcttcattatggggtgattaa

SEQ ID NO: 298551 - DNA, 2031 bp, Proteus mirabilis
atggctaaaccatggaaagaggtgatcgcatcacctcagtaccagtcactatctagcgaacaaaaagcagaagcgcaagagcaatattttaatgatgtggtcgctcctaatgttggtaatgatatagataatgcaagacaacagttttataaggcatatccactccctcaacctcagcaagagcaagaaacccaaccagcacagccagaaaatagttatatcgcgggcatgaagcaagccaatcagaatctttctcaagggttacagcaatcgtctgaggacgccaaaagtttccgtgaaaacgtaatagatgcctttactggtgaaagcaagatgactcctgaagtccaagggctagaggggatcatgtcttcgccagaaatgaatgcatttaatactgacgcaatgaaagcggcttgggtgcaaatgttcggcaacgacaacgactttgtaaaagtgatcgggaatatgggaggtaaggtatctcaagatgaaaaggggaacctattagttgacttaccatctggccgatatgcattaaataagcctggcctatcagctgaagatatcatgccgtttatcgcgaacgcggcagcattcactccagcagggagagcatcaactgtattaggcgctaccgcaaaatcagcaggtacagacctagctctacaatcgtccgttaatatggcgggtggtggtgattttaacccgctacaaacagcattatcagcaggacttggaggtggatttaaagcggcagagaagcttgttaatagtggttatcgagtagcaactggcaagccgactcaagaagcgtctgaactgtctgaatttgctaagcagaacaatgtgcctctatacacaactgacgttgtaccaccgcaatcaaaaacaggtaggctggctcaaggagctgctgaaaatattccttttgctggtactgcaggtttgcgatcaaatcaacaagaggcgaggagtaaacttgttcgagatttcgcagacaggtttggagagtacgatcctagccaagttgttgagagtttgaagcgaaaaacatcaacaataaaacaggcagctggtgaaaggttagagtcaatccagaatgcgttatctggtgtgtctatcacacctaaccgagcaataaatcagattgatagcgaaatagctaaattatctaaacttggtgaggttgctgacacacagaccatctcaaaattgcagtcttacaggaatgagcttgcatctggtaacgttgatatttctcaactaagagacttaaggactcaatttagacaagacgttaagggtgaaagaatggctatgcctaatcgctctgatgccgcaataaatagagtttataaagccatgactgatgacgctagtgatgcaatatcaacaaacttaggcgctgatgctttacgcaaatataaccaagccaatgctatctatgctgatgaagcaaataaaatattaaatactcgattgaagaacatcttaaccaaaggtgatttaacgccagaggtagttaataatattttatttagcaaaaacagatctgaaattagaagtttgtataactcagttgacacccgaggtcgtgctcaaatgaggaatgccattattggcaaggcgattgagaaagccggtgattctcccgatcagtttttgaggcaactaaatatcatgtcaaaccaaacagggatagcatttagaggtcaagatgctatttatataaatggtttaaagaagtatttagaagcaaccaagcaagccgcaaaagcaggtgtcacaacgccgactggtcagcaagcaatccctttcatacttggtttaggcgcggccataaaaccatcaacggcaattggtgctggaacttatggcgcactagctcgcatttatgaaagtaaaccggttagagaagcagtgatgagattagcaggaacacctgaaggaacaagcaagttcgaaaaggcagtctctacaatatcacaaagtttaagtgctggttcgcaggctgaattacgagactga

SEQ ID NO: 298552 - DNA, 273 bp, Proteus mirabilis; identical to SEQ ID NO: 298051

SEQ ID NO: 298553 - DNA, 1041 bp, Proteus mirabilis
atgatggaagcacagcagttctcgcaagtcgtactcgactggtatcacaaatacgggcgcaaaacattaccttggcaacaagaaaaaacgccttatcacgtttggttatctgaggtgatgttacaacaaactcaagttgccacggtgatcccttattttgagcgttttattgcgcgttttccgaatgttagcgcattagcgaaagcgccacttgatgaggtgctacatttatggacgggtttaggttattacgcccgcgccagaaacttacataaggcggcacaacacattgtagataagcatcaaggacagtttcctgatacctttgaggacgtttgtgctttaccgggtgttggacgctctacagcaggggctattttatcgctatcactaaaaaagccttaccctattcttgatggcaatgtaaaacgtgttttagcgcgttgttatgctgtagaaggttggccgggtaaaaaagaagttgaaaataaattatgggaaatcagtgaacaagtcaccccaaccaaaggggttgaatattttaatcaagcaatgatggatttaggggcaatggtttgtacgcgaacaaaaccaaaatgcgaactttgccctttaaatacaggttgtattgcttatgctcaccatagttgggcggattatccggggaaaaaacctaaaaaggctattccggaaaaaacaacttattttcttattttacaatatgataatctggtctggttagataaaagaccaccagcaggaatatggggaggactgttcgcctttcctcagtttgaaacaaaaatgcttttagaacagtggctaactgagcatggtcttgaaaataataaaactgagcaattaatttcatttagacatacttttagccattttcatttagatatagtaccaatttgcgtaaaactctccacgtttacctctctgatggaggcgcaacaaggactttggtataacttacaaaccccggcaagcgtagggcttgcggcacctgtagagaatttacttagacaattagcctaa

SEQ ID NO: 298554 - DNA, 951 bp, Proteus mirabilis
atgaaaaagatccttgcgttagttactgcctctcttctgtcagttagcagtttttctgcattaagtaatacctcagttacataccagcctaatcaaattgttgaacagcaaaatgataaagttgttatcaagcacttattaggtgaaaccgcagtatctaaaaatccgtctaaggttgtactatttgattttggtctatatgactctttagttgcattaggtttagcggataaagtggttggtttaccattaggaaatgcacctgaatatattaaagggcgtattgcgaatgatgtagctaatgttgggggaatgaaagcccctgattttgagaaactcgctgagcttaaacctgatttaattattattaccggtcgtcaaggcgcttcttatgagaaactcacaaacattgcccccacgattaatttaggcgcaaatagtgcgaattatcttgattcagtggaagcgaatattcaattaataggtgaattatttgataagcaacaagctactcaagcacaattagcaacattgaataccgtgattgaacaggctcagaaaaaagcggcaggatcagataaaaaagtgttggtcttactgcacaatgcaggcaatttaatgcccaataaccaaagcgtgatttacgatgtggttaaagcgaagaaagcagaattaccacctgttgctgaagaagagaaaggcaaacgtcgcgtggttacttctgaaatgatcgccaaagtaaatccggatgttatttttattatcgatcgcagtgaagccattggtgccggtaaattagagaaaaacacctttgaaaatgatgaagtgaaaacaacttctgcttataaaaatggtggtattgtttatctgcaatctgatctttggtatctctctggtggtggattagaaagtcttactcagcaaattgaagcggtgcaaagtgcactttaa

SEQ ID NO: 298555 - DNA, 213 bp, Proteus mirabilis
atgaaattaaaattaggaaatatttgtattcgtccagaagataaagaaattagcattccagtagatgtatacatgggaaatgaagctgattttgaaccaccaaaagcatatctggtttatcaaactagctttgatgctaataagcctctttcggaatattttaaagaatccgaagaatatgcaagaaaaacaattaaagaattaaaccaataa

SEQ ID NO: 298556 - DNA, 870 bp, Proteus mirabilis
atgaagaagttattacttggtgtagcgttgttgttgattggttcaaatgccattgctgaatgggaatacaaaaaacattttgatgagatgaggggatctgaaagctatacggcatcgcttcaatcaatgccaataaataaagatatagataacgagttgttacttctcttatccagcgataataattccacgtcgagtttagctggcttacacttactcagtggcagatttgattgcgacaaccccaatctatgcaaaatagcggtaaggtatggcaatggcgcggtgaaaagtgtatttgttagacttaatgatgaaaggaaccttgcttttttcattaactctaatgaggttgcggaaacattaaggttatcagatgttatgtatgttgagataccaatattcagaaaaggtagcgcacagtataagtatgatacatcaggatttaaatggacgggaattgaaaaaacaggagaatatttaacatccttaggttccattgatttcacaaaagaattaccaaatattcctagtaatacttataaaaatgatagagggagtgtttgctatgacattaatgatttttcatttgggataaaagtaaaggcggtaggaaaggctagtgtgtgcatagatgggaaattccctatttatgttgaagttagtaatgtaaaagttaataaaaatgactttgtgaaagaggttaatttagctagaaaagccgatgaagacacagaggggaatactcacatgtggttagcgagtgatgatgaatttctgactatgattcttcttacaaaaccaaataaaaatggatatgagatattcatggattattcgccaagaataaatatttatagtcaaaagtaa

SEQ ID NO: 298557 - DNA, 894 bp, Proteus mirabilis
atgaattctgaagagataaatgaaccagacccattacttcgcgatgctatagagtatgtaattgaaaaacagagagtgtcaatatcaggtgtgcagaggcaattccgcatagcatacagtcgcgcagctaacataataaaagagatggaagctattggaattatttctgagtgtaatcacaataatagtagagatgtattaatactagataacttgagtgccgatttattaattgatgaatatttagaagtattgcaaaactctgaaaacaaaaatgaaccagatagtattaatgatgactttagttctgttgaaaaccagatgaaaagagaagctataataaataaaaggattgttatatggcttcatgatacagggcaggatagtgatgatggaacaaggatatacatattaaagtcatactctccatttgagcacttatttaatgcccaaagaagaccctcttcaatagataatgaccctggtggggatgttttagaagggtatagattttcagctacgatgcaaacaagaacaccattgagggtattaatccagcatggaagattggaaaagaaacctcttcataagttaccaaaaataattagaagcgaatgggaaggtatatggatccctcatacaaggtcgtggaaagatatggggatagatatgaaggaatggaatacagaaggaagtatggcttcacaaatagggcaaattccttcaaatggcggggattatttgaggtttttgatatttgccagaaatatcaaagaggcaaaagcatcaagcgaagaaaaaaggaatatgataaatttaggtcgttgcatgtatggtgaggaaggcactccatttaaagacttcattgaagactataatttcagtaataaataa

SEQ ID NO: 298558 - DNA, 1008 bp, Proteus mirabilis
atgggtttgaaagaagatactataaccatcaattcggaagatgatgttttcagattggttgcgcagtacgctgaaggtcatgagattccagaaaacgtaacatttgaaggctggccaaacttaacctttagacttacgggtaataagttcaataaaagtattacaccatccgtaatgaaaggttttattgacatgcaggcgcatatcaataaagcatacgccgctttcaaatatggtgatcaaaacaagcgtttatcgaaaaaagagttagaatcgatagagttggttataactattgatgaaggctcatccataattgagataaacattggtggttttttagaatcacttaaaaaatcggtaattaagaaaatgacaggaaaacagatagcaataacagtgataagcgctgcatttatctggggagcgtcttcttcttataagtattacctagataccatgcgagaaataaaacttgctgaaataagcaaagaaggcgaaaagcagacgctagagtcgattaggtttatgtctgagcaagagactaaacgaatggaacttgttacaggtgttatcgagtccatacctcaacttaagcagcaaaatgaaatagccactgagtctaaaggtaatttattaaagaacttgaataaagctgacactatcgagttcgatggtgttgttttggatgctgagttaactaaagagctaacttctacaaaacgtaaaacttacgccgaaagaagaattgatggcatatataaggttgttaaggttgagccaggcgatcctgcgccattcaaggttacagtgaaaaatgtaaccactggtgagctagttagttgtgtagttcaggatgtgtttttagatgaaaaagaaaataaagagattattcagcaaggtgagtgggacagggagccaatcaaactaaccataaacgctaaagtactgggcgatgaaattaagtcagcaatcattattaaagccgaaaaactcccccaagaataa

SEQ ID NO: 298559 - DNA, 183 bp, Proteus mirabilis
atgggtaaaaaacccggtgaaaacacaggtaaagatggcggtatctatcgagaagttggacctcgtggcggtttaaaaaacaattatgccacagtgagagacaacgaaaagctaccaccaacaacgcaatcaggcaacacatgggttcttgaaaaaagaacaccaaacagtaagcgtccttaa

SEQ ID NO: 298560 - DNA, 372 bp, Proteus mirabilis
atgaacaaaatcctaaggcagtatcgacatatgaaggtgcctttatttgaatctggatatattatctattgtggctcttgggatgattggcgctctctacatgaaaaactaggcattgatggtggggatagttttgttaacggtgcaagtcatacagttactaacactcagtgtgtactccatattattggtgtgtttaacggtaaattatctactctagctcacgaatgcgcacatatagcgttcgacatttgttaccgcgtcggtgtgagcgttgaaacaggagccgcgaatgaaacattttgtcatcttattagtaggatggtggatttctgtgttaaacccaaaaaagccgacgtaggccggctttaa

SEQ ID NO: 298561 - DNA, 207 bp, Proteus mirabilis
atgccatccaaaaaatacctacttgtatatgaagcattcgacaatacaaatgtattcttattaaaaggaaacgctgctataaaaatagaatccggaaaaggtattgaggaaatattgaatacctttactgaagttgcctgctctgaagctagaaaaattgataaatatgctagacgagtggcgatagtaagcgtaatagaactttaa

SEQ ID NO: 298562 - DNA, 246 bp, Proteus mirabilis
atgtacgcacttaaattaattactgaacgtgaaggacgtaaagtggaagaagtccactgcttaggagatatgtaccgcttagagttttatcctgaatcagaaaataaagatatcgtggcgcgggttgaacacacaaagaaagacgccatcccattatttgatattaaacgaacagatcatgcttacattacaacgatagtcggtgacacggttcgggttatcagtcgcggattaaaatcaaactaa

SEQ ID NO: 298563 - DNA, 303 bp, Proteus mirabilis
atgcttacattaggagtgttagaaaaaaaagatattattaaagctaaaaaaatgacaatggaagacgagagttttatcactaaacataatagaagaatgcaaaatatttttactaagaatgaaaatagtgatgaaatgaaatataccattgctaatattattagaaataattatgaggatattttagaacaaatagaaaatgagtgtgatgatcttaaagataaatataaagatattttactggatattattgaattaattaattcattattatcttttctattaatctctttacaaacataa

SEQ ID NO: 298564 - DNA, 726 bp, Proteus mirabilis
atgcatataagaaataattctgataacgttacttcaataaaaaaatactatgaaaatataaaagagaaataccaaataaaaaataaaatcaacaatgtgttaaatacactttcaagtctttatattgaaagggaaaagattactttactatctaaaatatcattttttataaagagtgtttttaatattaatgttggggtggtttttctattagacaaaagtcaacatgctaaaattaatacattatccattttgatgagaaatggaggggaagtatattttaaaaactgtaagctaattaactcagattttgttagctttaagaataaacatttagagacattttttttaaatttaagttttgcaataaaaaatgattgtcatgatgatgttaaaagattaatacaatgttatctttatgaacaatcaaaaacaaaaggagactttattactataatgaacattgctttcaatgtaattaatcattatccaaaagaaatgtttgaacaattaaagaaatatcacccaaagtgcgatgatatggtatattatagtgattttaactataaacaacatattgatatggcattaagttatgtttgtaaagagattaatagaaaagataataatgaattaattaattcaataatatccagtaaaatatctttatatttatctttaagatcatcacactcattttctatttgttctaaaatatcctcataa

SEQ ID NO: 298565 - DNA, 2163 bp, Proteus mirabilis
gtgtctaaaaaaattattgctaccaacctattacttgctctccccttaagtctgttatcgttacaaattcatgccgcaatgacacaaaattcacctgataaaatcattgttaccgcatccccctcacaagatccgcaaggaccaatttcaggtttagtggcaacaaaaacactatcaacaaataaaatacttagtgatatagataagacaccacaatcaatcagtgtcattacacgcgaccagatggatgcgcaagatgtcagttcagtctctcaagcattgcggtatacacctggcgtattcactgaatatcgcggcagttcaaaccgaaatgatgaaatatttattcgtggatatagctatgccccccgttttcttgatggacttagttatggtatgggagcctcatcttctacaggagctattgacccttggctattagagagagttgagctgatccgtggcccgtcttctgttctatatggtcaattaaatccaggtggtcttgtggcaatgaccagcaaaagacccacttcaacaaccattaatcatattcaagcacgtgtaggaaatgataaattagcagagacagcttttgattttgcaggctcattaagtgatgataatcgtattctctatcgccttaatggattagcaaaaacacaacatactcaaattaaagactataaagaagaacgatttgcccttgcccctgccatcacttttttgccaaatgagcagacacgtttaacgttattaagttttattcaacaagagcccgaagcgggataccgtaattttttgccagcttatggtacggtcaaaaaaacacccgaaggcaccattccatttgatttcaatgtaaataatgctgattatcaccaatcatggcgtcaacaatatggcgttggttatgaatttgagcatgaatttaatgatagattaaaattgatccaaaatgcccgttatagccatatcaaacaaaaatataaatatcttgtttttggttcattaagaaaagataacccttatattcttgaacgccgagctcaacaagaaaaacgagaaacagatacatttggtattgatactcgactacaagctgattttgatactgaaaaattagcgcatacagtaattataggtattgattatcaatggagtaaaaataaagacaatttattgcaagcgatgggcccagaatatgatctggattggcgaaatcctaattatcattatcctattgatatcagtttacaaaaaccggtgacaaatcaattacaaaaacacgaccagttagggatctatttgcaagatcagatccaatggaaaaactggatcttattagggggattacgccaagattgggcgcaagttcgtacctatgatcacatcaaaagcagcaaagaccaacaagacgaccagaagctaaccggtcgagtgggtctactctatgcctttgataatggtatttcaccttatattagttatagcacctcttttgaacctaatttacagacacgaagagctccgggtagtgcaccatttgagccaagtgaaggacgtcaattagaagcaggaataaaatacctcaccccaaatgaacagacattagcaacactctccatttaccaattacaacaacgtaatgtgactaactataacgccgaaaaagcctattttgagccagtgggagaaattagaagccgtggtattgaagcgcaaattaatagccaattaactgaaaatatatcatttattagtagctatgcttataccgatactgaagtgagaaaaaccatcaccgcaggtacacaaggaaaagaattaccacgggttcctaaacatatggcatcattttgggggcagtatgatgaaacatcagggctatttaatggtgctaaagcgggctttggtgtgagatatatcggtgtatctcaaggtgacactaaaaatacgattagtgtacctgcagtcactttgtatgatgccatggtaggttattctttaggcgagttatcctcctctttaaaaggggctgaagttcaactaaatatgaataatattgccaacaaacactatgttgcctcttgtgcgggtgaaactgcctgtttttatggcattggcagaaccatgacagcaacgataaattaccgctggtga

SEQ ID NO: 298566 - DNA, 126 bp, Proteus mirabilis
atgtaccattctaataaatggacggctgattgccttgattatgactttatctcagtaaataaaaacccactacgcgccgctatggaagcgtacttgatgatgaaggacacggagaatgaaagctga

SEQ ID NO: 298567 - DNA, 546 bp, Proteus mirabilis
atgaaagctgattatggaggtagccatacaccaaaggaattgcgtgatagatggcaaactcccctacctttgtttgcgccattggacgctgaatttggtttttatttagatgccgctgccgataaaaataatgctctttgctctcgttacctcaccgaaaaggacgactcgttaagttgcgactgggaaagttacggggctatttgggtgaatccgccatattcagatattcagccatgggtaaataaagccgctgagcaatgtaaaaagcaattacagcctgttgttatgctagtcccttctgatacttctgtgggttggtatgaatcagcattagaaacagttgatgaagtaagattaattacgggaggccgaatatcctttattaatgcagaaacaaaaaagccagttagcggaaataataaaggttctatgtttttaatatggcgaccctatataactcatcggagaataatcaatactgtaaatagaaattatttattaaatatcggcaataaaatattaaatgaatggaaaatagcatag

SEQ ID NO: 298568 - DNA, 195 bp, Proteus mirabilis
atggacattatcgactcagcaaatgaaacaaacgaactatatattcaagcgtcactattaaatcgtaaaccggtaatcaaatcatataacggcatgtgcatctggtgtcacgaagagccagtcgcacctaatagcgcatactgcagtaaagattgcggtgatgaccatgaacagtataaaaggaagaatggatag

SEQ ID NO: 298569 - DNA, 705 bp, Proteus mirabilis
atgttaaacgaacaaaatcgtgctgagtttctgcaaactattgctcaaaaattaggacgtgaagtgacgcatacgccaaaaccacaagatccccctattaataatttagctaaaacacgcttaacaaatttaacccaagatgaattatgcaaagaatttactgattttgcacaaacccagcaagtaagatgcgttatcactaaaccagaacaagtgataaatagcttaatagcgctttgtgaaagctatgattgtcaaggctcagtgataataagtggtgatgagcgcttaaatgcacttggtgtaacacaagctattagtgaaaaatatgaaacttatatttgggatcctaaactcggtcatgaaaatattattcatgctgagcgctctcaaatagggattgtctttgcggaagcgggattaacagaatctggcgggattgtgctgttttcttctccggaaaaagggcgttctgtcagcctgttacctgaaacctcgattgttattttacgcaaaagtgacattttaccgcgagtggctcaacttgcagagcgtttacacaaaatggcacaagatgggatcagaatgccttcatgtatcaatttaattggtggtgcaagctcaacggctgatattgaattaatcaaagtatggggagttcatggcccagttcatgccgcttatcttattattgaagattgttag

SEQ ID NO: 298570 - DNA, 1635 bp, Proteus mirabilis
atgcatacagaaggtgttggattaagcacaatagattatgcaatctttgccctctatgtcatcattattattagccttggattatgggtttctcgttcaaaagatggagctaaaaaaggaacaaaggattacttcctcgcgggtaaaacactgccttggtgggcgattggttcttctcttattgctgctaatatctcagctgagcaattcattggtatgtctggctcaggattttcgataggtcttgctattgcatcttatgaatggatggcagcattgacgttaatcattgttgctaaatactttttacctatttttattgaaaaaggcatttataccattcctgaatttgttgagaatcgttttaaaagtcgtaatttaaagacgatcctcgccgtattctggttagcactctttattttcgttaacttaacatctgtattgtatttgggatcattggcgttagaaaccattcttggtgtgccgatgatgtatgccattattggtctggcactatttgcggttatctactcgctttacggtggactttcagcggttgcatggacggatgttgtacaagttttcttcctgatcctcggtggacttttcaccaccgtacttgctgttagctatatcggtggtgatggcggaataatggaaggcttaagtaagatgacagccgccgcgccagatcactttaaaatgatcttagcaaaagaaaacccacaatttatgaatttgccaggaattgctgtgctaatcggtgggctatgggttgctaacctctattactggggctttaaccaatacattattcagcgtgctttagccgctaaatctattaatgaagcgcaaaaaggtttagtgtttgccgctttcttaaaactgattgtgcctattttagttgttgtgccggggatcgcagcttttgttatcacaaccgatcctacgctgatggcaggattaggaacaatggcacaggagcatatcccaaccttagcgcaagcggataaagcctatccttggttaacacaattcttacctattggggctaaaggggttgtgtttgcagcactggcagcagctatcgtttcttctttagcttccatgcttaactctatcgcgactattttcacgatggatatttataaagaatatattgggccaaaatcctcagaaacccgcttagttaatgtgggacgtattagtgcggtgattgcattgattattgcttgctttattgcgccactgttagggggcattgatcaggcattccaatatatccaagagtacacaggtttagtgagtcctggtatcttagctgtattcttgttaggactattttggaagaaaactaatgccaaaggggcaattataggggttgtactctcaattccttttgctttattcctaaaattaatgccactaggaatgccattccttgaccaaatgatgtatacctttattttcaccgcggttgttattggtttggtcagcttaacctcaacgaaaagtgatgatagcgtaggggcgattgtattaactgatgcaacatttaaaacccaaagtgggttcaatattgcttcttatatcattatgatcatcctctgtgtgctttatgctgtattttggtaa

SEQ ID NO: 298571 - DNA, 330 bp, Proteus mirabilis
atgggtaaatggcttatcccggggctatgcgcctcgggattattacttaccgtcgcccttctctccttcggtgctttatggtttaacgcgccaagtggtgatttatcgactatttttgctgatagttacctatggcatgtggtgcgctttactttttggcaagcatttttatccgcgctattttccattttaccggcaatttggttagcaaaagcgctctatcgacgccagtttgttggcagaacgctctttttacgcttatgtgcaatgagtttagttctaccggtgttagtggcgctatttggctaccacatcagcatcaaattgtaa

SEQ ID NO: 298572 - DNA, 1764 bp, Proteus mirabilis
  misc_feature (1730)..(1739): n is a, c, g, or t
atgaaaataagtaaggtatgtattagcctcattttatacttaggctatgcagctttattatatgcagaaaataataatttagatgatatctattttgatccagattttttagagctgccaaataaagatattattgatttatcttcttttgagaataaccaacagctagcaggtgactattatgttgatatttatgttaacactaatttaattttaactaaaaatattagatttgataaagataaaaataatcagcttaaaccttgtttatcagtaaatgatctaaatgactttggggttaaaacaacagattatcctgggctttattctgaatatactagctgtgtcaatttgtctgcgataccagaagctaaaagtgaattagattttgattcacaaaggttatatttaagtattccgcaaattgcattatctaaaaacccaagaggatatatagagttagataatattgataatggtataaatgccttattactaaactatagttatagtggttctaaaaactatgatcgtaagaatggcagttcaaatacaacttcaaattatataaatttaagaccaggtttaaatttaggaccatggcgtttaagaaactacacaacatggtcgagtacaagtaatcaatcagggaagtggaacaccctttatacctatttatctagaaatataaataaaataaaaagtcagttaatactaggggatgggatatcttcatctgatgtttttgatagtgttccgtttcgaggcatgcaattatcaacagatgatgagatgtatccagaaagtttaagaggctatgcgcctatcattagagggattgcaaaaagtaactcgcaaataactatcaaacaaaatggatatactatttatcaaactgaagtggcagctggcccttttgaaattaatgatttatatccatcaggtagtagtggggatttatacgttacgattaagggtgctaatggtagtgagcaacatcaaatcgtacctttcgcctctttacctgtattacagcgtgaaggtcatttcacttatagcgtaacgggcggtgaatatcgtgcttatgataataatgtagataaaacgaagtttggtcagtttacattagtttatggtttaccttatggcactactgcttatgggggaagtcagttgagtcaaaattatcaatcttactccctaggtgttgggaaaaatttaggctcatttggtgctgtttctgttgatgttacacaggctaagtcaacttttaatgatggaaggaagcaacaaggtcagtcttatcggtttagatataataagaatttgaacaatataggaaccaatattgctttagcaggttatcgctattcaacgagtggcttttatagtttatctgaagtgtttgatagttttcgtcgtactcattatagccctgaaattgagcaacgccgtcatcgtgcggagataacacttaatcaaaatttaggtgataaatatggctctttagctatcggatatatacaagaggattattggaacagcaaaagcaaaaaacaatcagcaacacttggttataataatagctggcaaggtatcagctatggaataaattatacctacaataaaaatacagttaatcattcttatatttctgatcagaaaagacaaaatgatgatgaacatttgttggctttttcggtgaatgtgccctttagcgtatttgatannnnnnnnnngtgtcacagtacttcctgcagatga

SEQ ID NO: 298573 - DNA, 675 bp, Proteus mirabilis
gtgcaacaagcatttaccaatcaagatcaaggatcttctggaaatatcaatgcatcctacaaaggccaactaggtgatattacgggggggtacagttatagcaaagataatcataatctttactatggtgtgagcggtagcgtcgttgctcattctcagggagttgtttttggacagcaactgggagaaaccgcggcaatcgtagatattcctaatgcgggtgatattacgatattaaatcaagcgggagttaggactaataactcagggtatgcattagttccttatgtcacaccatatcgtaaaaatactgtcgagatcgatacattaagattgccagagaatgctgaaatggaacttaccagtcagacggttttaccgagtcgaggggctttagtaaaagcgaatttttcagcaaatgtaggctatcgtgtattaatgacgataaatttggaaaacaaaaagccagtaccatttggcgctcaagctatttttaaagacaatagtcagttaaatagtattgtaggtaatgatggagaagtttatttatcagggctaaaacagaaaggaaactttactattaaatacaacaatgaaagctgtcaggtaaattatgatctatctgatattccagattatttagggctctataaaactactgtaacttgctattaa

SEQ ID NO: 298574 - DNA, 375 bp, Proteus mirabilis
atgaatgagttattacatactagaaaaataatgcgctttctattatggggaatgctactttttagcggatatacagtattttttactaaagatgcaacagcagaattagctaatacaaatattgttataaaagcgaacattgtggcaaatacttgtagagtcagccctgattcgctaaataaatttgttgacttaggggtttggggaacaaaagattttcagcaaaaaaatacaacagagccagtaaagtttacacttaacttaactgattgcagtattgttactagcggtgtaaaagtaatgtttagtggtgatactgacagtaaggatagtaccttgtttaagttggcagaaaaaatgcggctcaaaatatag

SEQ ID NO: 298575 - DNA, 129 bp, Proteus mirabilis
atgatttaccctgtagagacaactaataatatttctctcgatttttatgcgcaatatatcgcaactaataaggacgtagttgggggaagtgcaaatggtgaagtattattttctttagaatatctgtaa

SEQ ID NO: 298576 - DNA, 1071 bp, Proteus mirabilis
atgaaagataatcacagttctgatgaacatcagcagaaagtggatgtatgggagcaaatgctgagtaattacttttacaataaagtattacggccggatacggagaaaacataccgtaagatggtacgtctttttctgcgttattgcggagtttgtgaaaatgcgttaccgctaccggatgaagtgacacatgagcatgtgctgagatggcgaagaaatgagctgaatattcagaaagtccgggaacggacatggaacacaaaaaccaggcatatgcagtctctgtataattattggatcaaaaaagggattgtttcacttaaagaaaacccgttctcagaaacacaaattgaaccgggtgaaaaacagaaaaaagtctatacacaatcacaactgagaacgatttatcgtattctggaacaatttcagcaacaggaaaatatgctgccacctgatcaggctcactttcaggcatgtgcggtttatcccactcgattctggtttgctgtgctggaaacgctgaggctgacggctattcgttttaaccagctgattaacctgcatattggcgatctggattttgaggagtgtacgatcacattgcgcagtgaaagcagtaaaaatcaccgggaatatcagattgcttttgttcagccactacgttgtttactggcgcccttggttgaggaaatgcgttgtcacggggcggataaaaacgatattttgtttgatgttcatcgtctttatcataaacgactatcccgctctgaaactccactcagtcagacgatacgttcttttttccgtcgtttatcaaaggaatgtagatttcatgtcagtccccatcgtttcagacatacactggcgacgacattaatgaaacatcctgaacgtaatatgcaattgacgaaacagatgttaggacaccgtagtctctcttcaactatggaatatattgctctggatgcatacagtacagtcaggatcttggagaatgagttaggtgagtttttaacaatgggattaggtggtgaacttacaaggctagcatcaaaaagacagaggatgtga

SEQ ID NO: 298577 - DNA, 1002 bp, Proteus mirabilis; identical to SEQ ID NO: 238083

SEQ ID NO: 298578 - DNA, 300 bp, Proteus mirabilis; identical to SEQ ID NO: 103754

SEQ ID NO: 298579 - DNA, 975 bp, Proteus mirabilis
atgaaaaaatctgaccgtaaacgccgtccggcagcggataagccggttcgcgatatttatcaggaagtgactgaccgtattgtggccgcgctggaaaaaggcacccgtccgtggaaacgaccatggcggccgtcggaagggacaggcaccggttttccggtgaacgccctgaccggtcattcctaccaggggataaatgtgctgctgttatggttgtcggcggcggagcagggctttggttacgatatctggctgacttaccgtcaggcacagcaactgggtggccatgtccgtaaaggcgaaatggcgacgaatactgtgatattcaaaccggtgaaggtgccggcaaaagaccgtcacggtgagctgctgcgggatgaacacggtgaggtggtgatgacggaggtgccgatgataaaggcgaatccgttatttaacatagcccagtgtgatgacctgccggcgcatttttacgaaaaccggcgactacccggagaggagacagcagggataaccctgccggccacgcaccgggtgctggatatcctgaatgccagcggcgtgaaggtgaccagtgcggcgcagaaccgggcgtattacagtccgtcacaggaccggattgtgatgccgctgtcgtcacagtttgaccggaatgccgattaccaggccaccttactgcatgagttggtgcacagtaccggtcatccgtccaggctggcccgtgaaggcatcacctcatcgtccctgaagtttggtgacccgctgtacagttttgaggagctggttgcggaaatgggcagcgcttttctttgtgcgcagttaagcgtcgagggagaagtgaaccatgaaagctatcttgacagctggctgcgggtactgaaatcggacaaaaaagcgttgttccgggccgccgggcaggcccgccaggcctgtgagtttttactgaatgtggccgcatcccgacaggccgcgtag

SEQ ID NO: 298580 - DNA, 1314 bp, Proteus mirabilis
atgagtttagttctaccggtgttagtggcgctatttggcattttaactgtgtatggtcgcatggggtggctggctcaaatatgccaatggttagggattgattaccattttacgccttatggtttacaaggcattttactcgcacatatttttttcaatatgccactggctaccagaatgttgttacaagccttggaaagtatttctaccgagcaacgccaattagcatcacaattgggaattaatggctggcaacgttttcgttttctcgagtggccctatttatggcgacaaatcctgcctactgcatcactgatttttatgctctgctttgcaagtttcgcgactgtattagcgctgggaggtgggcctgcggcaacaactgttgaattggcaatttatcaagcattaagttatgactacgatttacatcgtgcagcgctattagcattaattcagctattttgctgcttaggattagtacttgttagccaaaaattaaagggaacactctttgtcggtagtcatcaaaaactaagctggcgtgatcctagcgactcattaatcaataaaataacggatagtttaattatcgtacttgctatgctctttttacttcctccgttattagcggtgataagtgatggcttaaacagtcaattattaggtgttctacaacagccggtactttggcaagcctttacaacatcattaattattgcacttggcgctgggggactttgtgttattttaacgatgatgttgctctggagtagtcgagaattacgcttacgccattttaaaaaggccggacaagcgctggaaatgagtggactcattattctagctatgccgggcattgtattagcgacgggcttttttctattattaaacagcacaaccggattacctgaatccccctatcttttagtgatcctcactaatgcgcttatggctattccatatgctttaaaagtacttgaaaacccaatgaatgatattgcagcccgctataatctattatgtgcttcccttaatttgcgaggtattaatcgtctacgttggatagagctacgcgctttgaaaaagccactatcacaagcactggcttttgcttgtgtcatttccattggtgattttggtattgttgccttatttggaaatgaaacttttagaacattacctttttacctctatcagcaaatcggtgcttatcacacacaagatggcgctgtcaccgcgatgctccttttgctgttatgtttcacgctttttagccttatcgaacgcgtttcaggaaaatcctatgattaa

SEQ ID NO: 298581 - DNA, 402 bp, Proteus mirabilis; identical to SEQ ID NO: 298430

SEQ ID NO: 298582 - DNA, 1554 bp, Proteus mirabilis
atgttaaaacgaattaaaatctctcaaggtttaatgtgtgtcctgactctgttttgtattattcaggtaatatctggagtacaaagcattcacgatgcctaccaaactcaaaacaaattaaaacaaatctcatacagtttcgaccagttacgcactatggataacacctacgcggcgttaaatactttacgtactgatattattgcgcaggcgtttagttatattgctgatccacaggtggaagatgccaatattactacattcatacaaacgatggatgcacgtaaggcagaggtggatacgttgatgaatgaatatgtcgaactatctgcacaaactggatttgatcagcaacgcatggctgagatcaaacaactttatcaaaaaagtcgttatgacttagatcttcttgtgcaatatttaaatgaacgtaataccaatgcaattcgtttgatcttaaaaagtccagccaacgataactttactaattcattatatgaagcaacagatttcattactgatgacgttgttaatccgtcagtgattgaagcagaagataactatcacgagatgctatggatagcctccctattcatgggcatattcctgatatttacgacattagtgctcttttggatccgtaaacatattattgtacgtattaaccaaatgattgaatatcaagaggcgattgctagtggagatttaattagtcgcattgaccatgatattacaggccgcaatgaaatagaccaacttatgttgggtttacaacaaatgcgagcgcgcttaaaagaaatggttagcgctatccgtaacagtagtacaacgatttatagtggtgttcaagaaattgccgcaggtaataacgatttatcaagtcgtaccgaagaacaagccagtgctttagaagaaacggcttccagtatggaacagcttaccgcaacagtcagaaataataccgaaagcgcacgtgaagtcactcagttagtcatgagcacagcagatattgccgttcaaggtggtgagcatagcaataagatggtgatgaccatgacagacattgccgatcgttcgcaaaaaattggtgagatcaccgcagtgattgatgatatcgcttttcaaaccaatatattagcactcaatgccgcagtagaagcagccagagccggtgagcaaggacgcggtttttctgtggtagccagcgaggtgcgtaatttagcacaacgtagtgctgaggcggcaaaagagatcaaagcattgattaatacatcaagtaacaatattaagattggctcaaagcaagtgaatgagacggtggaaacaatggaaaatattgtggttcatgtaaaaaatgtcacgagtcttattggtgaaatcagccttgcatcatcagaacaaagtgcaggattaaaagagcttggtcgagctgtagagcagttagaatcaataacacatgaaaatgcagattatgtctctaaagcgtcatcaatttccggagaaatgaaagaacaaacgaattatttagtaaaagccattcatgtatttcactaa

SEQ ID NO: 298583 - DNA, 666 bp, Proteus mirabilis
atgaataagaagtggtggttatacataacgttgagcgttgctatttttgttgctataacttacgcaattttcttttattggaatattgatgataataacaaatggagtacatttttcagttttatgtctacatttggtatagttgccacaattactgtttattctttacaaaaaaaacattcagaaagctcagaaaagaaaaggcaaaaagaaatatccattagctatctaaatatatttactaaatattctgatgagctaaaaacaatagtaaaccaactggttaaccttagttatttattagcagaaaacaacgattcatttgtagaatatcttggtggtcatgatatacatgcatttattttaaaagacatagatggggaagaattaggtaatgctcgaatgtttaaatttgatagctcatctttgtcttatatatattcaaactccgcatcagttaatgtaaatatttcagcgaagtatcaatttttatacaaacgcggcattaaagtaaatacatatattgaaaatttaattttaaaaattcattctgataacagaaaagaaaatatacttaattattttagtactttaagtttaggtgaatctatagatgaaattgatttatgtgtaaaagatttcgaagattactgtaaaagtttatag

SEQ ID NO: 298584 - DNA, 699 bp, Proteus mirabilis
atgaaagagcgtggaattatttttaatgcggaaatggtgcgtgccattttagatgggcgtaaaactcaaacacggcggattataaaatccgtaccagcaactcataattttcatggctgggtaacgtcaagcacacacgcaaaagatgaaggaaaggcttgctgggctatcggtgattcaccgctactcaaagaacctattcgccttaactgcccgctaggtaaagttggcgatcgtctttatgttcgtaaaacgtggagtgtagtcagtcatgagtttgatgatgatggattgatgattgattatgttcctgatagaccaactaaagctgtgcatgaaatgccgtatggtcatggttatttcactggacatgtcatttactctgctgatggtgatttcacgtggggtgacgatgatggttgtattgatggtcgttcttgctggaaaccatctatacacatgcctcgctgggcttcacgcatcacgttagagatcaccgatgttcgtgtagagcgtttaaaggatgctggcgatactgagtttaaagctgaaggttaccctttagaacgtgaattaactggcggtagtatggatccgttttgctggtttcgtaacctttgggattcagtgtcacctactaactttaaatatgcagataatccgtgggtgtgggttattgagtttcgcaaagtagactaa

SEQ ID NO: 298585 - DNA, 294 bp, Proteus mirabilis
atggctaataaattcacttgccccgaatgtggatcagctgtaaatgcatgggctgatctagatgcgacagtaatatttaaaattaataatcacgggaaattaaccaaacgtgtgattaaaaatacaaatcagacagatggacgatgcggtgttgaatgtactaaatgtgattggattctatatgctgatagcgattattcagaatatccgcattttgaagagttggcttgtcaggctcttgcttatgaagaggaaatagaaaccttaagtgtgaagtcaaaatatagtgactga

SEQ ID NO: 298586 - DNA, 540 bp, Proteus mirabilis
atggcaagtaaaggcgttaacaaagttattctcatcggccacttggggcaagaccctgaaatccgttatatgccatcaggtggcgcagtcgctaatctcacactagccacatcggaatcgtggcgtgataaacaaaccggtgagatgaaagaaaaaaccgagtggcatcgagtgtgcatcttcggcaaattagcggaaattgcaggtgaatatctgagaaaaggaagtcaggtttttatagagggtcaattacaaacgcgtaaatggacagatcaaagcggtcaagaccgatacacaacggaagtggtggtcaatattggtggaacaatgcagatgctaggcggtaacggtggtaatcaggcaggaagccagaagtcacagcagaatcaaggatggggccaacctcagcaaccgcaagcacaaaaacaagcatcgagtaatcaagtgccacaaaatgagccaccgatggacttctcagatgatattccgttcgcccctatcggactcccctacccacgccacgctatttatgtgatttaa

SEQ ID NO: 298587 - DNA, 264 bp, Proteus mirabilis
atgaaaatttcatacagctactcgaacggaactcgggtaattcacgataaaacagtcatggaatttgacgaaagtagcaagcttagtattgagacaggaagtttcagtgagttggctaaattaacggaaatagactcaattgaggcaatggaatatgtactcgattgtgacgatgaatcgcttgaaaggattatcaatgcgataggcaaggaagcctttattaacaggatattgcgagtttctaagctaaggagggttgcgtga

SEQ ID NO: 298588 - DNA, 228 bp, Proteus mirabilis
atgatgaaacaaaaaaccagtgtcgttattaacgtaaaattaactttagaacatggaattaaatcaccacatgttaaagtaaaaacaaaaatatacgttcatgaagaaactccagaattagaattattactaaataacttctcagataatttagttggagaaaattcaattaaatcatcatttgaaaaagcgattataaatacattactcaataaaaaaacacactaa

SEQ ID NO: 298589 - DNA, 276 bp, Proteus mirabilis
atggaaatatggtttaaggaatttgagtcacatggacgtcagattctaatcaagaaagctcatgacgccgataagcaaaaagtcggagtgcagtattgctggcctgagaagattttcgatgtcgactttggattatggatagattacgacgacgatgacgaggaaagctttgataaagcggaagaagcacgcaacaagctattcgacaccatcgatcaggaagcagtagataccgcggtgagtaacttaattcaaaaactcaaacttgatgattag

SEQ ID NO: 298590 - DNA, 186 bp, Proteus mirabilis
atgtcagatgtagtaattgatccaaaagaaaaccctgaattagcggctcagcaattagttatagaattgattaaggctgaaaaaacagccatgattaatggagcggcgtcaagatcaacagttgagtcgatcatatttgctcaccaaagttttactaattactttaaaaaacttaaagataattaa

SEQ ID NO: 298591 - DNA, 153 bp, Proteus mirabilis
atgaaatttgaagatttaccagtaaaaattcaagagattgcaagccaaacattggcatgtttaataaccaataacaatccagataaagagcaagcagaagaacttgctcgctctgtggcagtggcttttataaagctatatcaagacaattaa

SEQ ID NO: 298592 - DNA, 213 bp, Proteus mirabilis
atgtctaaaaaggttattaccgaacacaacccagtagaaagagttgctttcgatatggcgctggctttagcagctaaacaggattcaattaaaacacctgagcaattaatggctgaaattgaagcgctttatcctgagtgtttagaagttgctaaaaagcagtacgaaaaagaaactccgcctccggttagtttttttacaaaaaaacgttaa

SEQ ID NO: 298593 - DNA, 510 bp, Proteus mirabilis
ttgagctatctaattgatgcaaacatatttattcaagcgcaacaagattattactgctttgacttatgccctggattttgggagtttatggggtctaaattcatggacggacaattaataagcattcgaaatgtctttgatgaattacaaaagcaggacgatgaaatatgtacttggtcaaaaggtataatgcattgttttcaaagtgttgatgatcaagaaactcaaatgaactttagagctatagctaattatgttcaacaagaatatgccccaagacataaaaatagcctaccacacattcaaaaattcttatcagtagcagacccatggattatcgctaaggcaaaaacaacaaatgccaccgtagttactcacgaggttagagataaaaacaatggatgcaaacctaaaatacctgacatatgcgactattttaatgtgaaaactatccggacaaatgagcttttaagagattttcaggttcagtttattctttcacaacagtaa

SEQ ID NO: 298594 - DNA, 1125 bp, Proteus mirabilis
atggctcaggcatttataaacaataatatacttacatgggcgagatgccgagcatctctctctgtggattatattgctgaaaaattcaaaaagcctgtcgatgcaataattgcttgggaagaaggtaaggaaccaattacttttgcccaagctcaaaggtatgcaaatataacaaaaataccatttggctatttatacctaaatacacctccagaggaaaaactacctattccagatagaagaacggtaggtagccggaataatgagataagcgtagcactaaaagacactattagtgatgtgttaattaaacaagactggtacaaagactacgccttgtccaacggccttcctgaagtagagttggtaggaaagcttcctcctaatagtaaccccaaacaaattgtagctacaattaaagagcatattgatattcaaattccaccaacaaaaggtaagtggaaggattttttctctgcattagtaaaaaagatagaatctcaagggatccttgtgatgagaagcggtgttgtaaaaaacaataatacaagaccgattagcgttgatgattttagagggttctgtatagcagataagatagcccctgttatcttcattaacactaatgatgcaaaggcagctcaaatatttacgctgattcatgaacttgctcatctggttttaggtcaatccgctatatccgatctatctataaactccagagagaaagaggaaatgatttgtaatgcagctgcggcagagtatttaactcctgaagtaatattcttaaaaaaatggaacgaatccttatctattgaagagaacattgatgatctaagaagcattttcagagtaagtagttgggtgatagtgcgacgagccttagacttaaaactaatatccaaacatgaatatagtcggtacgtaagtttaataaatgagaaaagcacctctagtggcggtgattataatcgaaaccagaaagttagaagtagtgagaggctaactgttgctgttgtgactcaagcattggaaggaaaaatgcttttaagagaagctcagagcttaacaggaatacaacctaataaactgtatgaatttgctcagaaggagtttgggctttga

SEQ ID NO: 298595 - DNA, 342 bp, Proteus mirabilis
atggcgtttagtaatattgagatagcaaatattagacggtgtatggaatttttcatggaaaagcgtcgcccagcagaacacctaagggatgaattagatttacagtatcgcatcgaggacgactcagtaattatctttgaaattaggcaactaatatggagtgatggcagagtagaagaacctatagcaaaaatcacacataatagatattcgaattcatggtctctgctttggatggataaaaatagtaactggcacaactacgatgaaataatgctaggtagtttctctgacgccattaggctcgttgaagatgatgtgcgaggttgcttttttgggtga

SEQ ID NO: 298596 - DNA, 645 bp, Proteus mirabilis
atgaaaaaagtaaatgaagttattggcgaaaggttaaaatccattcgtgaatcaagagggctaagtcaagctcaattagctaaattgtgcggctactctgctgcgtccagaataggaaactatgagcttggagagcgcaagattagcgctgatgatgcgattgttataagtgaagctcttggtatatcacctgccgaattaatgtttggcagtcaaagtgagcaagtgatcaaaaattatgaataccctctattcacaaaggtacaggccggcgctttctcaacagaatttaactcatacacccagaaagatgctgtgtcgtggatacctacagctaagaaagctagtgaacgttctttctggttagaagttgaaggtcaatcaatgacagcaccaccaggaggcaagccaagctttccagaaggaatgcttatcttggttgatccagaggaagaagttgagttcggagatttttgcgtcgcgcgtttactgaatgatgaattcacattcaaacgattgattagagatggtggaattgagtatctagagccattaaaccctcgcttcgatctgatccctattaacgggaattgcacaatcataggtaaggtaatcaaatcacaatggcctgacgacacgttttag

SEQ ID NO: 298597 - DNA, 348 bp, Proteus mirabilis
atggaatgcgcaaatacacgcaaacaattcaatcaatttatctctaaccacctaatagcttcagcattacaagcattgagaaataaaactcagtctgccgtggctagaacgttaggtgttcatgattcaactatcctacgtcgaactgaaaaatatcctgaaatatgcgaaacgcttgtcgcatcgggaattattgattttgtgatggaaggagaacgaaaaatctcagaagaagagtaccgatttttgtggaaacaaatgggtgaactttctcaaatgaaaataaaagaaaacgcctcgattgcggcaacaaacgaggcgtgttgttcaatggaattcaccatttaa

SEQ ID NO: 298598 - DNA, 768 bp, Proteus mirabilis
atgagtatgcttctaatggcaaaagccatgcaattacaggtggggagtacagcacaaaaaatggtgctactgaaacttgctgataatgccaatgataaaggtgagtgctttccttcttatgagactattgcacgtcattgcgaaattagccgtcaaagtgcgataaaccacattaaaagtttatgtaaaaaagggtttgttcgtaaagttacgcgaaaaacagataaggggcatacttccaatttatatattctggatttggaggctaaatatcttgatgacggtagtcaaaatacagtaccacctagtcaaaattctgtaccagaggtagtcaaagaatttgaccacggtagtcaaacggttggactagggggtagtcaaaaaattttacccagaaccagtcagtcttttaaccagtcaattaaccctaaaaaattatcgtctgacgactcgaaacctgcaaagcagatttcaattaatcggcaagctaacattccttatcaggaaattatgcaagccttcaacgaatcggcaggggatagattacccaatgccgaatcactgaatgacaaacgcaaacgagcaatatccaaattcctgaaagagctcaaagaacccacagttgaatcagctaaaaattattttgattattttatggaaacggcgagtgcttggtatttcggcgaaaataatcgaggttggcgagcaaattttgattatttactcagacctgaaacggtactcaaaacaagggaaggagcactgtga

SEQ ID NO: 298599 - DNA, 1386 bp, Proteus mirabilis
atgaaccaagttccgaataatttaatggcggaacaaaatgtgattggaggactcctgcttgacccgcaaagtgataatgcgcaatcaattttttcactgctaaaacctgaagatttttatacccgacaccatcaaattatctatctcactctgcgagaaatgtatacccaacgtatgccaatagacatcatgacggtgacggattatctggagtcaaaagggcgaattaatcaatcaggtggttttgcctatcttgctgagatggcaagagaaacaccgagtattgctaacattatggcttatgcgaaaaaaatccgagagtgttccgcacagcgttttgttatcgaaaagacggttgaaattcaaaaactcatgatggtgccaagtgagttaagttttacggataaaattgaacaagcacaacgcttgcttgatgaagccacttcgtttggaaaaatgggaaaaaaaacagggttgcgccgaattgatgacgtgttggatgatgtttttactgacatttgtgaccgacaagataacccagagaaacatcgaggattaaaaacgggatttaaagattttgaccgcctattaagcccaaaacagattgtcataggctcactgttcgtgattggtgctcgtccaaagatggggaaaacaaccgttctcactgaaatggcaaaaaatgtctcacaacaaggtaagcctgtattgctgttcagcatggaaatgacggataaacagcttgttgaacggacactagcccaacaaacccagattaattcagataaattttaccaaaagttagaggagcatgaatgggataggctttgcagtgccatcggtcgccttaaagatgagcccaatatttgggtggatgatacaccaggcatgtccttacagcatatacgctctgaaagtcggaaaatcaaacgcaaagtcggtgatattgggtttattggtgtcgattacctcactttgatgcaagcgggaaaagctgaccgtaatgatattgcctatggtgaaatcactaaggggctaaagatattggcaaaagagctcaatacggtggttgtgttgcttgtacagttgaatcgagggttagaaaacagggcagataaacgtcccgtaccgagtgattcaagagacacaggacaaatcgagcaagattgtgattattggttaggcatttatcgtgatgcggtgtaccacaataatgcggatgaaacgctgaccgaaatgattttaaggctcaatcgacacggtaaaacaggcaccgtgtatgttgaccaacaaggattgagtattacaccagttgatcaatatatggctgcatatcgcgctcaaccgaaaaaggaacccaaaaggtattgtgaaaaatcgttttaa

SEQ ID NO: 298600 - DNA, 1455 bp, Proteus mirabilis
atgaatcaacagcgtgtattggtattaggtgccagtggacatattggacaaaatcttattcctgccttaatagcacaaggccatcaagtcaccgccggtgctcgtagagtcgattggatgatgtcgcaagggtggcaaaatacacgctgtgtatttgttgatttacacgatcccaaaacattacgagatgtcatccgtaatacggatattgtgtattaccttgtacacagtatgggagatgcccataaccttatcgaacaagagcgccaagcggcattgaacgtcgtagatgctttagaagagagtgacgttaaacaaattatttttttaagtgcgctccaacataaagatcaaccctactctccccatcttgttgcccgcaagctcacgggagaagtacttagaaccagctctattcctgtgacggaaatccgcacctctatgattgtcggccccggctcggccgcttttgagatcatgcgagatatggtatataacttaccgatattaaccccgccgcgttgggtgcgttcaaaatcatcccctattgcgttaaaaaatttaatttactatttaacagaaattattcatcacccaacccatcaacaccgcatttttgatgccggtggccctgaatatattagctatcaaacactttttgagcgctttattaacatctccggcaaaaaacgattactgatccctttacctatccccgccagtattatttctgctgggtttattagtctaataacttcagttcccacttcaatcgccaaggagcttatccaagggcttaaatacgatcttcccgctaaagatgcctctttacgcaagctgatcccacaaaagttaatttcttttgatgacgcagtcagagaaacactcgcagatgaagaagcggctttagatgatcaagattggggttactctcctgaagtacgtaaccgttggaaacccggctatggctattatcccaaaaatgccggatgtacagtgtcaacaccagcgagtgcggcggcactttggcatgtcgttcagcaaattggtggtgaacaaggttatttttatggtaatgcattatggaaaacacgtgctttattagatgatcttgttggcaacaaagtcacttatgggcgccctcagcgtgaaacgctagcgctaggtgatatgattgatggttggcgggtaataaagttagagcctgaaaaacaactgactttactcttcggtatgaaagcccccggtttagggcgcctctcttttactattcacgatagtggtaacctacgctcattagatgtccgtgcttggtggcatcctgctggttttagtggtttactctattggtttgccatgatgccagcccatttatttatttttaaaggtatggctcaaaccatctcaacttgcgcctatagattggataaaaattcacctaaaaagcccgagtaa

SEQ ID NO: 298601 - DNA, 1674 bp, Proteus mirabilis
atgtatttagaaagagtggaaatagcaggatttcgggggcttaatcgcctttctctcccccttgatatgaatacggttttggttggcgaaaatgcatggggtaaaacttcattacttgatgcgttaaccttgagtttggggatcgaaacttatcaatatgcttttacagcagaagattttcatcgtttacctaatgagccagaaaacagtaaaaaaaacctacaaattattctgacttttaccgaatcacgtcctggtcgtcatcgctcgtatcgttttcgtaaattagcacccgtatggatagctaatggggacgctcgtaagcatatttattaccgtattagtgcagaattagatgagcagcaaaatgtcaaaacctttcgttattttctggataaagaaggtaaacagatccgtttagcgaatggacagaccaaagcgattattgctgaaattgtgcgcctttatccagtattgcgcttacaggatgcgcgttttatacctaatttaacaacagaagttattgactctcataatgagcctcatcgtgaagcatttaataataagatgagtgaattaacgaaagcattaattaataacccagacaatttatcagatgaagatttacgtgaagggttagatgcaatgcaacagttattaggacactattttgctgatcacggtgcgctactgtttaaatctcatttgaaacatcgcaaagtcagtgagccacatattcgaggatggcatgcactagaaaatattaataagattttagcgaaacctaatcagcgcaatattcgtttaattatcttaggtatgttctcttctattttacagtcacgaggcagtgtcgaacttgatccttacgcaagaccgatagtgattgtagaaaaccctgaaactcgcttacaccctattatgctttctgtggcatggggattattaaatctcttttctttgcaacgcattacgacaactaattcaggggagttactctccttagcgccactacaaagtgtttgtcgattagtacgtgatacagataaagttgccgcttatcgacttggcgacaaacaacttcatgcagaagaagagcgtcgtatctcttttcatattcgttataaccgaccttctgcactctttgctcgttgttggttattggtcgaaggggaaacggaaatctggctaatgaacgaattagccagacaatgtaactacttctttgaatctgaagggatcaaagtcattgagtttgcgcagtgcggacttaagccactgttaaagtatgctacctatatgggtatagaatggcatacgttggttgatggcgatgaggcgggtaaaaaatacgccgccaccgttaaagaatttgccgcaaaaagaaatgatgcggagcgtgaccgattaacacggttgccagcattagatatggaacactatttatataaagaaggttttcgcaatgtctatcatgaggttgcgggtgttcctgataatgaaaaatggccagtaagacgtgtgatcataaaagcgatacaacgttcatcaaagcctgatcttgccttaacggttgctaataatgctgcacaacgaggtattgatgctattcctactttattaaaggtgatgttttctcgggtagcatggcttgcgagaggaaaagccaattaa

SEQ ID NO: 298602 - DNA, 1884 bp, Proteus mirabilis
atgagtatgaaagatcaggaaacgagaggatttcagtctgaagttaagcaacttctacaattaatgatccattctctttactctaataaagaaattttccttcgcgaattgatttctaatgcatcggatgcggcggataagttacgttttcgtgcattatccgatgcagctctttatgaaaatgagggtgaacttcatgtccgcattgccactgataaagaaaaaagaacactgactatcagtgataacggcataggtatgacccgcgatgaagtgattgataatttagggactattgcgaaatcagggactaaagcatttttagagtctattggacaagaccaagcgaaagatagccaattaattggtcagtttggtgtcggtttttattccgcatttattgtggcagacaaagtgacggtacgtacccgtgccgcggggcaacctgctgataaaggtgttttctgggagtcacaaggtgaaggtgattatacggttgctgatattgaaaaagcggatcgtggtactgaaattaccctgcatctacgtgaaggtgaagacgaatatttagatgattggcgtctgcgtagtattatcagcaaatactctgatcatatttccctacctgtcgaaatagaaactaaaaatgaagaagacggcactgttacatgggaaaaaataaataaagctcaagcgttatggacgcgtaataagtcagaaatcagtgatgatgaatataaagaattttataagcatctttctcatgattttgctgatccgctgtgctgggcacataaccgggttgaaggtaaacaagagtacaccagcctgctgtatgttccttctaaagcaccttgggatttatggaaccgtgaacatcaacatggtttaaaactgtatgtacagcgcgtctttattatggacgaagctgaacagtttatgcctaactatttgcgttttatccgcggattagtcgattctaacgatttaccattgaacgtttctcgtgagatcttacaagatagctctgtgacacgtaatttacgtagcgcattaactaaacgtgcattacaaatgttacagaaactggctgacaataatcctgaagagtatcaaactttctggaaagagttcggtttagtgttaaaagaaggtcctgcagaagatcacgctaatattgaagccattgctaaattactgcgctttgcttctactcataatgacagcgatgcacaaactgtttcattggcagattacgtgagtcgtatggttgaaggtcaggataaaatctattatatcactgctgatagctatgctgcggccaaaaatagccctcatctagaattattccgtaaaaaaggtattgaagttctactgctatccgatcgcattgatgagtggatgatgaactatctcactgaattcgatggtaaatcattccaatctgtgagcaaagcagatgaatctttagataaactggctgatgaagagaaacaagcgcagcaggaggagacagataaacaactggcaccttttgttgagcgtgtaaaaaccttactgggtgataaagttaaagaggtgaaactaactcatcgtttaacagacacgcctgctattgttactactggtgcggatgaaatgagtacgcaaatggcaaaactttttgcggctgcaggtcaacaagtccccgaagttaaatacaactttgagttaaaccctaatcatccattagtcaaacaaacggctgagttgactgatgaaacacagttcgcggattggatcaatttattactcgatcaagcgctatttgctgaaagaggaactttagaagatccaaaccagtttattcgtttagtgaaccaactattggctaaaaacgcgtaa

SEQ ID NO: 298603 - DNA, 996 bp, Proteus mirabilis
atggcgtcactgaaagatgttgctcgacttgcatctgtttctttgatgacagtctcaagagcgattaataaccctgagttattaaaaccagatacgttgaaacaagtccaacgcgcaatcgaagaactgaattatgtgcccgatttttcagcgcgaaaaattcgaggtcaagggactaaggtctcatcgatcggtgtgcttggtattgataccgcaacgacccctttttccgtggaaatgattttatccattgagcgtaccgctcgtcagtttggctggagctcatttgttgtaaacctcactgaacaagaggggtatgatcaagccatttggcaactgttagctcaacgtccagatggtatcatctataccacaatgggattgcgagaaatcacggtacatgaaaagctacgtgataaaaatgtggtacttgccaactgcctagctaaagatcaaacttttccaacctatattcctgatgattatcacggacaatattttgcgataaaacacgtgattgaaaaaggttatcggcatccgttatgtttttatctacccgaagataccgttgcaggccctattcgccgtaaagcggtcgaagatgcttggcaagatgccggcttacctttgtcatcattgcgccaatacacgatgttatttggcgatgaacattaccgtgatgtgattggattgttacaacaacactgtcgtcagcaaaaagcagattttgatattttaatctgtggtaatgatcgtatcgcatttttagcttatcaagttttactgtcgatgggattacgtatccctgagcaagtggctgtattaggctatgacaatatgataggaacgggggagttattctatccgccactcaccacagtacagttgccacattatgacttaggtaaagaagcaacattacatattattcaagagcgtaatcataataaaacagtacaagtcccctgtcagttaattgaacgagagtctctgtaa

SEQ ID NO: 298604 - DNA, 870 bp, Proteus mirabilis
atgtcaatcaaacaccctattattgctgttactggttcaagtggtgcaggtactactacaaccagccaagcttttcgtaaaatatttcagcaactcaacgcccatgcagcctctattgaaggggatagttttcaccgttatacacgccctgaaatggatatggccattagaaaagcgaaagagcaaggacggcatatcagctattttggccctgaagccaatgactttaatttattaagttcaaccctaagtcactatagccaaacagggcaagggcaatttcgcaaatatcttcattcttatgatgaagcaaccccttataaccaattacccgggacatttacaccttgggaagcattgccagaaaaaacagatattttattttatgagggattgcatggtggagtcgttaccgatcaacataatgtcgctcaacacgttgacctattagtcggtgttgtgcctattgttaaccttgaatggatacaaaaattaattagagacaccacagagcgcgggcactctcaagaagcggtgagagattctgtggtacgttcgatggatgattatatcagttacatcattccacagttttctcgtactcatatcaatttccaacgcgttcctacggtggatacctctaatcccttctcagctaaagctattccaacactggatgaaagttttattgttattcgctttcgtggcttaaccgatatcgatttcccctatctattggcaatgttgcatggttcatttatgtcgactatcaatactattgttgttccaggagggaaattaggcttagcgatggaattaatcatggcaccactggtgaagaaattattgaatggtgaaaaaattagctaa

SEQ ID NO: 298605 - DNA, 408 bp, Proteus mirabilis
atggaagcacgtgttaaatgggttgaagatttatcttttgttggcgaatcatcttctggccatcaagttatgatggatggtaattcaggtgataaagcgcctagtccaatggaaatggtattaattgctgcgggtggttgtagtgctattgatgtggtgagtatcttacgtaaaggtcgccaccaagtcactgattgtgaagtgaaattaacatcaaaacgtcgtgaagaggcacctcgtttatttactgatattaatttacatttcattgtttccggcaaagcgttgacagataaaattgttgagcgagctgtacaattatcagcagaaaaatattgctctgtttctttaatgttaggaaaagcggccaatattacgcactcttttgaaattaaagatcctgaataa

SEQ ID NO: 298606 - DNA, 1218 bp, Proteus mirabilis
atgataaatcaacgtattaatcgggcaacttacgatcaggtaatgttgccaatttattcaccagcagattttattcctgttaaagggcaaggtagccgtgtttgggatcaacagggaaaatcctatattgattttgctggtggtattgctgttctagcgcttgggcatgcgcatccactattgaataaagcactgcaagagcaaagtgagaagctttggcatgtaagtaatgtgtttactaatgagccggcattatgtttagctcagaaattaatccaacatacttttgctgagcgtgtcttttttgccaattctggggcagaagcgaatgaagccgcacttaaattagcacgacattacgctattacccgtcataatccttataaaactaagataattgccttccaccacgcctttcatggtagaacattttttacagtctctgttgggggacaacctaaatatgcggatggttttggtcctaaacctgcggatattatacatgtcccttttaattctcttgatgctgtaaaagccgtgattgactctcatacttgtgccgtaatactggagcctatccaaggggagggcggagtgacaccggcgacagcggagtttatgcatggcttacgtacactatgtgataagcatcaagcgctattaattcttgatgaagtacaaacgggtatggggcgaaccggcaaactatttgcttatatgcactatgatatacagcccgatattattaccagtgccaaagcattaggtagtggttttcctctcagtgcgatgttaaccaccgaggatatcgctgcggtaatgggggtaggaacacatggtacgacttatggggggaacccattagcctgtgcagtaggcaatgctgcttttgatttaatcaacactcaggcggtattagaaggtgtcagtgagcgtcatcgttggatagtggatgaattgcaggcgataaaccaaacttatgctgtgttttctcaaattcgtggacaaggcttattaattggcgcgcagttagcaccactgtatgcaggtaaagcaaaagagttacttgcactggcctctaagcatggcttaatgatgttaaatgccggggctgatgtaatacgctttacaccatcgctgattattaccctcgaagagttacaagagggcatgaatgcgttacgaaaagcgcttgctgagtttgtaaaagcagagtga

SEQ ID NO: 298607 - DNA, 543 bp, Proteus mirabilis
atgagttctataaaatcacctataattatctctatcacctcaattgcaggtggcggcaaaacagcactttctcattatataagagaaaagcttccatcaagcaaatgccttcattttgatgatttcgactgccctacagcacctgaagatctcgatgagtggatagaacaaggtggtaattatagcgaatgggatataaagccatttgttgaacaagttaatcagacgatagaagagtctcaatatactcatatcattttggattatccttttgccagatctcacccagcgctacaacagatgatcgactatgctttttttattgatacaccactagatatcgcattagcaagaagaatattgcgtgattataaagagaaaagtggaaatgatattattcattatttagaagagtacttaatctactcacgaccctcatatacagcaatgacggaaagagaaaagctaagtgctgacattattattgatggtaacgcatctgtgtctttaattgcacagaatatcctaaagtatattgtttaa

SEQ ID NO: 298608 - DNA, 441 bp, Proteus mirabilis
atgttttcccttaatgatcgctatagcgatattgatctagaaagtagaatactctatgtcaggcgtttaaaaggtgggctttcaacaacacaacctattattgatgaggaatatgaagccttatgcaactggttgaaaagtagagaaaactggagagaatcagattctgaatgggtatttttatcacaaaaaacgggaccaatttcccgtcaacaagtttatgggttattacgccgtttaggtaaaaaagccaatgtttctattagtccacaccctcatatgttacgccacgcctgtggctacgcactggcggatttaggcagagatacacgtttaattcaagactatttaggccatcgcaatatttcccatacggttatttatacagcaagtaactcaaaacgatttatcaatatgtgggaaacgcgaaactcacaatag

SEQ ID NO: 298609 - DNA, 708 bp, Proteus mirabilis
atgagagttggcgtaataggtgcaatggaacaagaagtcaaacttctgcgtgaacaaattgaaaactgcgaaatagtctctcgtggtggttgtgaaatttatactggcaaaatcaatggtgtagatgttgcattactaaaatcaggtattggtaaagtggcagccgccatcggtaccacactattacttgaacattttcgccctgatgttgtgatcaacaccggctctgcaggtgggttagatgcaaaattaaatgttggcgatattgtcgtatcaacagaagtacgttatcacgatgccgacgttactgctttcggttatgaaccaggacaaatggcacaatgcccaccggcatttattgccgatcccaaactggtcaatattgctcaagagtgtattggatcactaaaattaaatgccgtgcgtggattaatctgtagtggcgatgcttttattaatggtgccgagccattagcacgtattcgtcgtacttttccagaagtcgtcgctgttgagatggaatcaaccgctattggacatgtttgccatcaatttgatacaccttttgttgttgttcgtgccatttcagatgtggcagataaagaatcgcatttaagttttgatgaatttttatctgttgccgcacaacaatcaagcttaatggtcactactatgcttgataaattaaaaacagagactcagttttaa

SEQ ID NO: 298610 - DNA, 1509 bp, Proteus mirabilis; identical to SEQ ID NO: 298197

SEQ ID NO: 298611 - DNA, 1326 bp, Proteus mirabilis
atggtgcagttttattcccctaaaaaacgtcctgctaaaaaacaggtaaaaaacttggcggtaaccgctaatgcattggatgctaacggtcaaggtattgctcatgctgagggcaaaactatttttgttaaaggattacttccacaagaaactgcacgcattcgtttgaccgaagaaaaacgccagtttgccaagggagaagtgatcacacggttaaccacaaacccagaaagagtgacaccaccctgtcagtactatcaacattgtggtgggtgccagcaacaacatgtgcctattgattggcaacgcaccactaaagctgaggttttatcacatcttattaaacgtgaaactaatgtggtcatttcagcacagcctgttattgccggtgcggagtatggctatcggcgccgagcaagattagggttacgttatcaccctaaaaagggtttggtgatgggatttcgccaagcactttctaatgacttagtgatggtcaccgaatgcccagtattaaaaccacaacttaatgcattgttgttgccactgtggcagtgtttaaagcaactctctgtcgtgcgtgatttaggtcatgtggaattagtgttagcagataatgggccattagtgattttgcgtcatttatcaccgctatctgagggggataagcaattgttagatgatttttctcatcatgctcaagtgatgatatatctggcgagtgataatggtgagatcgcacaattaacaacgattgagaaggaacccttctatcagatagagggtctaaaattacactttgcaccaacggattttattcaagttaatgatgaaataaatcacaagatggttgctcaagcgatagcatggctcgatttatcgccaaacgatcgcgtactagacttgttttgtggcatgggtaacttcacattacctatggcaaagcgtgttgataaagtcgttggtgtcgaaggtgttcctgcactggtggcgatggcgaaaaaaaatgctgaacttaatcaattagataatgttcagttttggcatgctgatttatccgccgatttttctgctatgccttgggcacaggaaggatttaataaagttctgctagatcccgcaagagcgggagctgcacaagtgatgtcacatattgtgacgttatccgcagaaaaaattgtgtatgtttcctgtaatccgaccacgttagccagagatagtaagatattattagattccggatatcagctaacccagttaagaatgttggatatgtttccacaaacagggcatctggaatcaatggcattgtttattcgcaaataa

SEQ ID NO: 298612 - DNA, 2241 bp, Proteus mirabilis
atggttgcagttagaagtgctcacttaacacctgcaggggagtttgccgttgataaatgggttaatagcttgaatttaactcatgcgaatgcggggagtgaaatcatgcaaacctgggaatactgtcatcgtactgttctgggccgtgaagatgcgcaactgttgctatggcgcggtgttgagatggttgaacttctttcgacactcagtatggataaagatagcatgagggcagcacttctcttcccacttgctgaagaagatcttattaaccaggaagttatcactgaacattttggtgaggcgatatggaatttagtgcgtggcgtaatggagatggatgctattcgccagcttaaagcgacacataccaacgaaactagctcagtacaagtcgataatgtacgccgtatgttattgtctatggtggaagattttcgttgtgtagttatcaaactcgcagagcgaattgcccatttacgtgaagtgaaagatgccactgaggatgaacgggtcttagcggcaaaagagtgttttaatatctatgcaccattagccaatcgattggggattggacaattaaaatgggagcttgaagatttctgtttccgttatcttcatcctgatgaatataagcaaattgcaaatttactgcatgaacgtcgtattgatcgcgaacagtatattgataatttcgtcagtacggtgcgtggttatatgcagcaagagaatattgaagtcgatatctacggacgtcccaagcacatctatagtatttggcgaaaaatgaagaaaaaaaatctcgcctttgatgagctatttgatgttcgtgcggtacgtattgttgtcgaacgcctacaagattgttatgccgctttaggtattgtacatactcattttcgtcatttacccgatgaatttgatgattatgttgccaatccaaaaccaaatggttaccaatctattcatacggtagtacttggccctgaaggtaaaaccgttgagatccaaatacgtactcgtcagatgcatgaagatgctgaattaggtgttgcagcgcattggaaatataaagaaggtgctactggtgcaacaaccaaaggcgggacgggaagttatgaaaatcgtattgcgtggttacgtaaattaattgcatggcaagaagagatggctgattctggtgaaatgctagatgaagtacgtagccaagtatttgatgatcgcgtctatgtctttacgccaaaaggggatgtgattgatttacctacaggctcgacaccattagattttgcttatcatattcatagtgatgttggtcatcgctgtattggtgctaaaatcggcgggcgcatcgttccatttagctatcagctacaaatgggcgatcaaattgaaattattactcaaaaacaccctaatccaagccgagattggctaaatcctaatcttggttatgtgacaaccagtcgtggtagagcgaagatccacaattggttccgtaaacaagatcgcgataaaaatattattgcaggccgccaaatcttagataatgaattagcgccgcttgatatcaatatgaaagaagcagaaaagctgctgattgctcgttataacgtccatagtcttgatgaagtgctggcaggtataggcgttggtgatatccgtatcaatcaattagtcaatttcttacaaagtaagctgaataaagccacagcggaagatgaagacaaagaggcgttacgctcattagaaaataaaacggctacaccaaaaacaaccacgtcaggtggtggcagtattgtggtcgagggtgtcgggaacttaatgcatcatatcgcacgttgttgccaacctattcctggcgataatatcgttggatttattaccaaaggacgtggtatttcaattcaccgtgcagattgtgatcaattagctgagttactttctcacgcaccagagcgtattgtcgatgcggtgtggggtgagaattactcaagtggttattcattagtggtgcgggttgtggctaatgatcgcagtggtttattacgcgatatcaccactattttagctaatgaaaaagtgaatgtgctgggagttagtagccgcagtgatgtgaagcaacaaatagcgaccattgatatgaatattgagatttataatctccaagtattagggcgtattttagcgaaactcaatcaattacctgatgtcatagaagccaaacgcttttctcattaa

SEQ ID NO: 298613 - DNA, 969 bp, Proteus mirabilis
atgaatgatgctaaatacggcgttcttttggtcaatcttggcacccctgatgcacctcaaccagatgcagtgaagcgctatttagctcagtttcttagcgatcctcgcgttgttgatgtttccccgtggatttggaaacccattcttcatggggttattttgccatttcgctcacctaaagtggccaaattataccaacaaatttggttgccagacggctctcctcttttagtctatagccgtgcacagcaaaaagcgttagcacaacgttttgcgcatatacctgttgaattaggtatgtgttacggcaatccttccctcaacgaaggactgacgcgattattggtacagggcgttgaaaagctaattgtattacctctctatcctcaatactcttgttcgacatcgggggcggtatttgatggtattagccaactgtttaaaacgatgcgaactattccttcactgcattttgttcgtagttatgctcaacatccactttatattaaagcgctggcaaatagcattgacgagagtttcaagcaacatggtaagccggatcgtttagtactttcatttcatggcattcctgaacgatttattaaaactggggatatctattttgatgaatgttgccttacagtagaaaaattaaaacagcaacttgattatccagcagaaaaagtgatgatgactttccagtcacgttttggccgtgagccttggttatcaccttatactgataaaacgatggaaaaactgggtagtgaaggggttgaacatgtacaggttatttgtcccggattttcatcagactgtttagaaacattagaagaaattaatgaacagaaccgtgagttctttatacatggtggtggaaaacagtatgaatacattcctgctttgaatgataaagttgagcatattgacttacttgaagctataatccgcgacatatgtgaaaaataa

SEQ ID NO: 298614 - DNA, 1119 bp, Proteus mirabilis
atgaatagtaagctttcaaaaccacaatcttcagaagttgataaagggcatttcgacgatttttatctaaaacagaacgatgaaatcgatctgtttgagttattttctgttctttataaatcaaaatttgtcattattgggatcacacttttatttgctatcgtaggttttactgttgcgagctttctgccccagaaatggacaagccaagctgctattacaaaaccaatgttagatgagatgaagcagttaagagcaaccttaaatgatttaagcttggttgatgttgatactggcgtaaatgcttcttctgtttaccaaaaatttatcaataactacaattcccgtgtattacgtgaagaatatttagtcaatacggattactataaaaacttattggctaagatggacgatcctacgccattggataaacgtaaattaatcgaaactattgttactaaagatattaatttaaaagcatcagacagtaaaaatagtgatgaagaatttagtggcgaaattaacttaagctttactgcgccaacttctgaagaagcttacgatttgctgtcaggttatattcgctttatttctactaaagtacgggtagaagtgaaagacgaaattgatgatcaaattgagcgtaaattaaaccatgcgcaaaaagcgtatcaaatggatttagaacgtattgctaatgcgcgtaatgttaatgttcagcgcttaaaatatgcactagaaattgccaatgctgcgggagttaaaaagcctatttctagtgaaggcgcacaaattaaagatgatcctgattactccattgccatgggggctgatgcacttagtagcaaattagcgataacagaagcgattactgatcctacaacggtcagttctgaattaaaaaatcgcttatataatattcagcagttagaacaaataaaattgggtgatctgcaatttgttcctttcaaatatatgctaaaaccttatgaaccaactaagaaagatgcgcctaaacgtgcattaatcttagtcggtgccgcatttgttggttttatcctttctgtaatgggtgttttactgggctatatggcaagaaatcgccgtaaaacagcgtaa

SEQ ID NO: 298615 - DNA, 270 bp, Proteus mirabilis
atgcgtatggaaaaattaaccaatgtaacttatggaacagcaggcctaacggccttttttgccagtctttcgttatatgaatggggatttgttatcgggatggcgttcagcatggttctcggtttagccacttactttatgactcgtcgagaacaacgaaaacgcactcaattatttgaaaagcttgttcgtcatgttgacccacaaaacccgaccgaaaccttaaaaaagcttgctgaattaatggtgaaagcgccaaaggatatttaa

SEQ ID NO: 298616 - DNA, 159 bp, Proteus mirabilis
atgtcatggaaaactttaatcatcattatcggctttattcttgcattactcattacagtcgctggtggcatttatctcttgattgataactcatgtactaaagaccaagtgagtttagaaaagcgctgtcagattgcactctcatatcatcggtactaa

SEQ ID NO: 298617 - DNA, 603 bp, Proteus mirabilis
atggctaaaagaccagattgggaggccatcgagtcggcttaccgagctggcgtgatgtccataagggaaatagcctctcaatacgagataacccatcaggcgataagtaagcgtgccaagaaagaaggatgggagcgagatttaaaggcaaaggttaaggctagggctgaaaacttggttgccaaaagggaggttgccagtctggttgccaccgaaaaggctatttcagaacggcaacttattgaggctaatgccgaggttatcgctaatgtccgcatggagcatagaggcgatattcgaagggctagagaattaaccaacaacttatttgatgaactatctgctgaatgtgctgatgtgccagccttaagaaaacttggcgagttaatgtttagtcctgatgataacggacgcgataaactcaatgaaatttatcattcaatcatatctctccctgagcgcgttaagtcagccaaagcattaagtgaaacactcaaaaacttggttgggcttgagcgtcaagcatacggccttgatgatgttcagccgaataagacagctagtcagctatcagaactaatggacgacttatctaaggaataa

SEQ ID NO: 298618 - DNA, 243 bp, Proteus mirabilis
gtgtgccaatgcgtttattttcgtacaggaagcggaactgcttggcgtagtaagcgccttcaaccgattgttggaatgcctcagacggtattgacgggtattcccgtttcatatcgtcgccaagcgttttctctttggcgtaataccatgctttctggcgctcgtttaattgaacaccatgtttgctggctatctcatcaaagtaatcaactaaccgctggggtaatggctcaacagggttaa

SEQ ID NO: 298619 - DNA, 213 bp, Proteus mirabilis
atgtctaatacaatgactggtacagtaaaatggtttaacgacgataaaggctttggctttatcacacctaaagatggtagcaaagatgtatttgttcacttttcagcaattcaaagcgatagctttaaatcactgaaagaaggccaagaagtatcattttctattgaaaatggtgcaaaaggtccagcagctgctaatgttatcggtctgtaa

SEQ ID NO: 298620 - DNA, 459 bp, Proteus mirabilis
atgtcagtttttaaaagcaattacgttaacactggcgttagaggtatcagaaataataatccgggcaacattcgacatggttcttctaaatggcaaggtctagcaacagtacaaaatgatgataaattttgtacttttatcaatgtttattatggtgttcgggcattaatgaaattgcttcaaacttatagtaagcaaaaaggtaagcctaatgttggttgtgacaaaatagatactgttgaagaaatcatagaacgatgggcgccatcatctgataacaaccatactgaaaattatattaaacgagtttgtaaggatactggctttgaacgtcacgaatgcttaaacctatttgataaatcaacatcaatcaaaatggcaaaagcaatcatttctgttgaaaatgctcaacaaccttatgttgatgatgttttcgatagagctttttcattaatttaa

SEQ ID NO: 298621 - DNA, 1053 bp, Proteus mirabilis; identical to SEQ ID NO: 298181

SEQ ID NO: 298622 - DNA, 585 bp, Proteus mirabilis; identical to SEQ ID NO: 298402

SEQ ID NO: 298623 - DNA, 1515 bp, Proteus mirabilis; identical to SEQ ID NO: 279291

SEQ ID NO: 298624 - DNA, 1890 bp, Proteus mirabilis
atgaattataaagaatttgcaaaacaaattctcgctattgttggtggcgaggataatataaagtcattagtacactgctcgactcgattacgttttacattacataatgaagataaaattgatccttcaaaagccaaagcaaatagtaaaatattatctgatgtgatgaagggaggacaatatcaactggttatcggtaatgatgttgataaagtatttaatgaactaacaaaaatgataaaaacaaataatactccccatgataataataaagaccagaagaaacagtctatcgtaaataaaatattatcagcaattactggctctatcgctccggttatccctctgttagcgggtgccggtatggggaaagtgttacttattgtattaacgatgctaggttggttggataaaagtgaccaaacctattatatccttaactttatctttaatacggccttctattttatgccggtatttattggtttctcggcggcgaaaatatttaattgtaaccaatatttagctgctatggtctgtttagcgatggtcagccctgaatgggcaagcttagttaaagccggtgagcctgtcgaatttatgtatattcctgtcgctttggttaaatattcatctcaactgatccctgctttaattactgtttggatgatgtcttatatagaacgctttattgttcgtattgtgccagaaatggttaaagtatttatggtgcctttattggtgattttagtttcgacacctattgcgttgattgcggtcggtcctgtcacttcatggttcgctcaattaattgctgatggggtgatcttaatccaagagcacaccggttttattgctattccattattagtggctatttatccatggttagtatctattggtatgcataaagcacttagtcctgtcagtattatgttagtggagcaaaaaggttttgacccgattattcgtgttatggcgctatgctccaacatgtctcaggctgctgcttctttagctgtttctgtgcgtactaaaaacaaaaccttaaaacaattagctttttctgccagtattaccgccttttttggtggtataactgaacccgctatgtatggggttaacctcaaactgaaaaaaccaatgtacgcttgtatgattggtggtgctattgcaggattatttgctggtattgttaagttaaaagcgttcgtctatgtcactccggggttattaagtttaccaatgtggatatctgatacagataaccaagtggtaaatgcaataatcaccttattgattgccagtgtagccacttttattgcaacgcttattattggttttgatgatcctactgatgacccaatccgtgacgaagaagaaaataataaacaagctgcatcaaccaacaaaaaaccacaaatagcgaatagtaaattacctgttgggttaatttcacctctacaaggtaaaacggttgcactttcagaggttaatgatgaaacatttgcttctggcattatgggacctggcatggcaattatccccacaacaggaaaagtgattgcacctgcagatggcgttgttgatattaccttttcttctggtcatgcgattggcttaacactggttaacaatattgaaatgctgatccatgtggggattgataccgttaacttagcgggacagcacttcacatgctgtgtcgttaaaggtcagaaggtgacaaaaggtgatacgctaattgaatttgatttagatgcgataatagccgcaggctatgatccaacaacgatgatcatcattactaatgatgatcataagctagacgttgttcagaccgataaaaaacatgtcgaccaaaatacagttttactaaccgtgggttaa

SEQ ID NO: 298625 - DNA, 825 bp, Proteus mirabilis
atgatctatgctgatttacatgttcacacaaaccatagtgatggtgtttgtgaaataaaagatgtccttgaaaatgcatttagaaacggcattaagactattgcgatcaccgatcacgatactaccaatcattatgacgaaatttaccgagaaggggagcgtcttggattaaatatcgtcaaaggtgttgaaatgagttgttatgactttgacgtttataaaaaagtccatgtagtgggactttggcttaacgaaaaaacgcccaacgttgacaagctgtgtgataacactctcaactgtcgtgatcagtttcaccgagaattaatattatctctcaatcaacaaggctacgatatttgttatgaagatgcgaaaaagttctcaaaatataatatcgtttttaaaatgaatatattccaagcattgagagaaaaatatccagaggaaatgaccaaagagcgttataaacaactttttggctctaaaacaaaaatagaaacagacttaaaaatggggtatatccctgttgatgaaggaattgctgctatcttacaagacggtggtattcctatacttgctcacccatgtgtctatgacaactatgatgaaatagaaaaatatgtccagtttggattgaaaggattagaaataagtcattctagaatgaaacctatcgactatgaactgacccaaaactatgctaataaatttggtttgctaaaaagtggcggtagtgacttccatgatcctgcgttacttaaatttggcgattttggcctaaatcaaacacaatttgagaccttaaaaaaggacgcaaataaataa

SEQ ID NO: 298626 - DNA, 675 bp, Proteus mirabilis; identical to SEQ ID NO: 298349

SEQ ID NO: 298627 - DNA, 1014 bp, Proteus mirabilis
atgtcaataactaaacaagctgatggccgttggttagttgaactatatcccaacggtcgaacaggaaagagaataagaaaaatattcacaaccaaaggtgaggctgttggttataaacgccatattctcgaagagtcacaagataagccgtggctaggcgaaaaagaagataaacgtttattatctgagttgcttgaaatctggtttcgtgctcacggtattacattagctgatggtgaaagccgaaaacaaatgatgttattcggttgccaagcaatgggtgaatctttagcaacagagtttaatactaaattattttctgtttatcgtgaaaagagattaagtggaaaaattactcgtgccgatagaatcaagtccgttgctccaagaacaacaaaccttgaactagcttattttcgcgctatgtttaatgagttgcatcgattgggtgagtggaaagatgataacccattaaagaatgttcgctcatttcgtactgatgaatcagaaatggcgtttctttctgatgaacagattatccaactgctagaagaatgcgataaaagcaaagcgaaagatttatctattattgtcaaaatcgcactttctactggagcgcgttggtcagaagctgaaggtttaaccagttcacaagttactccttacaaaattacatttaccaaaacaaaaggtaaacgtaatagaactgtacctatatcagaagagttgtttaatgaaattccgaaacgtagaggccaattatttacgccctgctattctgcttttcgttcagcaataaaacgcgccaatattgaattacctcataggcaatcatcgcatgttttacgacatacttttgcctcacattttatgatgtcaggcggtaatattttagttttacagcgaatattaggtcataccgatattaaaatgagtatgcgatattcgcatttcgccccagagcatttaaatgatgcgctgatgtttaatcctttagtgaagttgaagatatag

SEQ ID NO: 298628 - DNA, 909 bp, Proteus mirabilis
atggctacctcaaaaaaagaaagtaaagaaaagataactgattcagataaaattacagaacaacaagaaataaagaaaaagacttgcttcgtaattatgcctattgcggatcaccccgattacgaaaaagggcattttaaaagagtttacgaatacttgataaaaccagcatgtgaaaccgctggatatcagcctattcgagcagatgatagcaaagcttctcacatgatcatgtttgatattctcaaaaaaatagtggaatgtgatatggctatttgtgacttaactactaaaaatgcaaatgtattttatgaattagggttaaggcaagcttttaataaaaaaactattttaattactgatggaaaagaaaaagctccttttgatatcgcaggatttcgttatgttgaatattcatcaactttaagaattgatcaagtgaaagttgatatccctaaaataactgaaatgttaaaaacaacagaatcagattccgaaaacagcattaactccattgtcaaactattagaaatgcaacctgtaaaaatagaaccaaaagatttaaacagtgaagaatcaatgttgtttaaaatggtaatgagtgtaaatgaaaaaatagatgcattatctaataataaaggaacaaattttataaaaccaataaacctttactcttcaaatgaattacaacctaacatttcatttgaagagatatataatagcgacccagatgatttatataaatatatattttatatttataatgataagctgggtaatttaaaaaaaatagatgataatattattatattttcaaataatggaaatgaaacccatatgattaataatatacagtttagaaaaaaaataaaggctaaaccagcaatcgattttttaaatttaaagtaa

SEQ ID NO: 298629 - DNA, 699 bp, Proteus mirabilis
atgaaaaaattattacttagccttactatgctggcgataatatctacgccagtgttggctaaatcccctgtagctaacttaaaaatcaacggtgatattaagcccccaacttgtactattaatggagcaacacaaagtgatgtgattttcgattacggagtcataagcccaacacttatccctcaatcgaaaatttattcttatcctgccagtatggttcaaaatacagttacagttgaatgtgatgcaaaaacatatttaacctttgttgcgtctgatacttatgataatacagaattaagcgttaataatacgtcagactggtttcatttagtagataaagcaaatcctgaaactgcggttggagcagcttattttgcatgggataatgtgactgttgatggcaaacctgcgtatatttcacgagcaaacgatgctgctatcacagggactaactactataatgtcctatataaagggccaaccaatggttggacatcaaaacaacagacagaatcggttgataaaggctctctggctctaatttcaggtgaaattttccaagcaaattttagacaaggaatgacaatgagtacttttattttatctagagatgaattaagtaaaaaaggaatagatttatctaatggattagattttatgggagaagctgttctcacttttaactttggtgtctaa

SEQ ID NO: 298630 - DNA, 2154 bp, Proteus mirabilis
atgactgtatctactgaactaagccatgaagagtatgtaggcaatggcgtaacaacggattttgattttcgattccgtatctttgaaagcagacacttgattgttgtcgttgctgacaacgatggtaatgagactacattaaagaatggtactgattattttattgttggtgttggttcttatttcggtggaaaagtagttcttagtaaacctttagccaaagactggaagatattattagaacgcgatttacccgttgtacaagaaactgatttacgtaatcagggtaaattttttgctgaagtacatgaagatgcctttgattatctaacaatgttaattcaaaaagcattgggttttttatcattatgtctgcgtaagcccagttatttatctaaatattatgacgctaaaaataacaggattgaaaatttaggagatcctaaaaaagaaggtgatgctacaaataaaaaatatgtagatgctattgttagtgattcctatggaaaaactttacgggtacgcgataaaataataaatacaattccagatacaaaacaaagatcaaataagattttagcatttgatgataatggccagccaataacaatattgcctgaaaaaggaacagcaagtgatgttttgcttgaattagcaaaagattctggttctagtttaattggtgatgttaattttgataatttaagtgaagcttctgatttgctaataaatcaatattttaatcatggagatatatatgatgtatttgttgtgtatggacaatcaaatgcagttgggtacgctcaagatacttatggatttccagatgtgattgatggtgcaatgtattatgactataaagataatactataaaaaaaataattaaagctctcccttattcttcaggaaatgtaagtactggtcacgcgtgggctgcgtttgctaatgagtatataaggaaaacaggaagaaaggttttaattattccctgtgctagaggtgaatcctctattgttgaactatcaaagccattaaccccatcaaataccgtatatgataagatgattagctcattcaactccgcaatgtttgtcgcaaatagagatggtatatcaataggatataagtcatgtctgtttcaccaaggtgaaacagacatgacgctaggaactaaaaagcaggaatatcaagatacattagatcaactaattagagatatacgctcagatatggggctgaataagtgttttttatatcgagttggatgccctcagaatagaaaagaaacatcttggtatggtatacaaaccgctcaagattacctatgccagtcttacgactggatggtgatgtgttattcattgtgtggaacttttaccatcagcaatggattattgcgcgaaggagtgcattatactcaaaatggctataatgttatggggcatgaatcagctagtgctattgttgattctctatttaataaaaccccttcctcagaatttgaaactgaaatgtatggaactcctctgctaccacaagaccaaatatggagatatacatacgggcggctagttgttggttctgatggaaatttaacactactggacaaatcgaacaccggttattcatatagaacgataaatatttctagaatagaaatgctggacgataaaattaggctttacttacaaagcagagccagctggatacttggtcttgatgttgaattgaatgaaagcggtaaaatctttggggtagaatgttttactacgattgtatctgttgaaaataatgagtttgctgtagatttatcttttttaatggatgtttccttcggtatttctaaagatggggatttaatgagagcacctgaccttagctcttcaagtattcccccttttatatctgataatataacaatagataaatcaaatggcatcaagataatccacggggggataactggattaccagttctttttggagctagtggcggaacggtgtccatttctaatatttcaggaaaatcatttgttattagtagttcttctggtgctttaataaccctgaataggatgaaagtaaaaccaacatcactaccgcgctctatgcaggttgcaattaaagcaattatttgtgagaagaaagaataa

SEQ ID NO: 298631 - DNA, 447 bp, Proteus mirabilis
ttgtatttaaaaggattagataaagtacaaacagaaaataaaataaaattatttttagataatttaaaaaacaaaggccaaaatagaaaattctatattttaggtgattatcatcaacctagttataatccatacagttgtttgttaaactcacaaacaatgcaaagcaattttttatctgatttacttcactctgaaagatgtgaaaagatggagagtaaagataaagatagcttaaggacagatgttgatattgaaggtatttttaaattattaacattgcaatatgataacattgaattcatttctatgagagatgaacaatgtaataaattcagctgtacaattatagaaaatgataatcctataattataaaacctcatctcacaaagttcggtgcggaaaaattcactaaatttattatgaataagataaattacaaataa

SEQ ID NO: 298632 - DNA, 123 bp, Proteus mirabilis
atgaaaaaagtattacttagccttactatgttggctataatgtcaacggtgatattaagccaccaacttgtactattaatggggcgacacaaagtgatgtcctttttgattatggaagaataa

SEQ ID NO: 298633 - DNA, 345 bp, Proteus mirabilis
atgccaattaatgatagctggtctgaaaccgcgacattattacaacaactttctaataaaatagttcagcaagaacgaaatagaggcagttttacactctcttatctaaaaacggcaatttatgatattcaaaagcagcacaataaagttgagccaatcgaagaaaaactgcgacagctcgctgtacaaattgaaacagggcaacctatttctcctgcaactcttaataatattgataataaaattaatgggttattagctcgttattatgatttacaaaaacaagctgaacaacaaggtttaaaaccaggctcatattcatcttttggattagatcatgagtga

SEQ ID NO: 298634 - DNA, 1608 bp, Proteus mirabilis
atggatggatttaagaaaattaatatcaatgatgatattgaaagaattacactagaaatagtgaaatatattaaagagcatagtgttgaattaccttttaatattgagtcagtaagacgtgttttaattgagaattatatttatattcttacttataaaaatgaatatgctgctaatgattttttaataaaaatagaaagtaatttatctctttataatcgggataaatttactaaagcgattgatgcaagtatagagaatttatttgttaataattcttatcttacaaacaaaaattatcaaaagctaaataaaatacgtattaattcagtatttcagcattacccatcaggatcctttcacttaaaaatagaagataaaaacttatttatacagatagataataccaatcaattatttaaaatcattgactttgaaggtacagtggaattcttttctaaaaaagatgaccttattcatactattaatcaaatggttaaaaacagtgttgctgataactctatatcttaccgattttacgctaagaacgaatattttaatttctttactctcgataaatattggcaagtaacacctaaagatatttatgccgaagtcattaatgatatcaaggcaaaaaaacaggtacatattgatagtcatttaactgttgaattaatagatagttattcatataaaaatatttttattgttagagattctaaagaaaactcagaaaaaatactccatatatatcttaataatattgatgaagcattcttgattgctgtagctaaacatcgtcagctaaaagaaaatggtgagcatttactttataaattagataaggattggttctttactaaaatgaaagataaatccgttaaatatttttcacaaacttctgatttattaataccattagaaaagataatgggaagaattaatcttgtcgcttcagctgaaaataattataattttagccattttgatccactttcaggagtatgttatggaataagtttgaaatatttattggaggttagaaataatggtatagaaggagggaataaatatttacattggctaaaggaaaatattaacctttacaaggacaaaaaagaaaagatatctgataagcttgaaaaaattatatttgatagtgtacaagaatatgaagtattaaaattgattaaagagatcaaggaaattaaattcgcacagatttttcaaatggagagaatatatgaaaaaataaattatacaatttttgatttaacaaaggcgaccgaataccgaaaaattttagcagaaaatggcttgaaagcatcgaatgcaaataggctagaaagtagtctctcacaaataaattatcacttagaatatataatgcaatattataatgaatattatgcgattattgcatttaaaacgcatgccattgctcttgcttataagagatattctaataatcattataaatttacgctatttgattctaattctgaattgacggaattttctaatatagaatcaataaaagacgctttgataaaaacaatgggctcttatactctaaataaagctgatggtttcattgccttttaa

SEQ ID NO: 298635 - DNA, 1284 bp, Proteus mirabilis
atgcaaaaggaaaaaatagaaaataatctaccaacatggaatgatggaaaatgtattgacttattaagcctagatggtgttgaagttacaacaaaattaaatgaaggtatattatcaattaaaatacctcaaatatggcttgagtatacaagtgctacttggttaccaccatctcgctgggatgatgggatctcaggtttgatccttgattataatattaacaccaatgttaatatccctcatgaaggaagcaatacgcaaagtatttattacaatggtactgttggttataacttcggtagctggcgtattcgttctgattatcaagggaattataatcgaacctctggtgatgcggaaaacaataaagatttattaaattttactcgagtttatggatatcgcgcgatccgcagtttaaagtctaacctaaccatcggtgaaaactttataaactccaatatatttaattcctggcgttatacggggattagtttagaaagtgatgatcggatgctctctcctcaactaaggggatatgcaccacaagttacagggatcgctgaaactaacgcaagggtagttgttaagcatcaaggacgtattctttacgattcaacagtacccgcaggtccatttgccattcaagatttagacagttcggtgcgtggtaaattggatgttgagattattgagcaaaatggaaagacgaataaatttcaaattgatacagcctatgttccttatttaacaagaccgggacaagttcgttataaggttgttgcaggacgctctagagataaattacataatacagaaggacctatatttggtacgactgaagctgcttttggtttaagtaatgcttggactatgtatggtggtaccattttcgccggtgattataatagtgtagcacttggggttgggcgtgatatgttcgctttcggtgcggtatctgccgatattacacaatcttatgcacgattacctgatcgtggcactatgcaaggtaagtcatggcgagtcagttactctaaacgttttgataatttggatgcggatgtaaccttcgctggataccgatttaatgaacgtaattatatgacgatgcaaaattatttagatgcacgttatcgtgatgattttactggaaaagagaaagaactctatacagtaacctttaataaaggtctttctgaatataacacatcaactggtactcctgcaacaccttcagtatcaactaataagcgagtaccaccattaaatccatctgggtga

SEQ ID NO: 298636 - DNA, 258 bp, Proteus mirabilis
atgttaaacaacaataaagccgttgaacttatttcgggttatcgttcactcgcgactaataatcatctacgtcaacacaccagcggtgttgcgaaaaaaagctatcatacccgtggtcaagcaatggatttccgtttagtaggtacagatttatctaaagtacgccaagtagcactaagaatgaaagcgggaggagtgggttattatccacgaagtaattttgttcatatcgatacaggacccgtgcgctcatggtaa

SEQ ID NO: 298637 - DNA, 651 bp, Proteus mirabilis
atgatgtatcacattatacctgtgacaaattatatgcaaaattgcacccttatctggtgtgatgataccaaagaagcggccattgttgatcccggtggtgatgtcgaaacattaattgcagaaattgaacaacgtcaattaaagttgactaaagtgctattaactcatggtcactttgatcacgtagcaggaacagctcaaattgttgagcattttcatgtgcctgtttatgggccacataaagatgataacttccttattgaagatttagaacaacagtgtcgtatgtttaacttccccagtggaaaatcttttacgcctgatcaatggttaaatgaaggggatactgtcactattggtaaaaccattactttgtcggttttacattgtccgggccatacacctggccatattatttttgttaatcaccaaaataaacttatctcgatgggagatgtattatttcgtgaaagtattggtcgtactgatttccctcgtggtaatcatgccgatctgattgcctctatcaaaaataaagtattaccactaggtgatgattatctatttatccccggccatggccctatgtctaatttaggtcatgagcgtcaatataatcctttcttacaagatgaaatgcccatttggtaa

SEQ ID NO: 298638 - DNA, 708 bp, Proteus mirabilis; identical to SEQ ID NO: 298422

SEQ ID NO: 298639 - DNA, 636 bp, Proteus mirabilis; identical to SEQ ID NO: 296596

SEQ ID NO: 298640 - DNA, 432 bp, Proteus mirabilis
atggaaaatcggtgcagtatttggagtcggagtaattactcttttttctcacaaattatcgccttaagcgctatttgcatagagcgtggtagtgatgttggttttactttcattctatttagggttattagcgcaccagaagaactactgatcataaatgaattgctagatatgttagatattgacactgatccaccaccaaccccaaatagcacaggaaatccagttatcccaccatgggttatcttgatgccattcgacttgtctattgttatgttttcagatacgaatggtggaatgcttgatgaactcaaatctggtgctctcatcaaatcaccatctgttgaaactgcaaatgaaacatccattaaaaaagataaatctatagcaaattcattattcccaacagatacaattgtagggaagcactga

SEQ ID NO: 298641 - DNA, 231 bp, Proteus mirabilis
atgaacctcgcaaacctaactcaagaagaaaaagacaaagtgaatgtcgatttagccgcttctggtgtcgcatataaagaacgcctcaatatgccagttgttgcgtccgaagttgaacgacaacaaccggcacatttgagagcgtactttaatgaacgattagcgttttatcgtgagagaagtaagaagttaccggatggaaaatcggtgcagtatttggagtcggagtaa

SEQ ID NO: 298642 - DNA, 543 bp, Proteus mirabilis
gtggcacagcagcaagatgctgcacataaactctctgaacgggtactccatcatcccaaagtcaagcaagctaaaacaattgccttatttctctcttttgacggcgagattgatactactcccctaatcactcatttatgggatttaaataaacaggtttgtctgcccgtattacacccttttcatcgccatcatttactttttttacgttacgctcccaccacgcagttagtgaaaaatcgttttaatatttttgaaccgccactcaatgtgaataacattattccaatatctgatattgatattatctttacgccactggttgccttcgatgaaagcggtcaacgactcggtatgggcggaggtttttatgatagaacattagaaaattggcaacggcagtcattttatcctatgggacttgctcacacatgccaacaagttcattcgttaccgagcgcagattgggatataccgttacctgaaattattacacctgataaagtatggcgttttaatgaacaactgatacagagaaattaa

SEQ ID NO: 298643 - DNA, 309 bp, Proteus mirabilis; identical to SEQ ID NO: 298420

SEQ ID NO: 298644 - DNA, 123 bp, Proteus mirabilis
atgaatatccttgacgttgctatttttaaactatcttataagcaattaaataacctatgtgcactcaataaaagtatcatcttagctatttctctcagtaattttgctaatccttttaaataa

SEQ ID NO: 298645 - DNA, 201 bp, Proteus mirabilis
atgaaaaatgaaactaatattcgccttggcagacattgtgtattcctgatgcgcgtccatttggtctttgtcacaaaatacaggcgaaaaatatttgatcaggatgcaattgaaaaattgcgaggctactttgccagtgtttgtgctgattttgatgttgaactggttgaaatggatggggaacgggatcacgttcattga

SEQ ID NO: 298646 - DNA, 177 bp, Proteus mirabilis
atgaaagataaatattatgctggactagaaaactacaaagattgtattgagattgaaccgacaataaaggattgctttgttttaaataccccatcttggaatatggatgtgacaaaacaagacttaattgacatcagaaatactattaatgaaacactaggagatgataatgaataa

SEQ ID NO: 298647 - DNA, 318 bp, Proteus mirabilis
atgctattattttcattaattgatacactaagggggaatatttattttgataaaataacagccagtttttctataattgatgaaattatactatttaatcaaaacaatgaaaatatttctcttgttgatatcctgaatcaagtgaaacagaaaatagaagataaattattctatagcgatctcctttatggaaaggaaaagttaattgcattagcacaaaaaaatagcctagtagcagcaattttttatcgaatgatggttaatgaaatcaatgaaggttatactggaattagtaattttatttatgagaaattttaa

SEQ ID NO: 298648 - DNA, 210 bp, Proteus mirabilis
atgggggtgttactcagggaattagttacgcaacgagaattatttagaattggctggggagataaagaaaaatttataactaatagcgctttctatcaaaatattcttttattaagaaaagcatttaatgagctagatatcgatgatgagattgtcatcaccgttcctcgaaaagggtatatcattaatcacaatattagtattgaataa

SEQ ID NO: 298649 - DNA, 177 bp, Proteus mirabilis
atggataatagtgataagtttttttctaacgatatatgtcctaaaactgctttatatggacaattttatgggaatgatcaatacgcaggccgtgaacacgaaagaaaaatatactacggcagaaaatttcctaaaactaaaaaaggttattattttaaaaagctaatgaatttttaa

SEQ ID NO: 298650 - DNA, 2967 bp, Proteus mirabilis
atgccgcgtcgcttgatcctctcggccacggagcgggacaccctgctcgcgttgccagaaagccaggatgacctgatccgctactacaccttcaacgactccgacctgtcgctgatccgtcagcggcgcggcgacgccaaccgcctcggcttcgccgtgcaactctgcctgctgcgctaccccggctatgcgttgggcactgacagcgagctgcccgaaccggtcatcctgtgggtggccaagcaagtccagaccgatccggcgagttggacgaagtacggcgagcgcgatgtgacccgtcgcgagcacgcccaggaactgcgcacctaccttcaactggccccgttcggcctgtccgacttccgcgccctggtgcgcgagctgaccgaactggcccagcagaccgacaagggcttgctgctggccggccaggcgctggagagcctgcggcagaagcgacgcatcctgccggcgttgagcgtgatcgaccgggcttgctcggaggccattgcacgggccaatcggcgggtctaccgcgccctggttgaaccgctcacggactcgcatcgggccaagctggacgagctgttgaagctcaaggccggcagcagcatcacctggttgacctggctgcgccaggcaccgctgaaacccaactctcggcacatgcttgagcacatcgagcggctgaagacatttcagctggtggacttgcccgaagtcctgggccggcacatccaccagaaccgcctgctcaagctggcccgcgagggtgggcagatgacgcccaaagacctcggcaagttcgagccgcagcggcgctatgcgaccctggccgccgtggtgctggagagcactgcaaccgtgattgatgagctggtggatctgcacgaccgcatcctagtcaagctgttcagcggcgcgaagcacaagcatcagcagcagttccagaagcagggcaaggcgatcaacgacaaggtgcgcctgtactccaagatcggccaggcgctgctggaggccaaggaagccggcagcgacccctatgccgccatcgaggcggtgatcccctgggacgagttcaccgagagcgtcagcgaagccgagctgctggcccggccggagggcttcgaccacctgcacctggtcggcgagaacttcgccaccctgcgccgctacacgccggctctgctggaggtattggagctgcgcgccgccccggccgcgcagggcgtgctggcagccgtgcagacgctgcgcgagatgaacgccgacaacctgcgcaaggtgccggccgatgctcccaccgccttcatcaagccgcgctggaagccactggtgatcaccccggaaggcctcgaccggcgcttctacgaaatctgcgccctgtccgagctgaagaacgccctgcgctccggcgacatctgggtcaagggctcgcggcagttccgcgacttcgacgactacctgctgccggccgagaagttcgccgcgctcaagcgggaacaggccctgccgctggcgatcaacccgaacagcgaccagtatctggaagagcgcttgcagctgctggacgagcagttggccactgtcgcccgcctggccaaggacaacgagctgcccgatgccatcctcaccgagtccgggttgaagatcaccccgctggatgcggcggtgccggatcgggcgcaggcgctgatcgaccagaccagtcagttactgccgcgcatcaagatcaccgaactgctgatggacgtggacgactggacgggcttcagccgccacttcacccacctgaaggacggggccgaggccaaagaccggacgttgctgctgtccgcgatcctcggtgatgcgatcaacctcgggctgaccaagatggccgagtcgagccccggtctgacctacgccaagctgtcctggctgcaagcctggcacatccgcgacgagacctattcggcggccctggccgagctggtcaaccaccagtaccagcatgccttcgccgcccgctggggcgacggcaccacctcatcctccgatggccagcgtttccgggctggcggccggggcgagagcaccggacacgtcaacccgaagtacggcagtgagccgggacggctgttctacacccatatctccgaccagtacgcgccgttcagcacccgcgtggtgaatgtcggcgtgcgcgattccacctatgtgctcgacggcctgctgtaccacgagtccgacctgcggatcgaggagcactacaccgacacggccggcttcaccgatcacgtcttcgccctgatgcacctgctgggcttccgtttcgcgccgcgcatccgcgacctcggcaaaaccaagctgtacgtgccgcagggcgtgcagacctacccgacgctgcggccgctgatcggcggcaccctgaacatcaagcacgtccgcgcccattgggacgacatcctgcgcctggccagctcgatcaaacagggcaccgtcactgcctcgctgatgctgcgcaagctcggcagctatccgcgccagaacggcctggccgtggccctgcgcgagctgggccggatcgaacgcacgctgttcatcctagactggctgcaaagtgttgagctgcgccgccgcgtgcatgccggcctgaacaaaggtgaggcgcgcaactcgctggccagggcggtgttcttcaaccgccttggggaaatcagggatcggagcttcgagcagcagcgctaccgggccagcggcctcaacctggtgacggcggctatcgtgctgtggaacacggtgtacctggagcgcgccacccaggggttggtcgaggccggcaagccggtggacggcgagctgctgcaattcctgtcgccgctgggctgggagcacatcaacctcaccggcgattacgtctggcggcagagccgcagactggaagacgggaagtttcggcccctacggatgcccggaaaaccttag

SEQ ID NO: 298651 - DNA, 471 bp, Proteus mirabilis
atggacagcgaggagcctccgaacgttcgggtcgcctgctcgggtgatatcgacgaggttgtgcggctgatgcacgacgctgcggcgtggatgtccgccaagggaacgcccgcctgggacgtcgcgcggatcgaccggacattcgcggagaccttcgtcctgagatccgagctcctagtcgcgagttgcagcgacggcatcgtcggctgttgcaccttgtcggccgaggatcccgagttctggcccgacgccctcaagggggaggccgcatatctgcacaagctcgcggtgcgacggacacatgcgggccggggtgtcagctccgcgctgatcgaggcttgccgccatgccgcgcgaacgcaggggtgcgccaagctgcggctcgactgccacccgaacctgcgtggcctatacggggggctcgcagaattcggaaaaaatcgtacgctaaggttttccgggcatccgtag

SEQ ID NO: 298652 - DNA, 1059 bp, Proteus mirabilis
atggcggaaagtcaacaaccttacccatatacagaaatagttaacttaaaacaaaaagcacaatggattgaaacaagcctatctattgaaagactgcttccttatatgaggagcgctggttatgattacgaaaaagcatttcatcaatatctatataatgctagattatcaaaatctctgttgtttccattacatatattagaagtaactttacgaaatcgcatacagtgggtactaaaagaagcattcaatcgtgatgattggcatgaagatcctaactttattgatatgctcaaacccaaaagcaaagatagcctacaaaaagcaaagtcaaacgcaaaatcaaactctatcgacgatgtagtcgctagtagcacatttgagttttggacattcctacttcacgctgattacaataaattttggcgaactaatttctctaaatttagctatagtaacctatccctatctcgaggtgagttttttgctcttataaagaaaatcaatgattttaggaatcgaatcgctcattatgagccaattttagaccaaccttataatgcacgctatcaagatattttaaaggctataggttatatcaataatgaagttcaaatttgggtgaaatcacattcaaccgttgagttagttattgcatcgcaaccagcaccatctggacaacctaaacccctattaaaagataaagcggatatcgattttactattgtccaaagttcagatgccttattaccaattcctaaaagccgctttatctattgtgaagacaaagagctcatcgtagatctacgagaaattgctcaatacttcctttccgctgttgataaagataaaactcttatgatggatcttagtacattaactattggtgacatcgttactaatagaagaattaaaaagaatattgctatttttggtgattctgaaagttttcttcatgcaaagaaaatatttcaaagtaaaaaaataaaatatctagttgttacaaattcaaataatcttgttagaggaataatagaaaaacctcatcgacaaatataa

SEQ ID NO: 298653 - DNA, 366 bp, Proteus mirabilis
atgagtcacttcgaagtaacgccgaaatacagttcaattcgtatatctgtacccgctgaccttaaagatgtttttttgttagaatgtacacaaactggcttggatgctagtgaagtaatatgtttttcaaaagatgcaccaaatactttaagtgtattatttgaaagtatagctaaaagtgtgatagcaaaaaaaataatagggatattaaaaatgtttaatcaacaacgtaatatcagagttgaagtgtacacagataagaaaattatcgatttaaaaggttattcagaagaagaagcgcaacgcttacttgagaaatgtgatggtattcgtcttacccatcgtgaagatgaagacaataaataa

SEQ ID NO: 298654 - DNA, 585 bp, Proteus mirabilis
atgacacagacaccactttacgaaaataacacaccgaaagtcagccaaatcattacgttggcgttggacggtgaagccattttattaaaaaacctgaccgtcacaccctcgatgatgtatcaggacaaagaccaatcaggacagtcctcaagtaccgtcaatagtgagcagggcattaagcccaaagaactccgcattacgggcactattcctttcaccgaagaaaaaacgctaacccgtttatttgccttagctgaagccaaagaaaatggattactaaaacgctatcgtgtggccaaccgtatggccagcgcgattaattttcgtcttggcacattcaccaatgacattgatgcgtcaaagatggacggtaaacaagcctggcaagtcacctttactttacgtgagcatttatccgtacccgaaaaacgcgaaagtcgttcagcagggcaagttaaagccaaaacacaaaatatgagtaataagtcaaaagccaatggcgaaggaacggcagaacaagagcaggaattaagctggtttgaaaaaaatgtattgaagccagttaatgatgcgttgggagattaa

SEQ ID NO: 298655 - DNA, 1896 bp, Proteus mirabilis
atgtcacaatctattattacaacagcatttgagcgctggaaagcccaagagtcgattgatggaaacttgattgtgttagacgagttcgtctttgcacatatcccgaatctagagattgaaaaaccgattgaccgcaatgaaggcctgcccgatgcaaaatatatcgtgcatcgccaaaccgtgaataaaacgggcgtcgtcaatcaaaatgccgtggcctattcggtgacaatcggtgccgaaattggagattttgattttaactggattggactattaaataaaaaatccggtacggtagcgatgattgtgcatgcgcctactcaacgaaaaattaaaacccaagcagggcaacagggcaacgtgttaacccgctctttcttgctggagtatttaggagctagcaaagaaaccgccattaccacacctgcagaaatgtggcagattgattttactgcaagactttctggtatcgatgaaatgcaacgtctagttaataccgacagttacggtgaggcctctttttttggtgatgcgtttttagtagctaaaacagggaatcaatattttgtcacaaaaggtattggatacatcggtggtttacgggcggaattaatcacaaaccaaaatatcaccgtgcctgcggaaaataccaaagtttatgctgatgtgagttaccagggcaatattaccagtcgttggcaaacccacattaagctgaccgtcaaacctgatttaaaaaactatattgataatgcaggttttacgcattttgtgtttgcgatagcgtcgatttcagcggacggaaaaattaccgatttacgccctaaaggaacactggattttcagcaattagatgatgcgttaaagaaacatgctcagtctcgtaatcaccctgatgcaacattaacggccaaaggatttactcaactgacggataaaacgggcactagtcaggcattagccccaacacaaaaattagtgaccgatttacataataacgcaatggcatcagcaaaatcggctaacgacaatgccaatacgcgattaccttcaacaggaacggccgttgcctcacaaaagctggcgactccgcgcaaaatttcgggggtgccgtttgatggtacacaagatattaccttaaatgcgggaaatgtgggggcagctacccccgcacaagttaatgaagccaaaacgatggccaccaatgcccaaaagaccgccaatgatggtgtgagcaaagccaataatgctaataacaatgctaatggtcgtgtgcctaatactcgtaaagtgaatggtaagcagttgaatgcggatattaccttaaacgcgggcgatgtgggcgcatcgacccccgcacaagtcaatgaagccaaaaccatggcgaccaatgcgcaaaatacggcaaacagtgcggtgactaaagccgataatgctcaaaaaacggcaaatgatggtgtaaataaagccaataccgcccaaaccaccgccaataatgcgaataataatgccaacggtcgcgtgcccaatacccgtaaagtgaatggtaaacagctaaatgcggatatcactttaaacgcaggcgatgtgggtgcgctgggaagtaatcaggcgctcggttttggtcaggactatcaagatgtcacttctagtcgtgaaattaataaagattataaaaatgatacgaatagaccaatcgcaatttcaattacggggcgttcaaatggtactcatcactcctattttaaagtgaatggcagggttgctggagtgtttggcggaagtgatactgttgctattgatagaaacttttttgcgattgttcctccgggcaaaatttatagaatggaaagcagtaaattctcatttgtctattggggagagttgcgatga

SEQ ID NO: 298656 - DNA, 558 bp, Proteus mirabilis
atgcctgatttcaaggaacgattaaaaggcttaaatttgccgtcatggatgaacaaaggcgaacccgcaaaactgttaaatgcggtccgtaaattttggtcaggtgtttatgactggatgttatggccactcaaacaattggacgcagaaacctgctcagaagaattgttatcagtgctggcctatcagcgcgatattcaccgttttaaaggggagccattagatttatttcgcaagcgggtaaaatttgcctttattaatgcccgtgatgcggggtcggtcagtggttttattgctatttttgagcgcttaggcgtgggctatgtcgagttgttagagcgtcagccggatattgactgggatgtcattattttacgggtcagtgacggacaaatcgcaggcaaccccgatttgttgatgggcattattcgccagtatgggcgcacgtgtcgccgttatcgttttgaagtgatcaccaataatcaattagtgatgcggtttggctgggctgattgcgaatatcagacctttggcgcatcactgttacaaggagagtaa

SEQ ID NO: 298657 - DNA, 699 bp, Proteus mirabilis
atgagcattcaagggcaattaaacgaaaaacaattaaaaaagctacgagaacagcttaaaaagttggaattaccgccgaaaaaacgccagcggttactttggcgaattgcgaaatatggtgtgattgttgcttcaaaacgcgcggtaaaaaatcagcagacacctgatggtgaggcatggcaagggcgacacggtaactacaaaaaaaagatgctccgtaaaatgcctaagctattaaaaattcgtgaaattcccgaaaaaggcgtagtccgtatttatctcgggggcggaaattatcgcaatggcagtaaacctgtgggtgctggtgtcgtgggatatagccagcaatatggtatgacagcaaaaattagtcgtaaaaatgccaacgataataatatccgaaaagcaacgagtgagaagaagccagaacctaccgcaacaccgaaacaagccaaaaaattacgggcattgggctataaagtcaaaaaagggaagcgttgggtaaagcctcctttaaaagagattgcgggaaagatgcgtttttttcaggcggggttattaattcgtcttttacaaaataaacctaaaaaaaccagttgggaggtagatatccccagtcgtgagtttttaggcatcagtgatgaagattttatcaaagcgttagagagacaacttcaaggcatcggctacggtgcataa

SEQ ID NO: 298658 - DNA, 657 bp, Proteus mirabilis
atgaagaaaatagaaatcacagtcgaattgcttaatgatatttgtgaaaaatattcaagagcgttatttgagtggcaaaagaattggaagaataatcaatttcatcgaaatagaatattgcataaagggcgacaggttggtgctgattggtatttttcattggaagcgttacatgatgcgatgttgacaggaagaaacaaattatttttaggtgaaatgagtgagtgcgcgttaggttacttttgtgggcatttaaatattaaacataatgaagagggcttttttgagttaagtaacggtgctcaaatttcatttattagagagctagaaacaacttttagtgagcgatttggcgatgtctatatttcagaatgggcatggctagaatcgccaaaagaatgggtagatattgcgttaaatataacgttacatgaccgctggagaaggactttttactcatcacgtagtgaacaagataatagcggggatttaaaatacacccactttgatggtgacaaagtgaatggtgagtccactttttttgaccgtgttaacggttgggatgttcccgaaattattaatgtaaataatatgattggtcattttgagtgtcatgatagatggggggaagagatactttgtaagttaaattattaa

SEQ ID NO: 298659 - DNA, 147 bp, Proteus mirabilis
atgctgagcacagtttgtcacaaatacaccaaactacatggtcggttttgtgatgcgcttccgcgtgctggcgaactgtccgttaagctggtggctatagagatttttgaaactgaaatgaattacaaatatattggggaaaattag

SEQ ID NO: 298660 - DNA, 2331 bp, Proteus mirabilis
atgactcctcttactattggtcttatcggtaatcctaatgcgggtaaaacaacgctttttaatcagttaacaggctctcgtcaacgtgtcggtaactgggcgggtgttactgttgaacgtaaggtaggtcgctttacaaccaaaaatcataaaattgaattagttgacttaccgggcacttattctttaacaacaatttcagaacagacctctctggatgagcaaattgcttgtcacttcatcttaagtaatgaagcggatatgttgattaacgttgtagatgcttccaatcttgaacgtaatctttatctcacattacaactgcttgaactcggtattccctgtatcgtggcactaaatatgcttgatattgctgaacaccaaaatatgcaaattgatattcaagcgctttctgaacaactcggttgtccagtgatccctatggtatcaaccaaggcatcagggattgataaactgaaagacactattgatagctttcctgctaccaaaagaaaacccgaagagttactaacttcttatccaatatggttattaaacgaagttgaatctttagctgaaaaaattaatcacgatgaattcaatttacagcaacgccgttggatggcattacaatgtttagaaggggatatctatactcatcaacgtgctgaaattacctcacaagagataaaagccattcgtcagcgcattcaaactgagcatagtaatgagccagaattagtgattgccgatgcacgttatcaaaacattgagcgtatttgccatgcagtcattaatatggagtccattaagcccaatcagctcacacaaaatatcgataaagtgatattaaatcgctggttaggtgttcctatcttcttgtttgtcatgtatttaatgtttgtgcttgccatcaatattggtggagcattgcagcccgcgtttgaaggtggctctgaagctatctttatacatgggatccaatggctaggtgcaacattcaatttccctgaatggttaactattttccttgctcaaggtgttggtggtggtattaatactgtactccctctggtaccacaaatcggcatgatgtatctctttttatctatccttgaagactctggctatatggcacgtgctgctttcgtgatggatagattaatgcaagcgctaggattgcccggtaaatcctttgtaccgctgattgttggatttggttgtaacgtcccatccattatgggggcacgtactctagacgccccaagagagcgattaattactatcttaatggctccctttatgtcttgtggcgcacgtttagccatatttgctgtttttgctgccgcattctttggtaaaaatggcgccagcgtggttttttcactttatttattagggatcattgttgctattttgacgggtttactactcaaacataccattatgcgaggtgaagcttctccttttgtcatggagttgccggtttatcacgttccccatatcaaaaccttattaatacaaacttggcaacgtttaaaaggctttgttatccgcgcgggtaaagtgattatcatcgccagtatgtttattggtgcattaaatagcttcactttttccggtaaagcggctgatagtattaatgattctgccctcgcttccgtcagtaaagtgatcactccgttattgcaacctattggtgtgcataacgataactggcaagctaccgttggtttagtcactggggcaatggcaaaagaagtggttgtgggaacattaaatacactgtacaccgcagaaagtattgttaatgaacctttcgttcctgaagagtttgatctatggggcgaaattggtgacgcctttgctgaaacttgggatagcttaaaagaaacctttacattcgccgcactttccaatcctattgaggcaagtaaaggtgatggtgaaatggatacggggactatgggtaccatgggcagcaaatttggtagtgcaatagcggcctatagctacttaattttcgttctactatatgtgccttgtgtctccgtaatgggggctattgctcgtgaaaccagtcgtggttggatgacattctctattctttggggattaaatattgcttactcacttgccgcgttattctaccaaacagcgacatttagcgaacatccacaaagtagtaccatcaccattgctgctgtattgatatttaacttaattgtctttgtactattacgtaaatctcgtcatcgtctcagttttaatttaagtaacaaacgctcattagcgaaacagtgctgtggtaaacaaggtagctgtcactaa

SEQ ID NO: 298661 - DNA, 948 bp, Proteus mirabilis
gtgaatattaaattacctacatttattgagctttatcgacaattaattgcaacaccctcaattagtgcaacagatgctaagacagaccaaagtaacgaggcactgattaatctgttggctaattggttggaaactctcggtttttcaattgaaatacaaccagtacctgaaaccagagggaaatttaacctacttgctacccttggcagtggaaccggcgggttattactctgtggacatacggatacggtgccatttgatgaagggcgttggactcaagatccctttaccctaacggaaaaagaaggcaagttatatggtttaggtacggcagatatgaaaggcttttttgcctttattattgatgcattgcgagatatagatacctctcaactcacacatcctctgtatattcttgctacagcagatgaagaaacgtcgatggctggtgcacgttattttgccgctaataccgctattcgtcctgattttgctattattggcgaacccacctcattacaaccaatacgtgctcacaaagggcatttatctaatgctatccgtattactgggcaatccggtcactctagtgatccggaaaaaggtgtcaacgctattgagttaatgcatgaatctatcacccatctcagtacactgcgcgatagattaaaaacccgttataacaatccggcgtttgttattccctatcccaccatgaactttggttatattaacggtggtgatgctgctaatagaatttgtgcttgctgtgaattacatatggatattcgcccattaccgggattaacgctgcaagatcttgatgatctgctgcacgaaacattagccccagtaaaagcgcgctggccgggacgtttagtgtcgaagcattgcacgagcctattcccggctacgagtgtccgaccgatcataaaatggttgccgtga

SEQ ID NO: 298662 - DNA, 228 bp, Proteus mirabilis
atggttgccgtgattgaaaaactactgggtgagaaagcgcaaactgttaattactgtaccgaagcaccttttattcaagcgctatgccctacgctagtgcttggtcctggctccattgaacaagcccaccagcctgatgagtttattgatatggcttttattgagccaactcgtgaattaatggggcaattaattgaaaacttttgtttagcagagaaagcgaaataa

SEQ ID NO: 298663 - DNA, 144 bp, Proteus mirabilis
atgccagctttatctatttttgtacatggcttaccatcaggcaagccatgcacctatacaggggtgaattctgttatcccttaccctataaacaattacattttaaaacgatatgtcgttgtcatagagcctgataatgagtga

SEQ ID NO: 298664 - DNA, 3729 bp, Proteus mirabilis
gtgataaaaaaaatattagatattctccctatttttgggaaaaaagacgtcgatattactgaacaatatcttcaaggctctcttgtcctactggctatatttgatgaaagtttacctaagcgtgcattagattatgtacttacaggtacaaaccctgaaattctatttgaattaaataaactagatgcagcgaaagccgccgtttattttcatcgtgcgggaacattagagtggtggtatgccagtaatgttgatacaggaaagtacggtaaggttatcacccaaggccttaatgcccgccataaactctactcaaaggttggtgaaagtttttccttagagcaagtggcccgttttgccaaagtcatcgctgccgcatgtcaagatatcaatattaaagtaacaacaacgcaagtccccacttgggttatctacctgttagttgatgcgttttataccacttacgataatgcacgtaaccttaatttagaacatcgtaaacattggagtatggagtttatcgccaatatggtcgaagcagaggccaatattgccggtgaaaatgcgttatttgcaatttttgatagaaaagatgtctctgaatattatgccgctaatcttaagcgtatttatgaactgtgtgatttaaaagactatctactttcacatcaagaatttgttagaaaagaattagttgaaaaactttcagcgaatggcttagtcgagctaataaattatctaaataaaaatacgatattacgcgatacttttgcagatattattgttttacttgccactagcagtttaagaaccgtcaaaaaaacggctgaacctattttaaataccttacctgctgaaatcgtaaaagaaaatttaacccatgttttaatgaatggtactcccaaacaacgtacacaagccgctgatttattcgcgcgccaaggtgaaaaccgtgatgtgctggcagaagcattaaaacatgaaacctcaaaagcagttatcaagagcattgaaagtgcgctacaacgtttttgtgttgctgataatgcaaataccgttgaagccattaaagcgcctgattttactcccttagaagacacaccattacccgatagtgcccgcgatattctggtcaataacttcaatgaaatgttagtaaaagcaaaagaaaatgctgaacgtgaaattgaagaaaataaaacgtctaaacactcttataattgggcacaacgccattataaagatctctctaaaattgatgaaaaacagtgtcgcgcattagtggataaactcaatagcggacaaggcactattcaagtcaatgagatccaaataattaaacacaaaaaccgtattcctaatttacctgaatacacctttttccatgccgtgcgcgtgatcaccaataaccgccaacatgcggatcacttttcctctcactattttaatagtgatattcctgaacgtttattgagtgatattgaattacgacacgttgaaaatgtattagaacgatgtcatttcaaacgtgcaacgcgtatcacagcggcgctgtgcttagaatcttatcaagatggcttacgtcgtttccgtaaaccagaacaagtttggcctttcttctctcaacatactgattatattgcagaagcgctaaacttaatgccaaatcaaagtgaacaccgctatcgccaatttgaaacttcacaaggtattgaagtattaagccgttttccaaccattcctgcacaattcgttccgcgtatcatggaattggctctaggtgaaaataaaacacaccgagtttcagctcagaaattattagaaaccttaccgaatattcacttaagtgcacaagaaggcttaacttcaagtaaacaagaaattcgagtcaccgcgattgaatggttagcacgtttaaataaccctgactcattacctgcccttaatgccttactgaaaaaagagaaacgcgaagtagtacgagccgctctgctcactgcgttagaacaattaggtgaggatatttcaagctatttatcgccaaagacattattagcagaagctgaaaaaggtctcaaagccaaaccacccgcaagccttgcttggtttaacttcgaggcgatccctgcattaacatgggaaaacaaaaaagcggttgatcccgcgattattcgttggtggattattctcgccgtcaaattaaaaatgccagggggtaatgcgttattacaacgttatatcagcctactttgcgttgatagccaacataaactttcaagctttatcctgcacacttttgtcgctcaagatattaaaggaccaacacttgaagaagcgatggctgaagcgcaacaaaatgccccttctcgattaacacaatacaaagattgggccaaacgttatcctgaatattatgctaaatatgaaacctatactttagagcaagtcgtcgaagaaattaaaaacgaggtactacgtcgttatttaggttcggcaatcagcgataaaggaatgctcgcgcttatttgtggaattgaggggcatattgcagtatcagtattacgtaactatatgcgtgatcactatcagcgtcgtgcgcaaatcgaagcgatgattgatgcggtagcttcaagtaatgatcctattatcattcaacttctgctttcattatcacgtcgttatcgcacagcatctgtgcaggaaaaagcgcgtaatttagttacgcaaatagctgaacgcaatggttggagtgctgatgaattagccgatagaaccattccaaccgccggctttgatgattcaggaacattagtactggaatatggtgagcgtactttcaccgccaaaatggatgcaaaacaaaaaattgtcctgtttaatcctgaaggtaaggaagttaagtcattacctgcagcacgcaaaaatgacgatccagagctgattaaagaagcgaaaaaacttttcacttcaagtaaaaaagaacttaaacaagttattgaattacaaagtgtgcgtttatatgaagcgatgtgcgcgcaacgccaatggctaagcgctgattggcaagagtatattttagctcaccctattatgcataaattgattgaacaattagtttggcaagaagtaaaagagggtgaagttatcaataccttccgcccttctgatgatggtgctttacttaaccttgaagatgacgaagtcaccttacaaaatgattctttgattcaattagctcacgccgccctagttaatgaagatgagcgtaaagcatggattgcacacttcaaagattacaaagtgaaattcttattttcacaaatggaacataagatccctgatttagatctgacacaaacagaagttgaagaccgaaaaggttggatcacagacaccttcaccttacggggtattttaaccaaaatgggctatcagcgaggccctgctgaagatggaggctcgttctctcactattacaaattcttctctagcttaaactactacgtcaatatcggttttagtggtagctatgtaccagaagaaaatattccagcggttttattcgatttaagttttgagaaggatcagcaaaattactgggatcgcaataatattgagttaaagcaagtaccaccgattttattagcagaaagctacgcggattatctaaaagtcgctgaagcttgtgcaggatttgatcctgaatgggaaaagaaaacaccttggtaa

SEQ ID NO: 298665 - DNA, 2076 bp, Proteus mirabilis
atgagttggcagaccgtttattttcattatgatgaagatgcgcttaccgtctttgctaatgccggattattaagacgcgcaagaaaagatgttgataacgaaaaagtctctgttactgatgcaaatacagggcaatttagcagtgatgggcaaaaagtcgttttacatgaagcaggcattcagcaagccagttgtgattgttccgcagcaggttgttgcaaacatattttagccgctattttatggttacaagccaacaacaattcgactgatgatattaatactgataatcccattgaaacatcagcagaaaaaattatagcgcctgttgaaacaccgcctttattaccctctttatttacgcttgatcccgagttactcatcaaaaaagcaggtaaacccgcctgtcggactgcgattaacttaattgaacaatgggaagataaaactttagttctagaagacacaggaacccagctaaaaatccaactccctgatgttgatgaaccggtcattttcttacaagcaagtggttacgatggcatgttatcccctttttctagctctcagaaaaaagcttttcatcttgctattgtcgcgaaaatatttgagcaaaatacacagccttggacgtggcctgaagatttaattcccttaaaatcttcacaacgcccactaaatgatgaagaaattgcccttattaatactattgaacaatttattgatgatctattacgtcaagggctatcacacattagtttaagtagcgcaacgcaattacatttacttaatatgtctgctcgtgccgagggtttacctcgtttagcctcttatttacgaacattaagtactcaagtcaagcggttagcagaaagacatttcactatggatgaaagcaatgtcttacgtctattagctcatatctcagcctatcttttccagctatcttatgcgacacctgaacaattaaaaacattacgaggacaacttcgccgtcaatatgatgataaaaaaaccagtctcgcgcttattcctattgatgcacattggtggacagcacaaagtggcgcattaggcacaacttttactttctgggataaagaagcaaaacaatttttacaagcgacacaagctcgccctaatcaacttgataccctatttaatcgctatagtgtttggcatagtttatcgttatggaaacaaactgcagataagctcatgcgccgacctttcttattacaagcgcctcgtatttctgatgaagggaaactagctactattggcgatagctttgcgcaaaatcaaaccgattttcttgatgtcacagattatcatcaactacaaacagaattaggtattcataactggcaagatttacccaattattttacggatcaaccagaaggatttctttcccctctggttttacatatcaaaagctataatcccttaatttggcatgaagtagagcagtgtgttatttgggaagtggtagataataatggaaattcggcctttttgcgcctttattgggaaggcgaaacgcaaaataatttagaagaattacgttttctcactaaacgagaattagaaatcgttgcgatcaccgtgcaacctgttcgacgtgatttcaatatcgatttattacccaccaccatttggatcaaaacagagcaaggcattgaaatgttttatctcgattttgaccaatttccacgtaagaaaaaacagtctggttttattagtcatattcaagaatatatggctaaacgtaagcgacaaacggcaatgcatcacagtgaacctacccttgcacaaaaattttgtcgccccattttatccgtattggaagcccaagcatgtacagggcgagaacaactttctgcaatgcaaaaagagcaattagagagaagcaaacaaattgctgacgatttaggtatgacattaatagctaaccaattaactcgttatctcgctttaactgctcgtgactctcaagctttattacagttaatttggctatgtgataatctgcaacaattacaaagcccgctacccattcaacttaatgaataa

SEQ ID NO: 298666 - DNA, 321 bp, Proteus mirabilis
atggccttgggacattttttaaatgggcttatcttttatcgtcgtggtaaagatgaaaaatatcctactccagaagtcgaaaaacggataaccaacaatattattttaaagaaattacgtgttgcctttgaattaaaagacatggatatgattaacatttatgaactagcggattttcgcgtttctaagcctgaacttagcgcgatatttcgtaagccaggacataaaaactaccgtaactgtggcgatcaactggtgagatattttctgaaaggattaactgaaaccttacgtggcaaaggtaaagcggtgaagaaataa

SEQ ID NO: 298667 - DNA, 2838 bp, Proteus mirabilis
atgccgatagtgtattcgccattgccttcagaacagattaaagagatgcttgatgttgttggcatctcctcattaaatgaattaacacaaaagattgttcccgataatatccaattagcaacgccgcctaatgtcggagggggggctactgaacaagaggcattagcagaactaaaagcgatagcccgtaaaaataaacgttttacctcttatatcggtatgggatatgcgccttctgtattgcctcctgttattttacgtaatttgctagaaaatccaggttggtataccgcttatactccttatcagccagaagtttctcaagggcgtcttgaatcattacttaactttcaacaagtaactattgattataccggcatggatttagcctctgcttcgctattagatgaagctactgctgccgctgaagctatggcaatggcaaaacgtgttagtaaactaaaaaatgcggagcgtttttttgtcgctgatgatattcatccccaaacactagacgtagtaaaaacccgagctaacacctttggttttgaagtgattgtcgataaagctgaaaaagtgttagagctagaaggtgtctttggagtgctattacagcaagtcggcacaaccggtgaaattcatgattatagtcagctcattagtgaactaaaaacgcgaaaaattattaccagtgtagcggctgatctaatggcactggtgttattaacggctccagggcagcaaggagcggatattgtattaggctcagcccaacgctttggggtgccaatgggatatggtggtccacatgctgctttctttgcctgtcgagatgaatataaacgagccatgccaggacgtattatcggtgtctcgcgtgatgctgcaggtaacagagcgttacgtatggcaatgcaaactcgtgaacagcatattcgccgtgaaaaagctaactcgaatatttgtacttcacaggtattactggccaatattgctgccatgtatgcggtatatcatgggcctgaaggtctaaaaaatattgctcagcgtattcatcgcttaacggatattttagccgcgggtttaattcaaaatggcatgacattacgccatcagacatggtttgatactttaaccgttgaaacagcggataaagcgggtgtattacaacgtgctaaagatgctgaaattaacttacgaaccgatattgttggcgcagtaggtgtcactttaagtgaagtgacgactcgcgaagatgttgtcagattgattgagattatcagtggtaaagctttctctgatgacattgatacattagatgcattggtagcttcttcatcgacctcaattccaacggcaatgttgcgtaaagatgcggtgttaacccatgaaaacttccatctttatcacagtgaaactgaaatgatgcgctatatgcatcgtttagaaaataaagatttagcgcttaaccaagcaatgatcccgttaggctcatgtactatgaagcttaatgctgcggctgaaatgctgccgatcacatggcctgaatttaccgaaatgcacccattctgcccaccttatcaagcgcaaggctaccagataatgattgagcagctatctaattggttggctgccataacgggttatgatgcgatgtgtatgcaacctaactcaggggcgcaaggggagtatgctggattgttagctattcgtcgttaccatcaaagccgaggagaaggaaatcgccatatctgtttaattccaagctcagcccatggtacaaaccctgcatcagcccatatggcgggtatgacggtggttgttgtggggtgtgatgaaaatggtaatatcgacattgcagacttaaaagcgaaagcagagaagcaccaagctgagctttcttgtgtgatggtgacttatccttcaactcacggtgtttatgaagagggtatacgtgaagtttgtgagatcattcatcaatatggcggacaggtttatcttgatggcgctaatatgaatgcgcaagtggggatcacgaccccaggctttatcggctctgatgtatcacacttaaacttacataaaactttctgtatcccccatggcggtggtggcccaggtatgggacctattggcgtaaaagcacatttagcgccatttgtacctggacatagtgtcgtggaaatggacggtgttacgacccaaggtgccgtgtcagcagcacaatttggtagtgcctcaatattacccattagctggatgtacatccgtatgatgggctcagaagggcttaaacaagcgagccaagtagcgattttaaatgctaactatattgctcaacgcttaaaagatgactatgacatcctctattctggggcggaaggttacgttgcccatgaatgtattattgatattcgtccactcaaagctaactatggtatcagtgaaatggatgtggcgaagcgtctaattgattatggctttcatgcgccaaccatgtcattccctgttgcggggacattaatgattgagccaacagaatctgaaagcaaagttgaaattgaccgctttattgatgcgttactctcgattcgtgctgaaattgcacaagtcgatgacggggtatggccgattgatgataatccgctagtgaatgcaccacatacacagtatgaattagtgcaagaatggtcacatagctatagccgtgaatgtgcggtattcccaagtgaagcaacgaaacgcaataaatattggccggcagtaaaacgccttgatgatgtttatggtgatcgtcatttgcattgttcttgtgcgccaataagtgattatgaataa

SEQ ID NO: 298668 - DNA, 603 bp, Proteus mirabilis
atgacacaacaaactaatggggcttttggccccttttcagataccatcaattttattattgaactcgataaactcaaacgcgtttaccgcaaaaataatgtattagacaatagccgtgctgaaaataccgctgagcatagttggcactttgctgttgcagcaatgagttttcaaccttatgccggtgatattgatataggtagagcgatccagctagctttagtgcatgatattgtcgaaatcgatgctggtgatgtgatggtttatgatgttgccgctcgtgaagcgattaaagagcaagagcaaaaagcagccagacgtattttttcgttgttacctgcaccacaaagtgaatattttcttaatctctggcttgaatatgatgcagcacaaacccctgagtcacaatttgccaatattttagatcgcgcaatgccaatgttaatgaatctacataacgaagggcaaagctgggttgaaaataatatccgtttagaacaagtgattgcacgaaatctatttatcgaaaaacagtggccagaattttggcaatacctctatcctcaattactagaggcacagaaaaaaggctggttaaaataa

SEQ ID NO: 298669 - DNA, 987 bp, Proteus mirabilis
atgactcaaaattctactcagacaaaacgccctcatgccgcaatcaatttaccactcaccttgatctctttagatgattggtcattgataactgcaacaggggctgatagtgaaaaatacttacaaggccaactaacagcggatattgccgcattaccgactacagagcacactttagccgctcattgtgaagctaaagggaaaatgtggagtacattgcgcattttccatcaacaagcaggatttgcttatatattgcggaaaaatgttgctgaaaaacaacttactgagcttaaaaaatacgccgtattttcaaaagtgacttttactgaaaatacagatgcggtgttattaggacttgcggggcaaggcgcggcacaagccttagcggaattcttccctgagatcccccgtaaagccaatgaagtggttaatcaccaaaatagctacttactgcaactcccgttacctacagagcgctttttaattgttacagatgaagagactgccaaaaaactagccacgacattgcccgcagaaaccagtgatagtgaccagtggttagcccttgatatcgaggcgggttatcccattattgatacccctaatatcgaacaattcttaccacaagcgactaacttacaagcattaccattaagtatttgctttaaaaaaggttgctatacaggtcaagaaatggtgtctcgtgccaaattcagaggcgcaaataaacgtgctatgtatctgttatcaggtggcgcagcacaattgcccgacattggcggtagcgttgagtggcaattaggtgaagataaatggcgcaaaacaggcacggtattaagtgcggttcgtatggccgataacacgattatcgccgaagtggtgatgaataatgatatggatgctgacagcgtatttcgtgtccaaggtgataccaccagccgcttaacgattaaacctttgccttactctttagaagatgagtga

SEQ ID NO: 298670 - DNA, 984 bp, Proteus mirabilis
atgacaattaagaaacttgaagatggtcgatatgaagtggacattagaccgactggacgtaatggaaaacggatcagacggaaatttaataaaaaacatgaagccattgcctttgaacgttatgtaatggccaatcacagcaaaaaagaatgggggacaaaattaaaagacattcgcccattagatgaactcgttgagctatggtggaacatgttcggtaaacacagcgagaacggaaaatctaactacaacaatgcaatgcgtgtctgcaagggtatgcatagtagcaatgtatctcaagttacatcaaaaagtatctcattttatcaaaatgagcgttttgctaaggggataaaaccctccactattaatcgagaactgtatgctatacgaggtatattctctcaattaattaaaatgggattatatgaggctgaaaatccctttattgaggccaagaaattaaaaataaatgcgagtgagatgtcttacttaacccttgatgaaacccgaaaactactcgctaatctggaaggtgattattataacattgccgtattttgtttaagtacgggggctagatggggcgaagcaatgaaactgaaacgagagcatatcattgaaaacaaagtgcgttttacttacactaaaacaagaaaagcgcgcattgtccctatatcgaaagaactctgcgatcaaatatgcaaaggaaaaaaagacctcctattttcctccgtttcatatcaagtatttagaaaaatactaaaaagtgtaaaaccttctttgcccgacggacaagctacacatgtgttgcgtcatactttcgctacgcatttcatgatcaacggcggtagcatcatcacattacaaagaattctagggcatgccagtttaaaacaaacgatgacctatgctcattttgcacccgatttcttacaagatgcgattgtaaacaatccattaaaaggaggtctcagtttatag

SEQ ID NO: 298671 - DNA, 300 bp, Proteus mirabilis
atgtcaagttcgaaaaatgaaaaactaaaactaataagagaatcagaaagattaaaactaaaggaaatgtctgatttaacagggattaattaccatacatatcatggatatgaatcagggaaaatgaatatgtctttagaagcagcaacaaaactattttcaattccaagatttagaaaatatatgacttggtttatgtttgatgaagtcaatcctgatgctgggcaaatcgcaccggcactcgcacacagtgggcaagacaacacgcaatcatcccactcagacaagaaaattggataa

SEQ ID NO: 298672 - DNA, 276 bp, Proteus mirabilis
atgtcgaaagaaatcgaaattcataatagtggttcagaatttgtcactgagacaaaatttgccggctatatcggtaaaacacccaaagctgtgtctgatatgcgtaaggatgggaaattgccttatgtagaagttaagcacccagataattcccgcggtgagtattacatcgatgtaaccgattggaataaaggcttgcgtatggcacgtaaaagaatgcctaaagaattacgtgacggctggctgatatggttaggaatgggtgaaccacaataa

SEQ ID NO: 298673 - DNA, 156 bp, Proteus mirabilis
atgtatcgtggtttcaccattattaaactgccaagaaaagcggtaacaccgataactcgttatcacgtttggttagatgatcagtcattcggtaagtttgatgcaatggcagaagcaacgcattatatcgacttattaaaaggtgatattcaatga

SEQ ID NO: 298674 - DNA, 2451 bp, Proteus mirabilis
atggattttgatttatctttagttaaaattgctaaaccttcttacgatatggataaaattttaacggcaataaatagtggtaaggcaatcctgtttacaggtgctggtttttcatttggagctgagacgattgaagggaaagaaccactaggagcaaaacatctttcgcgaacattgtgtgaatatctaggaattaagcctaatgataacctaatgtttacttctgactattttacatcaaaaaaaactaaagcagaacttattggattattaaaaaagaattattctttaagaagtatatctgaggtgcataaaacgatttgtagtttaccatggcgacgtttctatactacgaactatgatttatcaattgaattagcatcttcacaaattaataaaatgattgaaactgtagatttatcgcattctgtaagtgaatattatcaaagaagtaatttttgcttacatctcaatggttcaattaatagtttaaccgaagattctcttgaaacgtcttttaaacttacttcttcttcttatatttccccagaatcttttattaattcagattggttctatccatttaaacgtgatttagacagagcgagtgttattgtttttgtgggatattcaatgtatgacattgatattcaaaaaattatgttcaatgatgaacatctgatagcaaaaacttattttatcacttcgcctgaaccagatatggaattagaattcacactatctaagtttggtactattgttcctattggtacggatgggtttgctacagcgattagtaattttttaattcataatcctatagagaatgaagagcattctctagaatcgttaaggctttatgagttaaaaaatatacacttgaataataatatgaaagatcaacaaattgaaactatgctgatgtatggagatatcagcgatgattcattagattctttcatgcttggtcatatggatattccatttttaattcccagaagtcaaattgaagatatttataaaattttaaataaaaataaaaatgttatcatttgtagtgccttgggtaatggtaaatcacttttacttaaacaattgagatgtaatctaacttctaatggttttaatgtttatgaagttgacgatttagatggtgattttattggtgatatagattatctgattaagcaatcgggtaaaaattttttattgattgatgattatgaactgtatattgatgtcattaagcatatatcagcaattaagtctaaaaacattcaagttatagcaacagctagaattgcagatcatgaattttaccgtgaccgattattagaatggggatttgattttgctgaaattagcattgatttattagatgaaaatgagcgagataactttatagatattattgataacttaggactttggggagaaaaagctggatatagtcatagtcaaaagagtcgttatttgcaacataaaaatgataatcaaatatctacagctttactatcattattagattcacctaatataaaaaacaaaataactgaattaatttctgcatttaaaaataataaggattatgaaattactttgttttctatctgtttgtgtagaattattggtattaatgcgaaccgcgctattatttcagatatggcagataataatgctatatatgatccatcatttacttcaatgaaagagtttagacaaatttttatgctatcaaatggcgaggttctaaaaggttcaagtttattttgtatcttcttaattaaagagcacttttcggcttcttatattacagctggtttattagctattgcgagtaaatttgataagatttctgatcgtgatgcaatacaaacacaaatatttaaatcaatgcttaaattttcttttgtagaacgtattcttccaaaaactacaaaggtaggtaatctaaaccgctattattctgatcttaaaattgaagttagatggctaactcgagatcctcatttttggttacaatatgctatgtctcttatagctttcaaaagctttcctaaagcacaaatgtttttagaacaagcatatgcacttgctgaacataaaaaagattactacacagataatatagatactcaacaagcacgtctatggctgatggagtgtgataacattacagatggtaacattgtttatgataagttttcacgagcacataaactattaggttatttaaagaatgatattttcaagtttagacaactttcccgatatggtgagttttatgaaaataattttcataaaatgtctaaaaaaaatcagaacttatttttagatagttgtagaaataccctaatttcaattgaaaagactgatgaagatctaaattctaattctcaacaattagaacgtactaaacgtattctgaattcaattattaacaaggattag

SEQ ID NO: 298675 - DNA, 1029 bp, Proteus mirabilis
atgagccgtaaaaataaaaaaagttttaaagcacaacaaacggcaaccgccaataacagcatggaagcctttacctttggtgatcccgttccggtattagataaacgagaaatttttgattatctggagtgtgcacaaattgataattggtatgagccaccgattagctttgatggattatcaaaactgtttcgtgcagcgactcatcatagcagtgcaatttatgtcaaacgtaatatcttagtgagtacgttccagcctaaccgttttctctctaagttagactttagccgatttgctctcgacttcttaacctttggcaatgcctaccttgaacgtcgtaataatatggtgggtaacttattaaaactcacccccgttctcgccaaatatacccgccgtggtgttgctgatgatagctattggtttgtgcgctatggctatgactcaaagccgtatgaatttaaacctggtagcgtatttcagttatatgaacccgatttaaatcaagagttgtacggcttaccagaatatctggcctccacgatgtcagtgctactgaatgaagctgcaaccttgtttcgtgttaaatattatcgcaacggaagccatgccggatttattttatacgtcagtgacgcctcacaaaaccaaagcgacattgataaaatccgtaacgcaatgcaaaactcaaaaggccccggcaatttccgcaacctgtttatccacgcgccgaacggcaaaaaagacggtgtgcaagttattccattaagcgaaattgcggcaaaagatgaatttctcaatatcaagaatgtcagccgtgacgatatgttagcggcgcaccgtgtaccgcctcaaatgatggggatcattccacagaataccggtggctttggtgatgttgaaaaagcagcaaaggttttctttcgtaatgagttggcgccactacaaagcaagatattacaaattaatgattggttaggtgaagaagtgattaagtttgataagtacacactagatgataagtaa

SEQ ID NO: 298676 - DNA, 1632 bp, Proteus mirabilis
atgagcgctaagttttttgccttattaacggtgattggtgccaataaattggcaaaagccacggcactaggcaccaccttaaaaattacccaaatggccgtgggtgacggtggcggaatgttgcccacacccgatacacaacaaactaaactcgtaggcgaaaaacgtcgcgcgggattaaataccttatttgttgatccaaaaaacgacagtcagataattgctgaacaagtgatccctgaaaatgagggcggttactggatacgtgagattggtttatttgatgatgaaggcagtttagttgccgtggggaattgccctgaaacctataagccacaattacaagagggaagcggacgaacgcagactatccgcatgatattaaccgttagtcataccgagtcagtcgagttgaaggttgacccctcggtgatattagcgacccgtgagtttgtcaatgatgcgattgaaagtgcatcaaaacagacattagcggaagtcgctaagctttatgctaccaaagccgaattaagcacgggattaagtaaggtacaaaaatcagcggatgccgctaacacaaacgccaatagccgcgtacctagtacccgtaaagttaataataaaccactgagtaccgatattaccttaacggcgagtgatgtaggcgctgcaacaccggcacaggtgaatgaagccaagacagccgcatctaatgcacaggccacagcaaacagtggtgtgagcaaagcagataccgcacagaaaaccgctaacgatgcagtaagcaaagctaacgccgcgcaaactgccgcaaataatgccaatactaatgctaatggtcgtgtacctagcacccgtaaaattaacaacaaaccattaagcgctgatattagtttaactgccggtgatgtaggtgctgcaacgccggcacaagtgaatgaagccaagaccgccgcatctaatgcacaggccacagcaaacagtggagtgagcaaagcggatgccgcacagaaaaccgctaacgatgcagtgagtaaagctaacacagcacaaactgccgcaaataatgccaacactaatgctaatgggcgagtgcctaacacgcgtaaagtgaatggcaaaccattaagtgctgatattagtttaactgcgggtgatgtgggtgctgcaacaccggcacaagtgaatgaggcaaagactgtcgcaaacaatgctaacaataatgccaatgggcgggtgcctaacacgcgtaaagtgaatggcaaaccattgagcggagatattagtttaaatgcgagtgatgtaggggctttaacacaagctcagggtgatgctcgatatcaaaaaaaaggaacaggtcagaactttagaaaaatttggtctgggaatgcttggtcaaaaggtggcacaatcactgtttcagaagatgttagaggaaaaacgatttatattaaaggtaattcaaatggttatcttgggggcggaatacaagttccaaatcaaattaatgttggtattgtcattaattggtataaagagtttcatcttttttccgtgacatcttcagatggaaaaactttacgttgtggcgatacatcatggggaataatagaggtttgggttcaagattaa

SEQ ID NO: 298677 - DNA, 2835 bp, Proteus mirabilis
atgagtaataacttaaaattacaagttgtactgagtgcggttgataaattaaccgcaccgtttcgcagtgcgcaagaaagtaataaacgactggcgtccgctgtacgccagtcgcgtgactcattaaaaacccttaatcagcaagcctcacaaattgacggctttcgcaagattaaacagcagttaacctctacacagcaagcgtaccaatccgccacacaacgtgttgtcaccctcgccaaagaaattgccaacagtgaaaaccctactaaaaaacagttagaggcgtttaaaaaagcgcaacgggaagcggggcaactcaaaaccaagtatgagcaattacagcagtcggcacagcgacagcgctcggcattacaagctaatggcatttcaacaaaccaactcggtcaagcacaacggcgactgaatggtgatattgaacgcactacgcaacagctccgccggcaagaaaaccaattaaggcgcagtgctgaacaagagcggcgcatggtagcggctaaatcgcagtatcaaaagacgctcgatgtacgaaataaaatggcgggcactggtgccaccatgacggcaaccggtgcgggtatgttgtattccgccaaacaaaccttaatgccggggtacgagtttaatgtcgggatgtcaaaggtgcaggcattaacgcgcttagataaaaactctgatgaatttaagatgttgcgagaacaagcacgagagctaggcgcaaccacggcatttaccgccaaccaagtggcgcaaggtcaggcattctatgcaatggcaggttttaagcctgaacaaattaaaaatgctatgcccggaacgctggcaatgtcattggcgggtgatattgatttaggtacgacggcggatattggttccaatattttaaccggctttaaactcgactctgaccaaatggggcgagtgagtgatgtgttggtcggagcctttactcgttcaaataccagtttaaccatgcttggcgacaccatgaaatacgttgcaccggtggcgtcagggttaggggttgatttagaaaccgcagccgccgcaacgggtaaattgggtgatgcgggtattcaaggttcaatggcgggtacttcattacgcgctatcttagggcgtcttgctgaaccgccgaaaatggccgccaaagcattagaagaactcggtattaaaacccgtgatgctaaagggaacttacgcgactttcctgagttattagctgagttggataagaaaaccgctaagatgggtaatgcgcaacgggcggggttctttaaacatattgccggtgaagaagctttttcggcgttatcggtactggccgaacaagcgggtaaaggggagttacaaactcttgttgctgacttaaaacaagctaaaggtgaggcgcaaaaagtcgcgggcaccatgacggataacttaagcggggatatgaaaaacctgcaatctgcatgggaagatttaggtattcaaatttttgacggtattgatagcccgctacggcagatatcacaaagcattacccgtgtgatttctaaagtcggtgtgtggatgaaagaaaaccctgaattggctaagacgctgacgatgatcggtttagcgatagcgggcattattaccacgctgggtattctctcgttatccattgccgcaatgttagggccattggctgccgcgaaattaagcctatcaattttaggcattaaaggcggtggttcgctcacactgttattaaaacccattaaattattaggtagtgcatttttagggttgggtaaagccatgttagctaaccctattttattggttattgccgctattgcggctgctgtttatctgatttataaaaactgggacaccattggcccctacgtttacaaggtatgggataccgttaaaagatatactgctatcgcatggcaagcgctaaaagatactattaagagtgcatgggaggccattaagtatatattctttaattggacaccgcttggactcattattaaacattgggattcgatagtcagctacacccaaacaacatggacgatgataaaaactaaaatttcagatgtttgggaaggaattaaaacaacacttaaaaacggttggaataatattgttaagtctgtacaagaaacgtgggaaacaattaaaaccacgatatcaataaaatggaatgaaattgtcgaagacaccaaagcattaccggctaaatttttgcagtttggtagtgacctgattgatgccattattcaggggatcaaaaacaaatggacggactttaaaaatagcattggcgaattggcaaccgcagctaaagaagcactcacccctgagtttatgaaaagtaatgatccgaaagtgcagtctgcgttagattcttacaacagcaactttgccggtatgtatgattccggcggttatatcccgcgtggtaaatttggtattgcgggagaaaatggccctgaaattgtcgaaggtcctgcgaatatcaccagtcgtaaacacactgcgatgttagcggctgccgcattatcgttaggcagcgccttttcattacaggcacaaaatgccccgttgcacccgcacagtttgcccgttgaaaactatcgcccggcaccggctaacgtgaacattcaacaacagcgttatcaaggcgcgccggcacattatgaaattaatattcatcctcaaccaaaccaatccgcgcaagatattgcccagcttgttattgcggaaatcgaacgccgtgagcgtgaaaaacaagcacgattaaatagccgttatcaagacagtgaggtgtggtaa

SEQ ID NO: 298678 - DNA, 705 bp, Proteus mirabilis
atggaatttctattcattgtatcaatttttttatttttaatatctgtcgtttgcataactctaggcatgataaaacctagcatcatcaagttaaaaaaccgcaaacaatcatttattgcttttcttattaccttcgtcttatcaatcattggggttcttaatttcgctcccgatacccctaacaaccaaaccaccgaaacacaagaaacaataaccgattcttttgtatgtagtaataaaaatgcaatttaccctactgtcgcaagcatgatggaagattttggagactatccttctgataccaatgcgtttgaaattatcaatgaatctcctctaaaaattcgattgtcagcaaccgcttacgataatgatccaactagtgtaaaagataatttagcaaagcgcgcccttatttatggagtattacgcacatttatcaatacaaataataatgatgtgacagtagtgtcttaccttattaataatgataatcaccaaaaacttaaagatagccctgaatacacaactacactgactaaagatcaagctctaaaaattacccaaaaatatattccaatcaattcattgaatgacttaattgatgaaaactgctcattcacaaaacagtttaatgaattacgttatgacgatagcggtaagaaaggctttgataaattctttaatgaattaacggcaaataaataa

SEQ ID NO: 298679 - DNA, 162 bp, Proteus mirabilis
atgaaatttaaagtcggcgataaggttaaagttaaggggtatgagaaaattggggttattgaattggttcgagaaggactttacgcgccctacttagtgcacgattggtgggataaccgaaattggtacaatgagaaaatgctggagttaattaatgaataa

SEQ ID NO: 298680 - DNA, 156 bp, Proteus mirabilis
atgcaaataatcggatatgtattacttatgctaatacagggttctgctgtacctgttacagagcaaatatacacacagcaagaatgcgagagtcgtgctatgcaaataatgcaggtgcgggatgttgaaatagtttgtggtgaggtgtggcgatga

SEQ ID NO: 298681 - DNA, 720 bp, Proteus mirabilis
atgagtcaatatgaagatggctttcctcaaagactattatcagaaaggtctaggcagaacctaacccagcaagaacttgcaaatatggttggtatatctcaacgtcaaatagctgcttatgaggctggagagtctaaaccaaggataggaactctaatgaagttagcaaatgctcttgacgttagttttgtatggctcgccagtcactcaatagatataggtgacgtcagagttattagcatgaaagacaagcctgccgataaaagtatgacggttatccccctgatagatattgataatgttattccatggataaaaaatgaactatacagagaaggggcgcatgaatatgtttctataagtggagatgtacgctacggttcatttgctattacccaaaaagatgccgctatgagctatacaagcagggagggtatttcatttccaattgggtcaatagtggtgtttgaccctagcagaacacctgttaaagatggtgactttgtactagctataatcaatcacaagtcatctgtatttaggcaggtattcattggtagtagtgaatgcaacctcatcccgctagataatcgatatcctgtagaaagcatatctacagaaagcattgtggcatgcaaaaacttactcatcccagcaactcaggtaatttataatttaccggccatgaaacgaaatattgactctgaaattaccccataa

SEQ ID NO: 298682 - DNA, 171 bp, Proteus mirabilis
atgaagaacaccaagacaataaaccctatacaactacgcatgccagatgatcttaaggcctacatatctaaatcagcagaccagtgttttagaactctacatagtgaagtcttgtatcgacttaatcttttgaaggaattagaagaaaaaggtgaagtacgcattcgataa

SEQ ID NO: 298683 - DNA, 573 bp, Proteus mirabilis
atgaacattgtagctaaaacagatttaactttccagaacttcgcattcaaccctatcgttgaaaatgggcaagtgtggttgacatcaactgaaattgcacaggtattaggttatagccgtactgatagtgtaagtaaattgtactcacgtaattcagatgagtttacggactctatgacaatgaccgtcaatatgacgttcaacgggataaacaatagcttacgtaataaagtggtcagagtttactcacttcgtggcgctcacctgatcgcaatgttcgcatctactccagtggctaaagaattccgtaaatgggtgttggatattctggatagagaagtagctgacaagaaagatttaccaatagaaaaagatagttcggtaagtgcaaacggattattagcaagattaagtctgatttgtacaacatgggatgaggctagaaaggatatggaaaacttcgatccgaaaatggcaaaacatctcaattcaacaatgagtatgtttttaatgtattcacaacacatgaaaggaatagctaagacaaaacaacttaagaggttaacacattga

SEQ ID NO: 298684 - DNA, 735 bp, Proteus mirabilis
atgagtgagatcactttaacaaatagttttaacactgtcacgaacaaaactatcgatactcagaagttattatcaatgattaacatgtctcgcaagtcatgtggtgaaaatcaaattcgtaataacgtattgattgatagagtaaaggatgaattagatggggagttttacaagatttttgtaaaaccatctggtgaatcaggtggtagaccaacagaagttattgaaatggatatcaagcaagcgcttcgtgtcgcagcaagggaatcaaaagctgttcgtcgtgttttggttgataaactggaatcaatgcatgtagcttctcaaaaaagcggtaaaagccaatcaggtttacctgaataccgccaagcaagaacgctgaaaatgtcggttgatgctattactaacttattcgacttaatgcctaacttgagtgatgaagcaaagcaatgtgtagctgctaatatcgtcaatccgattgttgggtttgaagccgttcctttgccggcacttgaacaaaaatattatacagctggtgaagttggagaaatgcttgaagtatctgccaataaaattggtcgcatggctaataagcatgggttaaaaacagaggaatatgggaaatatttcttagataaatctgcttattcatcaaaacaggttgaagcattcagatataacgacaatggagtaaaagcattacgacacgccattcatggcgctgaggtagcttaa

SEQ ID NO: 298685 - DNA, 1143 bp, Proteus mirabilis
gtgaggaaaaaaacagttttggcgatttttattggttcattattaatttctggttgtggtcaaaaagagttatcacctcaagatattgaactagtaaataatttaaaatcagagttatcacaggttgaaaatgacatatcagaatctaaatctgagcagaatttgtattctggcgggttaataaaatctctaattactgcaaaaactgaagttttagaggtgaataaggctcttttacagcaacggataaatgctcttgagtctggagctaaagttaacattgttatagagcaaacccaagcaaaccaagatctagcaaataaacttgaagcggaaataaatcaaattaaaaaagaaattgaaagcgagaaaaacgaagctaagaaatattctggtggattaattctatcaatgaaattagcaacaatagcaacacaagagcaaacgttagctacgttacaacaaaagtatttatctgctaaatatggattggcaccaattaactatgataatcaattaagcaacaataactcccagataaatacaaaagaaaatattaaatcagataatgaaaagcaatctatgctcccgccggaatcaggcccatttgggtttaagattggacttacaagagaaaacattgaatcaatgataactggcgagatacgccttgttgatgatgagcaaaacctatacttaacgaacagctcacctaaaaaaaactccgagtttgcatcatttggattagttatctctccaacagttggtttatgtcagataagagctattggtaatgatataaaaacaaacagttacggacagccgttacggcaggaattcaatgggttggttaatactttggaatctttgtatggaaaaccaaaacaagaagatattcttttatctggatctatatggcggaaccctcaagactggatgatggggttgtataagcaagaaagatatttaagtgctaggtggaaagagcaaaatgacaacatgaaagaaaatgaactgagtagtatagctgttgaggcgagagcggatagcggatcgaatgggtatatcttccttcagtacacattcgctaacaatccagaatgtgttaaggaaatagaagaaaataaaaaaagctctttttaa

SEQ ID NO: 298686 - DNA, 726 bp, Proteus mirabilis
atgttaaagttcattcttattttcttgactctatctgtatctatagtggctcaagccagtgtggttattatgggaactcgcgttgtttatcccgcaacgcaaaaaagtattaatgttcaattaaataatgacgatgaatcccccgcattaattcagtcttggttagataccggagatgcagctgcagcaccagattcaattcatgttccttttatcattactccccccatatttcgtatggagccgaaatcagggcaaaccatccggattgtctataccggtgaatcattaccacaagatagagagtctcttttctatttaaatgtcttagacattccggcaaaacctaaattggaagaaaattcggaaaactcagagggaaataacaattacttacaattagccgttcgtagtcgcattaagtttttctttcgccctgataatctcaacgtaacgcctgatgatgcttaccaaaaagtgacttggcatcaggaaggagcactacgcattaaagcgattaacccaacaccttattacatcacttacaacaaaatctcagtgggtcaggataaacagctaacgcctgttgaacaaagtgggatgatagctcctttttcttcaaaaatattttcacttaaagagaagccaatattaacaaataaagtcacttgggttgttgttaatgattatggtggataccaacaaggtgaatctactttggaataa

SEQ ID NO: 298687 - DNA, 339 bp, Proteus mirabilis
atgaactatataactaaaaatacgccatctcttcatccttcaattattgatgggcttatttatttttcaaaaaagaataaaggaacattaaaaaaagagcagcttattcattttttaggtaatgacgacaatctctctgaattaaatatcatagaagccgctcaacaactcaatttaaaatgcgaattttcattttttaatagtgaaagtgagtataaagataaaataattattgatacacttatcgaaattaatggttattggtatattctaaaaaatagaacaagtgataaattaattattattgacccaatcacatctggagtattggctgtataa

SEQ ID NO: 298688 - DNA, 1317 bp, Proteus mirabilis
atgatggtactggattttatttttattatcgtatttctttcagtaatgtttgcttattccgtattattaacttggataaccatagcagcattagtcgtttactttttattttggctgatacttggccccatgatccgttattgggttgaacaagagtatcaagcaaatgctgataatacgagcttattaacagaagctattaatggtatagaaaccataaaaataacagcaacagaacatcaatttattgaaaagtggcaatataaactcactaattatatccttaagcgtttttcagcggccaaaaaagcgttacttgctcagcaattaattggggctattcataaaattactatggcaattatcttgtggcatggtgttaatctgattatgaaagcgcaattaagtgtgggcgaattagtggcttttaatatgtttgccacccatattacacaacctattttacgtttagcccaactttggcaagatgttcaacaaacaggcatctctatacgtcgtattggcgagattgttaatactcccacagagcatcagcatcaaggacttgctactgtacctaatattgcaggaagtatagtattttctcatgtacgctttcgttatacagccaatactccagatgtgattgagcaactctctttttcgatccccgcgggcaaatttattggtattacaggcccctctggttcaggaaaaagtactatcacacgtttaattcaacgtttttatactcctcaacaaggccagatttatattgatggtatggatctcgccattgccaatccccttactttacgccaatcaattagtgttgttttacaagataattttttatttagtggcactattatggaaaatattcggttatcaaaacccgattgtagtgaagaagatattattgaagcgagtaaattagccggcgcttttcattttattactcaactccctgagggatttaatacacaagtgggtgaaagaggtagtaatttgtcaggagggcagcgtcagcgtattgcgctagcaagagcacttttacctgatccacgaattcttattttagatgaggcaacatcggcgttagattatacctcagaagcagaaattttagccaatcttccggctatttgtaaaaatagaacggtaatttgtattgctcatcgacttaatgctatttctatttcagattatatttatgttattgataaaggtcgtatattagaagaaggtacacatagcgatttattaaataagaaaacactttatcagcaattgtggcaacaacagacacagcaataa

SEQ ID NO: 298689 - DNA, 1437 bp, Proteus mirabilis
atggcacaaccgtttattcatacctctgagctttgctggtcatctcaagaattggatttaatggctcaagcgatcgagtcttgctttttgcaataccaaattagaggtgaggttgtcggttatgatgaaggcgcaacatttaccctctttagaatcgaattgggtagagggataaaagtctctcaagtgatagcgttagtgccagaattgtgtcgttccctgagcgtcgttgatataaaagttattgattttattgcgggtacaccttatatcggattgcgcgtgactaacacatatcgtcgagcggtgccttttattgaatgctttaatcaatggaacgaaaacaatgggttatcttccctttctgtcatgttaggagaagatattataggagaaccaataggctgggatttggctcaaatgccacatttacttattacaggtgtaacgcgctcaggtaagtcaatgttaatgcattccttggtaatgagcattttatacagaaacccaccggataaagttcgctttgtgatgtttgatacaagccagcttgaactcagtttatacaacgatataccccacttattgtttcctgttgcctctgattctattgaatcaataaagccattatcgtttttagtctctgaattgcaacgccgtcaaaaattatttagtgcgttaaatcagcgcaatttgagtggttacaataaggtaatatcaaatgcaaaagagttaggtaagcctatacctgatccttttgggcgctctaataaaaattatagtgagcatccttatttagacagtgagcctgaaattgttgtttgtgttgatgattacgttcaattcattggcgagtataaacaaataggggaaatgttagttctattgagccagcaaggtcatgcggttggtattcatctaatactaacgactcgtagccctttatccaccggtatcggttcacagcttcgaattaatattcctacgcgtattgctctttctgtgtcgtctagggctgattctaatttaatccttggacagtatggcgctgagtcactatttggtttgggtgacatgttatttgtatcaccgagtttctctggacctataagaattcaaggtacttatgtgagtgattcagatattagggatgcagtcgattattgtaaacgatggggaagcgtgagttatcttaatctttatgatgatgtccagaatacaaatatgtcagctgaagagcttgactcattatttgctcaagtagttgaatttacggtagaaaaacagtgggtttctatttcaggtattcatagacaatttcgaatcggttataacagagcagcaaggattatagagcagttagaattacagggtatcgttagtgaacaaaattgtaatggcaatcgagaagtattagctccacggtttgatagctag

SEQ ID NO: 298690 - DNA, 567 bp, Proteus mirabilis
atggaataccaattcaaatcatatagtaaaggcagcaagaaaaaatcattaccttcttacatctttgttatcctgtactgctcttggttagcttatctatttttgtcgctttatttaggcgataacattgtattatttgaatggtttcctaaatggacgattattattatttttgctattttcacagggattattgggggaatatggcaccctttttttcgcccatcaaagtatgttatcagtgattattggggggcttttcttggccttatgataattattccaacttttaatgtgcttgcttatttatcattagaccaaacaattcactaccaaacacaatatcatatcgtctcgccagggcctgaacgtcttaaagcccctcaatgtgaatatggtatacggataaaagaaatttatacaggggaatgggttttttggtgtattagagatccaaaatcgaaaaccaaggaaaatacgggaaccgtatgggttacagcaaaaacagggcctattggtgcagatattgttgattatcagttttactctcctaacgctcagcaataa

SEQ ID NO: 298691 - DNA, 771 bp, Proteus mirabilis
atggataacttaacggaacatcgcaattcatctttggcaaattggcttccagatttttttaaacaatggcctaaaaatatcgattggtctagagaaaaaaagcacaccaaaattgatatcaatacagcagaattaactcagtttctcaaccaactgtctgctccccttaaattagtacagcatcgtgctttatcgtttgatccatgggaagtagcaggccttgaacgtaaagaagttcgcaatacagccatccttgcttggcttcttgatcctaaggggactcatggttttggtagattaccattgcaaacactgttacagataatacggcacaacaaaaatgatattccaaaagattatcatcactattgtcgagtgcaagttgaaaccaatccaactggcgattgcaccaatcgtgttgatatagaaatcgatgctgataattttcttctatttattgaagtaaaaattgatgctaatgaacagccagaacaaatagcccgatactgtaaggatgccaaacagcgttccatgtcacggccatgggctgttgtctttttaacaccacaaggaaaagaatcacagacccgtggtaaagactttaaatctgaatatgtgccatgtttatcatggcgccaactcgccagtagtttggaagatcccttgcaatcgcactataacgaattcatttctgctgataactactctccatcacgccaaatagcagcacatgccgtattttgctttcttaatcgaattcgtcaattttaa

SEQ ID NO: 298692 - DNA, 651 bp, Proteus mirabilis
atgaataaactcagtgaaacagaacgccaagcgggtgtacaacttctctcacaactgaaaatgtttaacgaggcggttgtttattttgaccaacatatagaacctgctttttggaaaagttttgataagtgtattgaccgatttatcaaaaataataattgggcaggtgatgctgattatgaaaacaaagggtattgctggctcgcaccgaaaaattggcttattgaagatgataactgtaaatattattttgcaactagtacaactgttgatgaagaactcgactataccttagccgttctgactggtcagggcattgagcaagggaattttggtttcgaatttcaattgaatgccgcgcattttggaggagccagaaaactggctagttataacaattcaatgtctgaaaaacataaagaagacaaagaaaaattaataaaaataggcttaaaagatcaggtaaaaggtaactattttattcctatcataattgattcaaaattacttgctgattgttgggcgctcaatggtgaattcccagtagagcatgagattttttctccgcttagaaatgcccttgagatactattcgaatcaactaacacattggataatatgttccgagatgccattgaagtgagtgaataa

SEQ ID NO: 298693 - DNA, 519 bp, Proteus mirabilis
ttgaaaaaaaacaatcccgttatcagtaaaattgattttgattgtggtctgttagaacaggttctcgatccagataatgtactcagttggggatactggattaaacatcattgtcactgcgtttatggcgaggacttaagccatcactttcaagctttcaaaccttcaaaagctattgcagtggccgtgaatggtgactttatggaggttttggacaaactagtcattcaaataaaagcatcttctaatgaaaataaaaagttacagcttcggcgctcggctgcacgaaagcttatcagagcaaccaacatccttcgtagtgaacaagataatgactggccggactctctccatgagtaccgcgccaaatttaattcacggtatcctgcattagcggaagatatggattacctattagaaattagtattaaacctcgagagagcatagcagactttgaaaaacgggctatggcatttgcccgctggcttagctgtgaatttaataaccaaaaagcctaa

SEQ ID NO: 298694 - DNA, 285 bp, Proteus mirabilis
atggccgtcgatcataatgattttatttcccagccaagacgcgcggaaattcaacctgaattctcacatataattgaatgtgttgtgacaaatctaacacgttactttcctaagcttatacacagtctatacgtatacggaagtgtagctgaaggccgggcagaagtaggtaagtctgatctggatatgacagttattttcaaatatgaacctgatcagactattaaagagcaatttgcaactgttcagtctgttcttgaaaaaaaacaatcccgttatcagtaa

SEQ ID NO: 298695 - DNA, 474 bp, Proteus mirabilis; identical to SEQ ID NO: 96879

SEQ ID NO: 298696 - DNA, 2775 bp, Proteus mirabilis
atggacgaagcatttgcagtggctgagcaagtgggtttcccttgtattattcgcccttcatttactatggggggaacgggaggcgggatcgcctataatcgtgaagaatttgaagaaatttgtactcgaggtttagatttatcaccgacaaatgaactattaattgatgaatcattaattggctggaaagagtatgaaatggaagtggtgcgcgataaaaatgataactgtattatcgtttgctccattgaaaactttgatgcgatggggatccataccggtgactctatcacggttgctccagcgcaaacgctaacagacaaagaatatcaaattatgcgtaatgcctcgatggcagtattacgcgagattggggttgaaaccggtggctccaatgtgcaatttgccgttgatcctaaaacagggcgtttaattgttattgaaatgaaccctcgtgtttctcgctcatcagcattagcgtcaaaagcaacaggtttcccaattgcaaaagtcgcggcaaaacttgcagtaggttataccctcgatgagttgatgaatgatatcactggaggaagaaccccagcctcttttgaaccttctattgattatgtagtgactaaaatccctcgctttaactttgaaaaatttgccggtaccaatgaccgtttaaccacgcaaatgaaatctgttggtgaggtgatggctattgggcgtactcaacaagagtcaatgcaaaaagcattacgcggactagaggttggtgcaactgggtttgatcctaaagtaaacctcgacgatcccgaagcgctcactaaaattcgtcgtgaattaaaagaagccggatcggatcgcatttggtatatcgcggatgctttccgcgctggaatgtcggttgatggggtgtttaatctcaccaatatcgatcgttggttcttagtgcaaatagaagagattgttcgcctagaagagcaagtggcacaacttggtttagctggtctaaatgctgatttcttgcgtcaattaaaacgtaaaggttttgctgatgcgcgcctagctaatatcttgaatgtgaaagagcaaaccattcgccaattaagagaacaatatcaattacacccagtttataaacgggttgatacttgtgcggcagaatttgctacggataccgcttatatgtactccacttatgaagaagagtgtgagtcggatccaaatcaagacaaacctaaagtgatggtcttaggtggtggtccaaatcgtatcggtcaggggatagaatttgattattgttgtgttcatgccgctctagcattacgggaagatgggtatgaaaccattatggtcaattgtaatccagaaacggtttcaacggattatgatacttccgatagactttattttgagccagtcacccttgaagatgtattagaaatagtacggatcgaaaaaccacaaggcgtgattgtgcaatatggtggtcaaacgccattaaaattagcaagagctttagaagctgaaggggtgcctgttatcggtaccagtcctgatgcaatcgataaagcagaagacagagaacgtttccaaaaggccgtggataagttagggttaaaacaaccagaaaatgccacagtgacgacattagaagaagcggtagataaggcaaaatctattggttacccgctggtggtacgtccatcttatgtccttggtggacgagcaatggaaattgtttacgatgaaattgatttacgtcgttatttccaaacggcggtcagtgtttctaatgatgctcccgtactgttagaccgattcctagatgatgccattgaagtagatgttgatgcgatttgtgacggtcagcaagtggtgataggcggtattatggagcatatcgaacaagcgggtgttcactctggagactctgcttgctctctacctgcttatactttaagccaagatattcaagatataatgcgcaagcaagtacgtgaactcgcttttgaattaggcgttaaagggttgatgaacgtacagtttgcggtgaaaggtaatgatgtttatcttatcgaagtgaatcctcgcgccgcacgtacagtgccttttgtctctaaagcaaccggtgtgccattagcaaaagttgctgctcgagtgatgataggacaaagtcttgaacagcaaggcgttaccaaagaggtgatccctccttactactcggttaaagaggtggtacttccctttaataaattctcaggtgtcgatcctattttagggcctgaaatgcgatctaccggtgaagtgatgggggttggtgctacttttgcacaagcttttgctaaagcgatgttaggtagcaattccaccatgaagaaaaaaggaagagcgctactttcggttcgtgaaggtgataaaaaacgtgtcgttgatttagcaactaagctattgaaaaatggttttgagttagatgcaacacatggtactgccattgtcttgggggaagccggtatcaatcctcgcctagtgaataaagtgcatgaagggcgacctcatattcaagatagaattaaaaatggtgagtatgactatattgtcaatacgactgccggtcgccaagctattgaggattcaaaactgatccgccgtagtgcattacaatataaagttcactatgacactacattaaatggcggatttgcgacaacactgtcattgagtgctgatcctactattgatgttatttcagtccaagagatgcatgcaaagataaaaaaatcttaa

SEQ ID NO: 298697 - DNA, 960 bp, Proteus mirabilis
atgaatggaaaatcaaataatagtttaataaataatgatagtaataaacaaatagctaaaccaataattccgccaccatctgctaaccctactttaagttcacaaatggagacaggagatggcaatgttgctttagatttagttgtggtaatagatacaagtggctcaatggctgatgaatcttctgatttaagtcaacaaatagatgatgctgttcaaaaggcattaggacgttgcccatcaagtttaagagtcacttttttaggaatagaaggtacgtgggataatactaagttcgatcgctcagtgactgactatttaatgacacaaggtgtatctgctcacaaattacaagcaagagcgccatttaaagaggctgatggacgagatcatgctggaaataaagaagatttatgccgagccgtcattgatgtgtgtaaatatttcgattggcgagatggcgctcgtcgtgcaatttttgtcttaggtgatgaaggtatggaaggtggcggaggtgtattaacacaagccgctgtgcttaaaaacaatgaggcaatagtggttgctagaagcgaaaaagtaaaagtatatacttatcagggaacgcctaatgatgatccctctaatgtggatcgctttcctactattgctgatagagataacatcacgaaagagtatgtgcgcttagcgcagatgacgggaggacgctcttatatatacacaacaggtatcgctaatttttctttagttctgcaagaaattctatgtgacagtttaacattacctaaacttcctgatctgaataaagataattcaacgtgtcgtcatgtttgtgaagagctctctactattatatcaacagttaatacccttgcagaaataatgcataaagcgattgattcatgttgtaaagaagattggggcacacgcgaagtgtttaagcctcattgtgattgttaa

SEQ ID NO: 298698 - DNA, 756 bp, Proteus mirabilis
atgttgctattaacaaaagtttataacagcaccttcttaccttggaatcaaaataaatacgataattcagcgatgattgagcaagctgtacgtgatgttttggaaaaaggtttagtattccgtatcgatgaagcatcgcttaccaatagcagtggcgcaagcaaactaaactttaagttagatttaaatgcgttcaatgctgatgcactgaaaaaagaagacaaggcgccttcagttctgtttaatgaattgtttaataatatcaattttaatatcgatctttctgtaccaatgctaacggagttccgtagtaccacacaataccttgatgttatgcgttattctgaaaaaggcttaacagacgaagataaagctgaaattcagaaaacaaccgctaacgacatggcacagttaaaaactgaattacagcaaaatatcaatcaaatttctcaagacgagaaagatgctctgccattgatgctgttatcacaagacggtaataaactgtctttaaacctgaactatgctgctgataaatttactatgaacggtaaaacttacagctttgatgagtttatggaagtaacacaagcccctcaaatgttaggtttagcggctatgttatttggtgcaggtgcttcttcttatgattatgatgactctgattatcctgaatattcagaagagccagatcaaaatgatgcaatagaagagccacaagttgaaatcccagcggcacctgctgaaaacaattaa

SEQ ID NO: 298699 - DNA, 1302 bp, Proteus mirabilis
atgtccaaaatcgttaaagtacttggtcgtgaaattatcgattctcgtggcaacccaacagttgaagctgaagttcacttagaaggtggttttgttggtatggcggcggctccatcaggcgcatcaacaggttctcgtgaagctttagaattacgtgatggcgataagtcacgtttcttaggtaaaggtgttctgaaagcggttgaagctgttaatggaccaatcgctaaagctcttttgggtcaagatgctaaagaccaagctaatatcgataaaatcatgatcgatttagatggtactgaaaacaaatcaaactttggtgcaaacgcaatcctagctgtttctttagcaaacgcaaaagcagctgctgcagcgaaaggtatgcctttgtatgagcatatttctgatctgaacggtactcacggtcaatactcaatgcctttaccaatgatgaatatcatcaatggtggtgagcatgctgataacaacgttgatatccaagagtttatgatccaacctgttggcgcgcctactctgaaagaagcggttcgtatgggttctgaaatcttccatcacttagcaaaagtgctgaaagcaaaaggcatgaacaccgcggtgggtgatgaaggtggttatgcgccaaacttagaatctaatgcggctgcattagcggctatcaaagaagcagtagaagctgcgggttacgttttaggtaaagatgttactctggctatggactgtgctgcatctgaattctataacaatgagactggtaactacgaactgaaaggcgaaggtaaaactttcacttcacaagaattcactcattacttagaagagctgactaaacagtatccaatcgtttctatcgaagatggcttaaacgaatctgactgggatggtttcgcataccaaactaaagtacttggtgacaaaatccaactggttggtgacgacctgtttgtaactaatactaagatcctaaaagaaggtatcgataaaggtattgctaactctatcctgatcaaattcaaccaaatcggttcactgacagaaacgttagctgctatcaaaatggcgaaagacgcaggttatactgctatcatctctcaccgctctggtgaaacagaagatgcaactatcgctgatttagcagtaggtacagcagcaggtcaaatcaaaacaggttctatgagccgttctgaccgtgttgctaaatataaccagctgatccgtatcgaagaagcattaggtagcaaagcacctttcaatggtctgaaagaagttaaaggccaagcataa

SEQ ID NO: 298700 - DNA, 588 bp, Proteus mirabilis
atgtctataaaatcaaataatgaaaattatttttcaagaataggtacagtgatatctaagtcacttcaatcgcacaatcgaatttctgcgataagaattgacctaagatttcctagctatacggttcgccatttaaatgatcccaaagtgataactcgattctttgaatcattaaaagcaaagatactggcagacttaatccgtaagtctaaatcatgggaaagacattgttttagtgaacttcattatgtctgggttagagaattcggagagataaataataaaaaacattaccatattttaatcatggttaataaagatatttataaagggttaggtaactatgatgctgatgatataaatcttggaaaattaatacagcaagcatggtgtagtgcaattaatgttgattatctaacttataaagaattagttcattttcctacaaaacccacttattggttagataaaaatgcacctgatataaaagggcaaatcttacaattaaagatccgttgtttatatttaacaaaaaatcactctaaacattatggagatggtgaacgttcttttggatgtagtcgctaa

SEQ ID NO: 298701 - DNA, 210 bp, Proteus mirabilis
atgaacacacaagttattcccttattagatgatcaattcgttgatatgaaatttattacaaaattaactggattaaccgataaatggttttataaattaattcaagatgatgaatttccaaaaccaattaaattaggtcgtagttcgcgttggttaaaaagcgaagtcgaaaattggctacagcaacgtattagcgaatccagatcataa

SEQ ID NO: 298702 - DNA, 1785 bp, Proteus mirabilis
atgtggtccgataaggagtcctcggaagattacttaaattttggtgaggtatcccagctagccgtagatgtgctctccaccgaaggaatgttaccagtatcgataggtatttttggtaattggggagcaggtaaatcctcacttttggaactgatagagcaaaaacttaggcgagaacacaaagattggattgttatcaactttgactcttggctctatcagggttatgacgacgctcgagccgcacttctcgaggtcatagcgacagcattgacaaaagctgtggaaggaaatgccacccttacctcaaaagcggtgaaactccttagtcgggttgatggatttagggcaatgagccttctggctgaaggagctgctttatttgcaggagttcctactggtggtttcctttcaagaggtattggtgcattaaaaaatattactgatggtatccagagtcaagaagagtatgaggctttgggcaacctagctaaagaaggcaaagaaaagactagtggtttgattaaaccagagactaaaaaaagtcctcctcagcagattgatgctttccgcaaggaatatggggagattttaggcgaacttggtaaaccacttatcgtggtcatagataacctcgatcgctgcctccctaccaatgctattcatacgcttgaagctatcaggttattccttttcttaactaatactgcctttatcattgcagcagatgaggacatgattcgttcttctgtggctgattacttcaaaggggcatcacggcgacatcaaatagactatctagataagctaattcaggttcctattcgagtaccaaaagctggggtacgtgagatccgttcatatttgttcatgctttatgctattgagcatggtctaaaaggtgaaaaacgtactgcactccgtgatggtttagaaaaagcattacagcaatcctggaaagatgaaccaattgcacgccaggatgccttgaaaatgactggtgaatcagaggatagcgatctcgcgttagcatttgcacgtgctgaccgtattgctccactattagctaactctccaattatccacggtaaccctaggatcgttaaacgcttgttaaatattgtgaaaatgcgatctcaaattgcgaagcgacgatctatgcctttggatgaagccatcatcactaagttagtgatctttgagaggtgtgtcggagtagatgctaccgctgatttatatcatcttgtagatattgaacaaggtatgccacagctactaaaacagctcgaagatgctaatggagaaataccttctgaagcgccaaaaacatggactgataacccaacgactaaagctttcatcagtcaatgggcacaacttgaaccacgccttggcggaatagacttgagagctgccatatatctatctcgagaaactatgccaataggtgcatatgtggttggtttatcgccatctgggcgagaagtactgaatgcatttattgaactaaaaaataccagttctccgacagcaaaaactcttttggaaacacttcctcgtgaagaacaagtaccagtaatggaaggtttaattagccagttaagacaagtatcggactgggctcgtaaacctaagggattttctggtgcatgtgtattagcccgccactcggtagatgcagctagtatattaattcgttacttgcaggagttgaagctggggacaaaacgaccaccgtggatgactacagcactaaaagatgagcaatggaataaggacgcctaa

SEQ ID NO: 298703 - DNA, 753 bp, Proteus mirabilis
atgggaacttcacaatcaagtacaggtccgggaggtggttctccattaattccaccttgggctgatgaccagccgcagcaaccgttaccttcgccacaaaaaagaagatttgcgccattccgtgaatctttaggaaatgcagtttcaaacggtaatagagcagacttcaagaaagccatagggcattacgcgcgaaaagcctctggagggagcaatagtgcagcacgacgactagggagtgtcactcaggcagggggcggattgtttggggctttaacgggaatgccttcggctcccggagaaccaaacatcaatctgggtagtttaacaggccttccatgtgaagtggcaatatcagctattgctcaaactttaacatcacaggatggtgattcagaaaagatctgtgcagccatgaaccatgctttagtggaagctcttgatggagtcgaaattttcgatcctcaaaaaataactgatgaagtgattgttgatacaatgattggttatttagcggaaagtatttttcttcagatggtaatggactctaataaggcatggaataaagcagacaccccctcaaaggcaatccaagcagaaaccgaacttagagaattaatcaaagttgttgttgataaacatatggctccaaaacttgttggtaacatcagaacattctcacggaatcaaataatcaacattgaacgtcaggcaattattgaagcttggcaagaatgggaggcctatcaatga

SEQ ID NO: 298704 - DNA, 1305 bp, Proteus mirabilis
atgacacaattagtttttcatcatgatcatcgccatttaccaccagcaagtgataacgtgttgcctgtacagctctatggattaagtggtcaaggtcgcggtgatatatctgttattgggaatcctgcaattgatagaattaagcgcttgggagtcaaaattccagcccaggtaatagattttttgagcatcgcactagctgttacagccgccgatactttcgttcagcgtgaaagcgctgaggatggttggactcgtcagctgtcgctacaacttccgcttcatgagccatctcgatggattgctctaaaaaaggagcttgaaagcgctttgcatttccttagtggagacatctgggatttcgagttttgtaatggtggttatgcaccgcctgaaccatatagccaacattcaagatttcagctgattaagctcaaagaacttgattgcgtcagcttattttcgggaggattggattcggctattggcgcaatagatctcctgacaaaggggcgtgctccgcttttggttagtcatgcttataaaggagataagtcgcgccaagatcaaattgctgaaagattgaatggtcaatactcacggtttgaaattaatgcagatccgcatctatatcaaggtgtgactgatattacgatgcgaacgcggagtctcaattttcttgcttttgcagcagtgggcgcttgtgctgtacaagaagtatctcaacaagaaaaaatcgaactgttcgtgcctgaaaatggatttatctcattaaatgcgccacttaccccacgccgaataggtacgttgagcacgcggacaacacacccacactttattgcgagcatacaaaggatctttgatataaccaatattccctgccaaataattaatccatatcagttcaaaacaaaagggcaaatgacctcccaatgcttggataagccgctcttatctggaattatcgaaagtacggtatcttgcagtcattggaaacgaacaaatcagcagtgcggggtatgcgtaccttgtatcattcgacgagcatcacttcatacgggagcgatcagtcgagatgctgattacactttccagtccctagctaaagtaatgaatgaaattgatcgtagagatgatcttatcgctcttaggattgcaatcgcacagaaatcaactttaaacataggagcatggatcgccaaaagcggccctttacctatggcagcattcaatgattttaagcaggtgttttcggatggtttaaatgaggtcgaaaactacttactgagtgagggcatagtgtga

SEQ ID NO: 298705 - DNA, 714 bp, Proteus mirabilis
atgcactgtcaccttgacttatatcctcagccagagcaggtggctgaagaatgcaggcatcgagggagttatatactgtcggtaacaacgacccccaaagcatggcatgggacttctttgctagctaaaggaagccaacgaatccgaacagctcttgggcttcatccccaaattgcacatcaaaggtcgcatgaattagagctgtttgattcactactttcggagacaaggtatgttggggaaataggccttgatggcggtaaagggtttaaagaacattggaaccttcagttgaaggtatttcgacatatacttaatagcgtaaatcaagctggtggaaaaattatgagtatccatagccgaggaagtgcatcagctgtccttgatgagattgaaaatattgacggagttgcaatattacattggttcacaggaacacctaagcaacttgaaagggctgttgacttaggatgttggttctcagttgggcccgctatgctcgatacaataaaaggcaaggcgttgactttaaaaattcctcaatcacgtattcttccagaaacagatggaccatttggtaggttctgcaatcgtccactaatgccgtgggattgtgaaattgtggaaaagcagctagccacattatggggaatgaatcaaactgatgttaaagaacatattttagataattttagggcattatgtaacttataa

SEQ ID NO: 298706 - DNA, 1269 bp, Proteus mirabilis
atgaatagtttaatagataaggccactgaagatatcgttgttatgataggaaataccactaatttatcagaggcctttgaattatattcgaaattccatccgttattgaaaaaatataaatttatattttcttctgataacggaggtgtgcctggatataccataaataaaaatttttcttcaaccggtgcaattagaggattatttgaaactgaacatgtttttgtttttgatgagcaaagtttccatgaaatgaaacatggtagaatagaatatcctatagattattcagtttctcttgataccaatgcaatgagctatctgtatccttatatttcaggtataaaaaaaggatcacaaccaatagatttaaatgaagtttttgattttgtatcccaatctaatgtcaatatagatcctatgccatattgtatggagaattatcaaaacatcaaaaacaacactaaggttaataaaatatttgaaaatttaaaagcatatgaaatattaagaaatatagatatttattcacttaaaaataaaggtattattaggtcatacttaccggacgaagaaataacatatagagctcaaaatttcctttcaacaatgtattttaatatagaagattctaattttttagatgggttagatttttatcataaaagtatgtatgtttgtctagttaaaatggtatctattcaaataaaatattcaaatcatagctttagtaaaaaaatggaagctttcttggatttttgtcatcaatgtttagcaacaatgaatggaagagaagctgcaattgctcatgcctactttaggcaagggcagaaattaaaattttttgggaaaatacaaaaaaaacaaaaaaatatttttaatcatttaaaaaatatggcatgggatttgtggcatattagacaactagaacaaaatacaacatttaaacttaatgataattctcgttactactttcctgccatattgacatttgacaaaaatttaatagaaattattgatttatacccaataaatgctattgcatatcatgtagataaaaatgaacctttggtattccccaaaataaatccttttaatttaaatgaagatattaaaatcgaagatattgaaacaataaataaatatttttctgatgatgcaaagtttgaaagggaaaaaaatagaaacaaggtacgtggaaacctaaataatatagttaaagaattagagagtgagctttttatagttgcagaattaagtggtatataa

SEQ ID NO: 298707 - DNA, 306 bp, Proteus mirabilis
atgctttatgccgttcctcaacataccactgactcattgaaattgatgaaaatggttcttcaattgattgcctcacatcaagaagtatcaagtgatttaaaatcaagagtttatcaagtgatacgcgaagcctcatccataaacagtgagcatgagaagtctttacatattcctacttttagagagtccatatccctagcagtagaaatgcaacatacgcatgctcttgcggaagcactaactgttgtaacgagtgaggaaatgcttgagcctaattttgctagatacgttttagagcacatctaa

SEQ ID NO: 298708 - DNA, 1098 bp, Proteus mirabilis
atgcttgcctatactcaactaacgctggttcgtagtaaattaagggagatttctgaatctccctatttttcaaacgatttacacctatatcttgtacaattgagaaaagtcgtagacaagttatgtgataatcatagcgcaattagcgaacaaactatcgtacagtgtgctcaattcatcactgatgccgtgaatttttttagtagcagtaccacaaaaaaaattccatatgaaatcgtatattgtttgaatgacgcctgccagaaatggattaacgataagacactgattactaccgctctttcacccaatattatgggtttttacttcaagcccgtaattaaaaatttttacgttttttttgaaaaaaacctagatgtctcatttgatgcagaattaatacaaatttctttaccagaaatctatcgtcgcagacctttatgttctacccctttatatcatgaattaggtcattacattgatataagccgtggtatctcagaactggccctgctttattttcgtaaaaaaggcaatggaatactaccttttcccgatggaaaaaatgcgtggggtgacaatgagcaggatatttggttaaatcattgtagagaatattttgctgatctttttagtgcacaatttgtaggaaggagcggaattgatttcttaaaaaaattagctggtagtgatccttcaagtaacactcatccatcgacaaaaaatagaatagaaatagtagaaaatttcctgtctcaaattaaaaatcctgttatcgatatgtttaatgatgtcatttcagcactacatcgtggtgacaagttattatgctctaatttatcgttaccattgccacaaaaagaagtaggtatagcatttgataatgttaggccttttgagatgatagataaaagcgaaatgcactcttttatagatagcagttggcattacttatgccgcatgtgggataatccaacaggagtttggactggtcttagcaaagaaacaattgaaaaaacaataaatgatttggttgaaaaatcgataagaaacataatgataattgaaaaatggaatatgtatgcatctgctgaataa

SEQ ID NO: 298709 - DNA, 627 bp, Proteus mirabilis
atgcatctgctgaataaaactgaattaattgagtcctatgaatcagatgatccaaaatcattatatatcaatccattattgaatcgaaatcaaataggaaattttactatcgatttgcgtcttggctatgattttttagtgtctattatgacaagaaagccctctatagagttttatccatcggcaaatattgatacacatcagcctatcagaacattttttcaagagacgcgtagggacattggtgatagattcatcgtttatccgaatcaagtggttttagctacaactcttgaatatgtcagttttccacccgattgttatgcagatgtgctttctagaagtagctatactcggcttggcctttcattaaacacaatgatacaacctggttatagaggttgtatttcgttagagttatttaatcatggtaatacaccactagagcttatcgttggttcgagaatatgccaaataagaatattccgtaataaaagtgaaggtagttaccttgataacgagagtcaaagaaaatattttggtaatgttaggcctacgatatcagcagcagaaaatgattctgaacttaaaatacttaatgaaattaggaatcacgataaaaattaa

SEQ ID NO: 298710 - DNA, 1182 bp, Proteus mirabilis
atgacattaactgcccgtcaggtagagactgcaaagcctaaagagaagtcatataaactctttgatggtggtggtttataccttgaagttacagcaaaaggctcacgctactggagaatgaagtatcgctttggtggtaaagaaaaacgattagcttttggtgtttttcctactgtgacacttgctgaagctcgtgaaatgagaaaccaaacaaaaaaggtactcgctgctggtggagatccgggagaagttaaaaaagaagagaaggcgattcaaaagctcagtacaggaaatacgtttgaagctattgctcgcgaatggcatacatcaaaagcggatcgctggtcactacgttatcgcgacgaaatcattgatacctttgaaaaagatatctttccttatatcggtaagcgcccgatagcggaaattaagcccttagaactgctggaaaccctacgtaaaatggagaaacgcggagccttagagaagatgcgcaaagtccgccagcgctgcggagaggtttaccgatacgcgattatcacgggcagagctgaatacaatcccgctcctgatctggcaacagcgcttaccccaccgaagaaacaacatttcccattcttaaccgctgaagagttaccttattttttgaaggatctcgctggatatacaggcagcgtgatcacgaaaacggcgactaaaattattttgctgacagctgtacgtacacaagagctccgctttgcgcgttggcaggatattgatttagaaaaagggatttgggagataccagctgaagtaatgaaaatgaagcgaccgcatgttgtgccattatctaaacaggtgatcgagctatttaattcactcaaaccactgtcagggcattatgagcttgtctttataggacgtaatgaccatagaaagccgatcagcaaggaaagtgtaaatcaggttattgagttgcttggatataaaggtaggctgacaggacatggctttcgccacacgatgagcactattttgcatgagaaaggatataactccgcatggattgaaactcagctcgcgcatattgataagaacgcgatccgtggcacatataatcatgctcaatatatggatgggcgcagggaaatgatgcagtggtatgcggattatatggatgagttgatatctgagggctag

SEQ ID NO: 298711 - DNA, 1605 bp, Proteus mirabilis
atgccaatcccattcccgtttgattttaaaaatcctgactacccgcaggtatttgaatggcgaatggaacgattaacacgaattcgccaaaatccagaagctataccagcactcaacgcttattacaaagataatccagctcaatttattattgattggggaatgacgtatgacccacgaaaccctgagagaggattaccgtcatatatcccatttttattatttcctcgacaagaggaatggattgaatggtttatcgaacgatggaaagggcaagagcctggtattacagaaaaaacgcgtgatatgggtatgagttggctaacggtcggcttatcttgcactgtatgtaatttcaatcgtggtattagtgtcggcataggtagtcgtaaagaagagtatgtcgataaaatcggggtacctaaatcactgttagagaaagcccgtatcttcatgtcttatctgccggctgaatttcgttttggttggaatagaaacaaagacgcaccacacatgagaataaaatttcctcatactgactcaatcatatcgggtgagtgtggtgatggtattgggcgaggggatcgcgtaagtttttatattgttgatgagtccgctttcctcgaacggccatctcttattgacgcttctttatcagccacaactaactgcagacaagatatttcaacgccaaatggaaatgctaatagcttcgctatccgtaggcatagcggaaaaataccagtatttacattccactggagagaagatccaaggaaagaccaagcatggtatgacaagcaggttgaagttttagatcccgttacagtcgctcaagaaatagatatagattacaacgcatccgttgaaggggtgattattccttctgcatggatacagtctgcaatagacgcacatatcaagttgggaattgaaccaacaggtaagcgccttggtgctcttgacgtagctgacgaaggtatagataaaaatgcctttgtatcaggtaaaggaatattggtagatgcttgtgaagagtggagtgggaaaggtgctgatatctaccaaaccgtggttaaggcaatcaatttagccagtgattatggttgtagtgaggttctatatgatgctgatggtattggtgccggttgtcgtggtgattcaagacaagtcaatgaagaacggaagttagctggtttaaatcctgttaccttttctgcttacaaaggaagttctggtgtactaaatccggataaggttttaatgaaagatgccagcggtagaaatattacgaataaggactttttccaaaactttaaatctcaatcttggtggcatttgcggacattgtttttaaatacccatagagcggttaatggtatgaaatatgatcctgatgagattatttcgttatcttcaaaaatgtcatctttatcgagattaacttccgaactctgccagccaacgtacacaaaaaactcagcaggtaaaatcgtcgttgataaaaaacctaacggtgctaagtctcccaactgcgctgatggcttagtcattcttaaatctcctgagaaaagaagcggtagtttcttcacaactaagaggtaa

SEQ ID NO: 298712 - DNA, 1263 bp, Proteus mirabilis
atgacaaagcgacaatatgatttaaacggctggctggaagtgaaagataaccccatctctaaagttggggtttttgattatttagggtttgaaattggcgcaccgatacccgaaaagatttataaggtgtatcgcccacaagaagaactggccagcacagagacaattaactctttcaaattaatgccctttgttgatgagcatgaaatgttagggaaagacggcacacccgcagagacaaaggggatacaaggggtcatcggggaacgggtctattttgaatatccctacctcagaggcaatatcaaaatcctgtctaattcagcgcttaaccaaattgaaggaggaaaaattgaattatctccgggttatcgctgtgtttacgatttcacaccaggcgaatttaacggtgaacgttatgacgccatacaacggcatattagagccaaccatcttgcgttagttgatgaagggcgcactggcgctgatgttgctgtgcaagaccattccgttattaccatagacacaaaggaacttattcgtatgaatcctgaaaatgaaaacaaagacacgccaaccaatgatgaaggtgcctttacgcccgagcaattggaagcgttaaaagccattatcaaggaagtcatcaccagcactcaacctgcaacagatgatgatccagaagaagagaaaaaaccttcaactgattcagaccccgacgaagagcagaaagcagaagaagcagtggaaaaagctgaaattgccacagaagaggctgaatctggtgaacctgaagcagtagaaaaagccgaggtcgccattgaagaagctgtcgaagcgattgaagaagccaaagagcatcttgaccaagccactaccgatagccttcatcgtcgtttaaagcgcctaaatcgtagcatgactgcaatggatgaaatggcatctctgaaacgtaaaattaagcgattagagaaagcaaaaccggcaatggatacgggtgaattactcaaacaaatcggtgcgcgtgatgcgttagcgcataagttaacgccgttccttggtgtgtttgaccactccgccatgactcaacaacaggttgcagagtacggtgttgaaaaactgggtattcaatgcagtaagggaaccgaagccattgctcttgatgcatggatgcaagggcgtgtgcctgattctcaaaagaccagctcaacaatggactctgcagtgagcaataaatcaattatggataaatggggagctaagtaa

SEQ ID NO: 298713 - DNA, 1068 bp, Proteus mirabilis
atgccagtcagtaaaattaagtttcacatgtctggtcgtgatgtcaaaaaacatggccaactaaatattaaccctgatcagaaatggacatacggggaattagcgcaaatcggctttggtggtttttctgcgatggactccgcgatcagcggtggtgcaatgcaggggggcttaattcaacgcgaaatgttgcaacacgttttaccgggtgtcattcgtaccgcaacgcgtgtgcgtgtgttagatgaaatcacgggtatcgtcaatgcgggcgaatggcatgatgaagagatcattctgaatgtggcgacaccaaccggtaaagccgaactttatggtgatcataccaatgtgccattagcgtcttatgcgcaagaccaagagcgccgtggtcttgtccgtttcgaattaggtttccaagtggggaaattagaagaagcgcgccaatcgtctgcaggctttgttgcgatggaggaaaagcgcaattcagtgactgaatcattagagcaaggtcgtgaacgcgtggggtactacggatttaatagccctgaaacgcgcgtctttggtttgatgaatgagcctaacttgcctgcctatgaaacagcaaaggggaaatggaaaggtggaacatttgcggatattactgctgatattaccgatatgttctcgcgcattgaaacgagttctggcggtattatcaaagatgatacgccaatcaccttaacattaccgttgggctttcgttctgctctgaatgtggctaatcctgtcgcacgcggtgaaacagtcaaacaatggataaatgaaaactatcctaatatgcgtctggttttctctcctgaatttgttggcgcaaacggtggggctgatgtggcctatatgttcgcagatagtattgatgatggttcaacggcaaccagtgccgtgatccttcaagttgtgcctgtgaaataccagttattaggttcactcaaccaaattaaagggtatatggaagatgcaaccaatgcgactgcaggtgtatttgtgacccgtccgtgggcggtgacacgcttaaccggtatttaa

SEQ ID NO: 298714 - DNA, 645 bp, Proteus mirabilis
atgaaaaatgaaccatcgcaacaacaaaatggacaatcaatgccttatcttattcctgatgcagattttaatgcgaaattaaaactaccagccaaaaatattgaacatacaatacaatttataacccaaggggtaaaagatatttctttagacggttttgaaattcctacgggctatcggttagttaaagctgttcatagagatcaatatagacttattactactaataaagaaagcgaaacagcctatttagttgaactaagatttcgacaagatatcgtttatggacaaacaacatgtactcaaataaaagtatggcgttctcgccttcctaaacatcgcaatgtaataagagatttaccccgcactttcttttataacctattaaaagtacacaatattgttgtgactgatgaggaacaaacctctgatggtaaaggtttttggattgatatgattttatgggcttttagtgaaggatattatatttatgcttcagatggcactgaaatggatcgaccattacatttaattgatagtgtggaagacttttataataaatgggatgcgttttgctgggaaaaagatcgcgatattcatactcatcgactattagttattagtaaagaaccgttatctcaataa

SEQ ID NO: 298715 - DNA, 5061 bp, Proteus mirabilis
atggctgataaacatgttggtgacggtgaaaaccaattcaaagttgttgcaaccacccctgatgtttgtcaggtagggtgttctgctattccttttgatagttttcaaagcttagatgcacaaaagcaatatgccttgagtgttaaagcacgtggatattgtactttgaatgttgggtcaataatcaaaggaacgcaaagtaacacgggagccggtgtattatctggaacttcattaggcggtggagattgtcaaattattacaggaagcccttcggtccgtattgaaggtcaacctgctgcacaagatggttcattagtcgcaatgaacaataacaatacattagggactttaattactaatgttgcacctcctgctgagccgattgagagtaataaaatcccctgtaataacccgcccgtgacatcagaattgttagaatcactgcaagagatgcaacgagaagaacaagaaagttttattgggcgactccgtcaacaaaaacagcaagcggataaaaaaagggatgattctctaaatgatattgacaaagaattaactggatatattgataatattcgagttgatcacattaatacagattattcatggtggaacagtttatataatacttcaatggatggaataactggcctgactcgtggtggtcttggttttgttgaaagtataacaaagtcagctgtggaagcttatcattacataaatccaactgatctagttcaaaacgtggctctaaatgcgagcaaaaaaaccatcgagggacttattgaagcagaaaactggaggttggggaataactgtattgaaggtgttaaggaagacgttaaagccaaatatcgtgcattaggtaaacttatcgatgaagaaaaagaaaaattagagaataaatggaaaaaaagtgatagcgataaagtcgaaatagtaacaagaggtgggcttgaaatagcgactattgccgctgcttttttaaaagtggggaaagtcgctgaaggtgctaatgctattaataaagtagcagaaggaactaaaataactgaaatatctgaaggcacttctgcggtaaataaagctactgacgtaataaaagcgacagagaccagtaatatatccaaaggaagtgaggcaatcaaaggggcagaaatctccgccacagagaaaggaagtaatgccgctaaaggtactgaggtgatccaaagcccagaaacaccgaaaataacctcatcagataatggcattaaaattgaaggaaaaacggaaagcgtatctacagaaacgccacctaataaagctaataatagccaaacggagaataaatcgacatccagcagcaaagagtccgatggaaacagtacttctagtgcaacctgtaaaggtgagcctgttaatgtggctactggtgattttatccaacagtggccaattattcagataccgggcttgttgccgttatcgttacatcgtacatataaatccacatcaaatgcaaagggactttttggaccgaagtgggcagacgaatggtcacgctgtttacatatacttgacggaaacatcatctatcaagacagtgatggtgctaattttacatttataactcccacagaggagatccgtgcaagaaatgcccatgctccccattttttactcaccggacaacgtgatggtgatttaaccctttttgatagtacgcaacaacagtttctacattttaatcacagacaaggaaaatatcgtcgattaagtgcaatcactgatttaaatcagcatcgtattgattttatatataacgagcaaagccagcttgtcagtgtgaagcgtcatgatggcatagcgttaatactcgaatatcaacaggataaattagttcgcatttgctctgaaagcacaacctcatctcctcgagattttgtacgttgcgaatacgatactcatggttatcttagtcaatgtcatgcctatcaacaaaaccacttatggcatcgttattctcctgagggactcatggtcgcttggggggatactgacagtacagaagtgatgattgattatgatgaacaaggacgtgttgtcgccacacgttcaccgtctggtttttggaatgatcgctttatctatgatgattatcagcgcatgacaacctacattgacggtgagggtggattttcacgttattattataacgatgataatctggtgactcgcactatcgatccattatggtgtgaaacgtatacggaatgggaacagcggaaaaagatagcagaaatcaatgagattggtgagcgcacagagtatggttatcactataatggactgcttgcctatatctatttacctgatggtaaagccatttactatgattataatgactatggtcaacttacccatttcacatcggcctttggcgatgaatggcagctaagctatgatgacaatggcaatttaaccatagtgacagatccgcaagggcgtcagcaggtctatgaatatagccaacatggtgaattgctcaaagccattacgcccaatggtgcgcaatggcaataccactataaccctgcacatcaactgattaaaaccaccaatccttatcaacacagcacagaatatcatagtgatgaattggggcgtttactgcactacactgatgcgttaaatcacaccacacgctatcaatacagcactgagcatgccagtaccaacggcagtctcagcaagattttattacccgatggggtcgagcaacagatagactatgacagtgagcgccgagttatcgcggtgacggatggtgaaggaaaaaccacccgttatcgttatgggccttttgatgtcttactggcaatgatacgccctgacggcagtgaaattcgctttgaatatgattcactgacacgacttaaaaaagtagtgaatgcgaacggggaggtttatctttacgaacgggataaagcgggacaaatcattcgtgaagttgattttacggggcgtgagatttgttatcgctatgaccgactaggacgtcgcattgccactcgctatccggataaccatgaactgcgttggcgctataatgaaagtggcttagtggttgaacaaagcgaatggtttgaagatgagcaagaaagccgctgcttatccacgactcaatatagctataacgcacgtcaacaattgataaaagcgactaatcctgactcggtggttgaatttgagtatgacgaccaaggtcgtttatgcagtgaacgtattaatggacaagagattgttcatcaatggaatgatactgataatacactggcattgacccgttttggtgaacgggagttgcattatgcttttggggcactgggggagttaacttcactgcaagtcaatcagcatgcaccacttcaatttagctacaacgcggtaggacaagagtatttacgccgtagtcacgctggatttgtcaattccagtcactatacggccactggtttactggctcatcaacgagcagggcgaggcaccgaacagtttttacaatcgatacaagcccatccccaacaaccgccattttgtacggatgtgcaccgcagttatcaatatgatcgcgcttataatgtggtgggcattgaagatgatcgctggcgacagacacgttatcactataatgccaatgaccaaatcactgagacacaatacagtccacaatggggtaatcaggacgaaaaattccagtatgataacaacctcaatatcacggagcacttaacaacgccgtcctcgtcgatggtgccttcagaagcacaaggggcgatgctacagctatttcagcaacagcaagcaggacgggtgactcgccgttacacagcgaagggatatcaagattaccattatgatgttaatgggcgattagctaaaaaaattgtccatacacgcggttttcgtcccagagagtggcgctatttatggaacacacaaaatcagctaaccgcatgctttacaccgaaaggggattgttggcactatacttatgatgcttttggtcgacgtctgagtaaaaccaaaactgtcgacagtgacttagcccatattgacccattatttccgcagattaagcctaaaatcaccacgtggcgctatttatggtcgggagaccaactgatagaagaaacgccgatatatgccgatggcactcttgctaatgcgcaacaagttcaatggctgtatcaacccggagaaataacgcccaccgcgcgttatcaacagggcaaactgcactatgtggtcaccgaccaccaaggcaccccgcgagagatattcagtgaaggcggacaagccagttgggcaggaaggttgaatacgtggggccaaatgcagttttggcgttaccgcgacggtaaagcggagaatgaccctaattataccgaatgtccttttcgctttgcggggcaatatgaagatgaagaaagtggcttgtattataatcgctttcgctattatgataaggagacaggacagtatctttccccagaccccatagggctattgggtgggctgaatccatatgggtatgtgcattgtccgacggggtgggttgatccgtttgggttgcaagttgtaaatgcttcattatcaggaaatagtcactctacaagctcagcacaaggagctctgcttaaacaatattacagcaccgcagaaagtgctaatgatgttgtaaatagtttaaaagcgacaggaaaattaccagataactatgtaacaaaagcacaggcagaggctgctgggtggtctagaggaaaagcgttaggaaattatgttccgggaggtcaaataggaggggatatttttgctaatagcacgaagatcttacctgatgcccctggaagggtatggtatgaagctgatatcggactgaataatagcatgtctagagcgaagcaaccaggtaccagacttttgtattctaatgacgggttaacttacgtaacttcaaatcattacgatactgccgaggcattaggcatttggaactgttgtaaaggaggttaa

SEQ ID NO: 298716 - DNA, 291 bp, Proteus mirabilis
atgaaagaaataacactagatgggaataaacaaaaaacacctattgaagtgtatcaacttttttctgaggaatttgattttggcccgtactttggaaataatcctgatgcgttatatgactttatggtgcctattgatgcagaagataaaccagtcattatattgtggtataatagtagtattttcaaggaaaagtatcctaaagaatttgcacagcttgtctctgtgctaaatagcataagtgaatttggaaaatttgaccaagacacttttcaatttaaaattctctaa

SEQ ID NO: 298717 - DNA, 213 bp, Proteus mirabilis
atggaacaattactaaccaaaaccgaaatgccagaatggttttcttacccacgtgaatttctcagaatagttgagcaaaatttacttaattttgatccttggattattttggaaggagagcggctcagggttcgttttggtggtttaaaaaaagatacccaacaaatagaaatattattccttttgcccatcgggaagataatgatgatgtag

SEQ ID NO: 298718 - DNA, 441 bp, Proteus mirabilis
atgatttattggatatttttagttttagctattatctgtgaagtgatcggcactttatcaatgaagtatgccagtgtcagcggtggttacactggtatgatcgttatgtggttaatgattgccacttcctatatctttttagccatagccgtaaaaaaagtggcattaggtgtagcttatgcactgtgggaaggtattggaattgtcattattacaacatttagcgtgctttggtttggtgaatcactgtcagcattaaaattaggtggtttagcaatgttaattgcggggatcactttgattaagtcaggcactaaaaaatcagcggttgctaaaaaaacaaccgattcggtaaaaaatattgccggaaaagccaaacaggttgctactgtggtaaagggagttaataagccaatttcttctaatgttaaagaggcttaa

SEQ ID NO: 298719 - DNA, 780 bp, Proteus mirabilis
atgcataatcagatattaaaaaaactgccacaaatagagcaaacgcatcaaataaaactactttatgttgctgaaagtggaagccgtgcttggggcttcgcatcaacggatagtgactatgatgtacgtggtatttttatacgacctcgcaatgcatatctttcaattgataaacctaaagaaacatttgagtggatagaaaataattggtttgatgtaggagcttgggatattacgaaagcattgcatctattacgtaagtcaaatgctatcttatttgagtggttacaatcacctattgtttatcaacaatatgctggtatccaaaaagaattatttgagttggcacaattatattatcaaccccaaatcattgttcatcattatagagggatcgcaaaagccgttagtagacatcattttgaagagagtcatgcaagtaaagcgatagatgagcccataaaattaaaaaaatatttctatctattacgttcacttttagctgcttattggacagtaaaaacggagaatatcccaccgatggagcttaatcagctaataaatatattaaccacagatgagcaaataattattcgagagttagtgagctttaaagcagataaagatgaacactttacttggctaccaaccgataatatgcaaaaactgatcacttttttatggcaagaaacagcaactcaattagcgaaacgcaccgtaccagatagtgaaatattaaataattggtttaggaaaatacttgatgaaactgaccattga

SEQ ID NO: 298720 - DNA, 270 bp, Proteus mirabilis
atgatattaagtttgaattcaattaactgtgataataatgaacttgttgatagaactgttttttttatctctgacggcaccgctattactgcagaagtcttaggccatgcggtactctcacaatttccattaaaaatgaaaagctataccttaccttttgtatcttctgtagaaagagcagaagaaataaaaaataagattaatgaaatttataaaaaaagtggcgccaagcctctggttttctactctattattagtctgtctccttag

SEQ ID NO: 298721 - DNA, 2043 bp, Proteus mirabilis
atgtctcaatcatcgcgatgcataaaggtgagtgttttagttgttgcaacagcgattagcagtgcattcgctgaaaataaaaatcaaatctatggagaaaaaaatagcggggagagaaacacacaaataataacggtttatgcaacaggtaacgagcgagatagctttacattaccaatgatgtcgaccgtcataaaaaataacagtgctttgacagaaacggctggaagtgccacggagttgttgcgtcatataccgggcatttcaatatcaggagctggccgcacaaacggtgaaactattagtatgcgtggctacagtagtaacggtgttttgacactagtagatggcatacgccaaggtactgatacaggtcatattgacagtatttttgtcgatcctctactcattaaacaagttgaagtggttcgtggcccttcagcacttttatatggaagcggcgccctcggtggggttgtggcatatgataccgttgatgccagcgacttgcttgcaaaaaatgaacatggtggtgtgcgtgttacagcccttggtaatacggcacaacagagtcaaggatttggcattaccgcttttggtcaacaagacaatttcgatggattactcgccctctccgctcgtgataaaggtacaactcgctatggaggcggttatcgtgcgcaaaacgatgaaacaatcattaacttattatctaaaggacgttggtttattgatgatagcaatacgttaagtggccaattacgctattatcataacaacgcacaacagcctaaggatccacaactcgccaataacccaacaccggctaatgtagcgacaaatcgtactacaacacaaaaagatgcacagttaacctatcaatatcatcctagtgatatgtcatggattaacctaaaaacacaagcctattacagcgaggtagatattaatgcgaaaacacaacaaaaaggatttgaaggtagagagcaaaaaacctatggcattaaacttgaaaatcgcactcaattagccacctacccctttgctgctcacgctttaacttatggcggtgagatctataagcaaaagcaatcacccagtgcaaatgccgaaagcttccctaaagcagatattcgttttatgtcaggctggttacaagatgaaatgactttacgtgatgtacccatttcattcatcatcggtacaaggtttgataaatatagcagtcaaaatgatcgttatgatgatatcagcgctgataaatggtcatcaaaaggagccgttagtattacacccacagattggttaatgctttatacctcttatgctcaagcttttagagcaccaacaattggcgagatgtataacgatgctaaacattttgatgccccattccccggagcaccaaccaattactggcgccctaaccctaatttaaagcccgaaaccaattcaacaactgaatacgggttcggttttcaattcgacgacttattatctaataatgataatctgaaaattaaagctgcccatttcaatacgcgtgcaaaagattatattgatacagatgtcgctatttttcagggatatacacaatcgacgaatattccaagagcaactatttggggttgggatatcgagatgaattatcaatcgaagttctttagttgggatttggcttataaccatacaaaaggaaaagataatgccagtaatgcctctattacctctattgagccagatacattaaccagtcgcctcgatattcccgtacccaatagtgatttttccgtaggttgggtgggacaatttactaaaaaaacagattttacaaaacatgatcgctttaatcgcccgaccaatcgccaacaagcgggttatggtgtcaatgatttctacctccgttatgaaggtagtgcttcattaacagggctaacaacctcactggtactgggtaatgcatttgataaaaaatactactcttctgcgggtattcctcaagaggggcgcaatgcaaaagtactggtgagttatcaatggtaa

SEQ ID NO: 298722 - DNA, 294 bp, Proteus mirabilis; identical to SEQ ID NO: 295186

SEQ ID NO: 298723 - DNA, 399 bp, Proteus mirabilis
atgagacaccctcaatggactactcgcctacctgaaaccttgaaaaatgccattaatcgcccttttgtatggggtgaacatgattgttgtttgtttgcttctgactgtgtcatagccgtttgtaatttcgatccctgcgaacgtattcgtgggcgttataaaacaaaaactggcgcattcagagtgttacaaaaagagtttggaacattggacggagccgtgagccgtttttttgatgaaattccaacaaatgaagctggtcgtggtgacattgtgatgttcgagggtgacgaaggggaaacgttaggggtgttatgggcgggtaaattatgggctgtctcaacagatggcgttcgtgcggtgagcaataaaccaaaaaaagcatggagagtacaataa

SEQ ID NO: 298724 - DNA, 645 bp, Proteus mirabilis
atgaaaaaatcaacccttatttctttattttttttgtctatattatcaatgtattcctatgctgaaataaataaagaatcatttgtttcgtcaataagccctataaatagacctatagataacaatcgttattcagccccatttggattgttttgggggagtaacttgcaagaaattaaaggtaaactcatttcagattatgaattaattgacgatcaaaagtcatgcccgctaacaatagtgagaacaaaaaagatagaaggggcaataaaatatcctggcaagtatgagcttatttttttaccaaaatataaaaattcaaattttagtggtttgattggtattaaatatacaagcgaacccaaaaataagaatgattataactaccttttgaatgatttaattaaaaatttaaatagaaaatatggtgccccagtagaatctgaaaccaaagatataaaagaaatttattatcttttcgaaaaaaataatgaacaggaaattagtctttctgcaggagagtctaaaaattattttaatatttctttatggtatatgttttatccaatagaatatcaggagcacatgaaacagaatagtgataaaataaaagaggaatgcatggagcagagaaaccctctttag

SEQ ID NO: 298725 - DNA, 582 bp, Proteus mirabilis
atgaaatatcatccctttagtaatggcatggttaaggcaattaatgaaggatattatttggttgttgcctctcgtttagatcttaaatcaggcgtggtgcgcgcgcataccggtgtgggtaatatcattattgcaggtgaaatttaccaaggtgttggtcagtttggtgccattgagtctgtgggggaaaatatgaccacaagcccacaacagcttattatgaaactctcaggttttgattcttcattaattggtgaagttatgaatgagcgagttcgtgggcgaaatgcgcagttgatgttagttgcattaaacgaagagggaaaacctacacttgctgaggttttgtttgctggccaaatatccacaattggcgtgacaacaggtgaagagaacgaaatagcggtgactgtttctaatcgatttgaacgctggtcttatgggttacctgacagatttactgatgaatcatggtctaaacgtaaaaagggagataggatatttcgttatgtggcgcagatggctgatcgggctatttattggggtagcaagaaaaatgcacctgcgtttatttataaatga

SEQ ID NO: 298726 - DNA, 600 bp, Proteus mirabilis
atggcaacgatattatcgtggccacgctccatcgtgccaaccacgctgagttggcaactcgtgagtaacagcaaaacctttacatcaacctttacaggaagtgtgcagaccgtgcgcttccctggttcgcgttggcgatgcagtatgtcatttaataatttgactgatgagcaagcaagggttttagaggcatttgttgctgagttagatggtgagagtggtcgagtgaaaattagtgattgggcgcgttctggtttaactcaacgcggtaaacctaaagttagccaacctaaccaatctggaaaactattagagagtaaagactggttacccaatagcattgttttacgcattggtgattatatcactgtaaatgatgaactgaagcgtgtgacagcgaatgtgatcagtgatgcacaaggaaatgcaacaattcctattgcccccatattgcgttacgcacctgcagtaaatgatttgatagaaaatgaagtaccctacggcatttttaaattaaccagtaatgatcagggaaatttccaacgtaaaccaggcatactgaccagcacttctctatcattcgaggaggcattaacatga

SEQ ID NO: 298727 - DNA, 3306 bp, Proteus mirabilis
atggccaccaatttagccgatttacgtgttggattattgctgaatgacgctagtttccgcagtaatatcactgatgcgatgaatcacgcaggacgtgaaacagagcgcttctcaagaaaagcaaaacaaaatgctaaagatgtttcagatagctttcattctattggtacatcagttaagcaggttgcgggatcgttagcgatggtaggcggggtgagtctttctatcgggagtattttaggtatttctcgtcaatatggacaagcgctttctgatttagcggcaattaccggtgctgcgggtgaacagctaaaagtatttgatgaagcagctcaagagatggggcgaacaacacaatacagtgctatgcaggcggcagaagctattaaattaatggcagcgtccaagcctgagctgatgaaaacaagtgaaggactgattaatgtaacaaaaagctccttaattcttgctcaagcttcaggtactaccctcccagacgcaactagaacacttgccttatcgcttaatcagttcggtgcatcagtatcggatgcggatcgttatattaatgtgcttgcagcaggctctcgatatggcgcttcagaagttaatgagactgcagaggcgattaaaaaaggaggtgttgcggccgctcaagctaaagtcccttttgaagaaatgaacgcagttatccaaacgttggcggagcgtgaagttaaaggcgctgatgcaggaacggcattgcgcaacatgattttaattttagaatcgagcactgacaaaaagctcaaaccatcagtggttggaatgacaactgcattggaaaacttagcacaaaaaaactacagcacaactgcgttaacaaaaatattcggtcgagaaaatgttaatgctgccatgatactgagtaaaaataccgataaggttcgagagctgactaaggcacttacgggtaccgaaactgcctatgagcaagccaaagagcgtaccaataatcttaatggtgatttacaaaatttagcgagtgcgtttgaagggctcgccattaaagcgggtcaatcggcaaatggtccgttaagaacaggcattcaatccgcatcagatgccataaatacgttatcaaataatttatccacattggttaacgtaggcacatatgctgtcttacctgttattggtgccagaatgacccgagggcttcaagagcaaaccaaagaatgggtgaaaaacgaagctgcagtgagaaataatgcgaaacaaatgagggagaatgctcaaaaaaccattaataatgccaaggcatctaaagatctagcgcaacaagagtcaagacggctagcaactcaatctgtgctgaataggcagtatggaattaacgcaaattaccaaagtagatatttaacattaagccgacaaataaaagaagcggatcgccaagaagcaataggaaaacagagacttatcgcagcaaataaccagctttcatatagccaaagggcgttgcgagcatcgagcatggcattgaagggcgtttattctgctttaggggggccagtgggtgcagctatgcttgctggttctgcaatctattattttcacaataaggctttagaggccagagatagcgctcttaatttaaaaagagctgtcgccgaaacaacagatgagttaatgaggctatctcaagccaaactggccgtaaagatagatgatgtgagggatagcctaaagaatatagaagaacaagaaaaaataattaaaaatcagttggaaggatatactgacacaaaaataaagcgtttagaaaatagggggaaaggagccttaggtggattatatacatggtatgaatcggctgatgaggcaaaagctacacaaaataaattaaaaagtgaactagaagatattataaaaaataaggaaattgaatcacaaacacttgaagctgcaatagaagctcaaaaaagattacttaatggagaaaagcctcctgaattgaaagaggacaaaccagcaggtgacagcggaggtggtggaaatgatggagggaatgatctagtttcagactctaaacaaaaggtgaatcaatatcatcaactacgcatgcaaatagagcaagagcacgcaaccagcttagagcgtatatcattaagtgaatcggagacgatgcgtaagcttcaggaaagcttaaaagctggtggtatgaagcaagaggaatatgagcgattaaaaacactcaacgctgaaaaccacatgaaacagcgtgcagagttagcagaaaaatattcaccgatgcgtacttcattgcgtaatgaacaagaaatgacaaaagagttgaagtctctgtttgaacagaggttgttaacagaaaaagaatatcaatacgcgcggatgcagatggacaaagatatgtctaagtaccgcctgtcagagcaagcaaaaggtatttctctcccgaatatcagcatccttggtgaaatagatcccgttattcaactcagaaatcaattggaagaacaaaaagcgctttatcaggcttactatgaagatgggttagtgagcaaagagcgctatgagcaattgattattgccgctacaaataaatcaaaagaagcacagtatcaatcaagtaaagagttttacgcatctcaaggcatgtggcaacgcatgcagatgaatttagttgatgcagttgaacaacgaaccgccaatgcaatgactggtatgctaatgggaacaaaatctttttcagaaggcattaaagaattttcttcctcattagccagttcaatcatttctgatcttattcgtatcgctattcaagctcaaattaccaacgcattgactggattgatgggtggttttgcggggagtggtggtgcaacaagtggtgctaaagcgggtaaggtgggtgtaaaagcgaacgccaaaggggatgtttacagctcgccaagcctcagccaatatagtaatcaagttgtgagctctccaacgttatttgcctttgcaaaaggtggtacgcctaatcttggtctgatgggggaagctggaagcgaggcgatcatgcctttaaaacgtggacctgatggctctttaggcgtgagagcaaccggaagtaactctaccgcttcaggtgataccattattcatcaaacatttcatgtaacaggtaatggcgatgaagtgctttatcaagctatgcaggaagcagcaagaataggagctgagcaaggcgcttcaaaagctaaatctgacattatgcgagactttcaaaccaatggaacgttaagaaggaatctacgataa

SEQ ID NO: 298728 - DNA, 351 bp, Proteus mirabilis
atgaaaggattaaaagcctctttactcaccgctaagccacagattattgaagtggaaatcttatgcggtgtgaaagtgaatattcgtcgtatgacagccaatgagctgatgcaacttgaaacggatgtctctgatttaaatcgtcaggggaaatttcgcgaatcgtcactaaaaaatgtcagtatgttgctcaattgcctcgttgatgatgacggcaagccgataaacaaatcattattacctaaaccagaagaactggttaacgttcatgataacgcaatattgatagaagcaattgatattgtgaaaaaacactctattggcactctagaggaggcaaaaaaaaactaa

SEQ ID NO: 298729 - DNA, 477 bp, Proteus mirabilis
atggcagttcaaaaaacatcgccagaatacgccatgctaccggcaggcactattgttaaatttggtaaagtgggtgacaccgccgagcaaatgaagccactcattaactgtaagtcactaggtgccaccggtcaatcaggtagctttgttgatgtcaccgttttaattgataaaaacaagcaatttatttctgacttaccagaagggcctgaaaagtcgttaggctttattgatgatccagaaaatgaaaattttgctgcattcctgaatgcagcagaaaagcgtgaaacggtacagttctattgtgagcttcctaataaacgtacggcaaccatgatcctttcattgtcaggctgggaattaaatgacgtctcagctcctgctaacgaggctattcaaatcaccgtaaaaggtaaacaaaataacctagtttggggaacctctacagtgacaccaccgacagaaggaaatgattaa

SEQ ID NO: 298730 - DNA, 405 bp, Proteus mirabilis
atgaacatcaccatgaaagttgagggattacgggaattaggagaggtattacagcgattagagaaagatgtccaaattaagatcctccgtcaatcaggaaaatcagctatggtgcctgttttagaggatatgaaaacacatgcagggtttgatgaaacagtagcaagcgaacatatgcgtgacagcataaaaatacgctcttcacgcagtaaaaaaacaaaaggagcggttttaattaccgtaggacccaccaaaaaacactatatgaaagcgagagcgcaggaatttggcaccattaagcaaatcgcccatccatttattcgcccagctttggattacaacaaacaagcggtactcaaaattctcgtttctgaaatcagagacgcactcagacaatttaaataa

SEQ ID NO: 298731 - DNA, 390 bp, Proteus mirabilis
atgatagaagttgatattaaagctgatctggaacgtattacgggattgttagcttatccgttaaaactcccatccgataaattagagggggttatctatcaacgaattagcgaccccaagatagacgctggattagcccacacctcacttgttcaagcccgttttcaaatcgttattcaaatacctgatgattatcccaaagcgctgatgcttgaatctaaactttgtcgcgaatgggagtctgttgtgcatggttatattggaaattatcccatacaaaccgttcagcgaggtaactttcagcaggacatgatcgaacaaacggaaaatcgcaaaatttatcgtatttatcgtgatttcattatcacctatcccgagggcgcatcatga

SEQ ID NO: 298732 - DNA, 327 bp, Proteus mirabilis
atgaaagccggtgaactcaacaaacgtatttccctttctcactatgttacagaacgtgatgatttagggagtgaaaaagtcgtttcaaaaaaagtggctgaggtatgggctaaagccgaatcgatgtcgaaccgtaagatccgtaccgcagaccaagatcaggtaattgaaacctatcatttcactattcgccctcgttatgatgttgatatggggtggctggtgggctatcaggggcgactatttactgtacgcgctgttgaccgaaatcaggcagatagaaccattattaccacggaggcgaatatacaacatgatagaagttga

SEQ ID NO: 298733 - DNA, 342 bp, Proteus mirabilis
gtgcctgcgatctgggtgatcgcaggtattgggggatttatgccactacccacactggaaaagttaaagcaacaatgccggctagatgaagataataccttcgaagatgaactgctaaaaacttatctgatggcggcaaaacaacgagctgaaggatatatcaatcgacatctttatgaaggaaatataccagaggaagatcctgacggtttattaatcactgatgatattgaattggctcttatgctggccgttggtaatttctatgaaaatagagaaacagccatattaccagcgggatttaaattactgctcgacccctatcgtcatattaatttgtga

SEQ ID NO: 298734 - DNA, 1236 bp, Proteus mirabilis
atgactatgaagcttcatgaattaaaacaaaaacgtaacactatcgcgattgatatgcgcgccattcacgaaaaagtgggtgatggtgtaatgaccgaggagcaacgcactcaatggaataaagcgcaaactgaacttgaaaatttagatgctcagattcagcgtgaagagcaactacgctcattagatcaagatttggttgatgacaaagagaaagaacagcgtggacaacaaccgaataaccctgaaacagagcaagcagagcgtcgtaatcaagcgtttgatcgcttcctgcgttgtggtttcggtgaactcactgcagaagaacgtcaagcggtcaaagaacttcgtgcacagggtacttcgcccgatgagaaaggtggctacaccgttcctactcagatgttgaataaaatcattgataaaatgaaagcctatggcggtattgcaagtgtggctcaaatcttaccaacgtcaaatggtcaagatattacctggtcaacatcagatggtaccgatgaagaaggggaattactgggcgaaaacaccgctgcaggtgaacaagatgttgagtttggtactgctattttaggggctaaaaagttaacatcgaaaattatccgcgtttccaatgaattattgcaagacagtggtgtagatattcaaacctatttggcttcgcgcattgcccaacgtattggtcgtggtgaagcgaaatatctgataaaaggtaccggaaaaggctcccctttacagcctaacggattagaaacagcggtgactagcacagttgatgtagccggcgcctcactaagttggaaagatatcaccgagttagaacatgcgattgaccctgcataccgtaatagccctaaattccgtcttgcttttaatgatgatacgttgaaaagcttaaagttaatggaagatgcgcaaaaacgccctttatggcttccgtctatttcgggtgtcgcaccagctcaaattttaggtatgcaatatgttgttgatcaggcgatcgacaaaatggaagcgggtaaaaaattcatcttctgtggtgactttgaccgcttcattttacgccgagtaacttacatgacattgaagcgtttagttgaacgttacgcagaatatgatcagacagctttcttagctttccatcgcttcgattgtgtgcttgaagatacttctgctattaaggcattagtaggtaaaggtgccagtagcacgaaataa

SEQ ID NO: 298735 - DNA, 606 bp, Proteus mirabilis
atgagcagtgaaaaagaaacacgatgttatgtcggtgaggttcgggctgaagtaggagaggaaaataaaccgacacatatcgtgggtttaggctccgttttcgactcccgatccgaactaatttatggattccgtgaaattataaaaccaggggcatttgatgatgttcttaatgatgatgttcgtggcttatttaatcatgatccgaattatattttaggcagaacaacagcaggaaccttgtcgcttagcgtcaatgagcgtgggcttgtttacgacataacagcacctgagacacaaactattcgtgatttagtgctggcgcccatgaaacgtggcgatatcaatcaaagttcctttgcctttcgtgtcgcacgggatggtgaagagtggtaccaagatgatgaaggtgtcgttattcgtgagataacacgattttctcgactctatgatgtcagtcctgtcacttatccagcgtatcaagatgcagactctgcggttcgctcaatgaatgcatggaaagaagccagagacagtggcgatcttcaaaaagcaattaatcaaaaattggcgcgtgagcgtcttatgactttactcaatgcataa

SEQ ID NO: 298736 - DNA, 1230 bp, Proteus mirabilis
gtgctaattgatgctttgtttcgcaacgactcacccagtttagaaaaccctgaaacacctattacggcagattccattgataatgacggattatttacggcagatgtgtatgttagccctgaaacgtcaatgaagttggcagcagtttacgcttgtatttatgtgctttcttcgtctatcgctcagatgcccttacacgtaatgagaaaggtgggaaatcgcgtcgatacagcacgtgatcatcctgttttttatcttgttcatgatgaacctaacgagtggcaaaccagctataaatggcgcgaaacaaaagagcgccatgtattgggttggggaaacggttatacccaagttatccgtaatcgaaaaggtgaggtgacaaacctagaagcttgtatgccgtgggaaaccacactgatgaataccggtggtcgatacacttacggtgtttataacgaattggggaattttgccattagtcctgatgacatgatccatattcgagcgttggggaacaatcagcgaatggggttaagtcccattgctcagcatgcagaaactatcggtatggggatgagcggacagaaatatactagctccttctttgggggaaatgctcgtcctgcggggattgtgtcagtaaaaggtgacatacagccagcaggctgggaacgactgaaagatatgtggcaaaaagcttctcgaatgttacgaagccaagaaaataaaaccatgcttttacctgcagaactggattacaaggcgttaacggtttcgcctgttgatgctcaattgattgatatgctgaaacttaatcgctcaatgattgcagggatcttcaatgtgccggctcacatgattaacgacctcgaaaaagccactttctcaaacatctcagagcaatccatccagtttgtacgacataccatcatgccatgggtagtgaactgggagcaggaattaaatcgacgcttgtttactcgacaagaacgaatggctggcttttatgtgcgatttaatttggcggggttgttgcgagggacaccgaaagaacgagccgatttctatcattttgctattacagatggttggatgagtcgtaatgaagcacgtgcctttgaggatatgaatcctgttgatggccttgatgaaatgttggtgagcgtcaatgccacccagtctgcgggagaaaagacagaagaacaaaaaggggataacgatgagcagtga

SEQ ID NO: 298737 - DNA, 162 bp, Proteus mirabilis
atgaaaaacttattacttgatattactgcattggctggtgttagtgcggttatggcggggtgttacctaaaatatggcgttgctaacacgctgattgttgggggatgcattgcaataatctatgccttggtggtagccatgagggggaaccgtgctaattga

SEQ ID NO: 298738 - DNA, 1731 bp, Proteus mirabilis
atggctacttatccgagcgtcaatgctgcaaaccaatacgctagagatattgttagcggaaaaatttcatcatgtatttatgttaaacaatcctgtcaacgtcacttagatgatctccaaaaagcgaaagaaaaagattggccatatcgttttgataaagataaggcagagcgcttttgtcgatttgctcaacttatgccccacactaagggagagtgggcaaagcgtaaattacggatcacactagaaccgtggcaactttttattttctgcgtagtttttgggtgggtaaaaaagaaatgtggcaaccgtcgcttcactgaaatgtatgttgaggtaccgcgtaaaaatggtaaatcattgattgctgcagccgttggaaattacatgttttgtgctgatggtgaatatggtgcagaagtgtactgtggtgccacaacagaaaagcaagcgtggaaggtatttgagccagctttagccatggttaagaaattaccctcactgaggaaacgatttcaaatcaaaccatgggcagaaaaaatgactcgtcctgatggttctttatttgctcctttgattggagatcctggtgatggtgataacccaacctgtgcgattattgatgagtatcatgagcattcaacagatgcgttatatacaacaatgacaacaggtatgggggcgcgagagcaaccattaacgctaattatcacaacggcaggatttgatattcaaagtccttgttacgataagcgagttcaggttactgaaattcttgaaggtattcgtactggtggggcaaatgagcagattttcggcattatttataccatagataaagatgatgattggaaattaccagaagccattattaagtctaacccaaattgtgatgtgtcagtaaagtacgattatcttttagcaaaacaagagcttggtattacaacaccaagacaaacaaaccagataaagactaaacatttcaatatttgggtttctgcaaaatcagcgttctacaatatggatcattggcgtaaagctgaagataaaagcctaaaactagaagatttctatggtgaagatgtctatttaggtattgacctagcaacaaagctggatttgaactgtgtagctcctatttttatgcgagaaattggcggtaaaaaacattatttttctatatctccattattttttgcgccagaagatacgatttattcaaccgatagtgacaagttgaggactgcggaacggtatcaaagttttgtcaatcagaaagcattaataccaagtgatggtgcagaggttgactaccgtttgattgaagaatctatcttaaaattgagagaacatttcagtattgtttccagcccaattgacccatttggtgcggtggcgttatctcatcgactacaagatgaaggattagagcctatttctatcactcaaaattatacaaatatgagtgatcccatgaaggaaatagaagcagctttagcttcaggacgatttcatcatgatggaaaccctattatgacgtggtgttttcaaaatgtggtcggtaagtatttgccgggtagtgatgatgttgttagaccaacaaaagatggcaatgaaaataaaattgatggagctgtttcagtcatgatggctgtgggtagggcaatgctgaatgagccaagagacttcctttcctctttagatcctaacgaagaccttttattcctatga

SEQ ID NO: 298739 - DNA, 459 bp, Proteus mirabilis
atggcagccggtatccgtgcatctggtggtggccggaataaaaatttaccggctaaaaattctaagagtagcatgacaaggattgccccacctgcagaattgatgggagagtcagcaataaaactctggaagacacaaagtaaaatcttgattgaacgtggaacatttgaacttgaagatgcccctcttttagttgcgtattgcaatgctttcgaactcatgcttacagcagaaaaggttattttaaaacaagctaaattagatttggaaagtggtggtattactgaaatgagtggctcgggtggattaaaaaaacaccctgctgtcgccgttcgtaatgacagtgtttcacaaatcgctcgtttaggttcattgcttgggttggatccacttagccgaatgagaatgacagggcctagtgaacagaataatgatgagaacgaatttgatgagttttaa

SEQ ID NO: 298740 - DNA, 198 bp, Proteus mirabilis
atgacgcaagatgaacaaaccttatttatgtttaaaggaatagttgctgaactaccagaacaaagcagagctaaggttgaacattgtattgctgaaataaacaagttgcttgcggaatatcctgatggtgaagcattgcttgctgtgggctatatcggtgccgaacagcagatgaaaggtaatattggtcaaggataa

SEQ ID NO: 298741 - DNA, 351 bp, Proteus mirabilis
atgccacctcgcatacctcgcgcatgtcgtaaacagggatgcgccaagacaacaacagaacgtaatggttactgtgaagaccatcaaaacctaggatgggaagcccaccagcgcggtaagtctcgtcatcaacgtggttatggtaccaagtgggataaactgcgagtacgtatactcaagcgtgataagtatctctgtcaagaatgcttaaggacagggcgagccaccggagcgaaaacggttgaccatatcattgctaaggcacatggggggaccgatgcagaagataacttgcaaagcttatgctggccttgtcacagagctaagactgcaaaggagagaacgctatga

SEQ ID NO: 298742 - DNA, 237 bp, Proteus mirabilis
atgtcagataaaaaagagataggcgagttgatctacaaagtctcagtagatacaagtgagttagataagttagaagaacaactcactcgcattaaacaactgatgcaagatgtaggtatgaatcctaaatcaattcctcaattttcctatccgcacgctggtaagttttttattaaagatgcccttattaattcggctgtgttcaatggtgtgcttgttagtaataagtcagagtag

SEQ ID NO: 298743 - DNA, 405 bp, Proteus mirabilis
atgttttcagcaaggccaggctctaatccccccccactttgcatcgcttgtaataatagacgctctagtcccgcatctaatccgataacttgtatctcttctttatcaccaaaccagtgttgtgttatcgccctgcgtaatgccacacgaactaccgccgttaattctgccggatctttttgctcaggtgcatgctctgctagtgcttctaatatggttctcatatcgcgaataggcacttgctctgccaacaggttttgcaatactttatgtaacaccgttaatgacagcatatcggggatcatattttccgtcattttcggtagttctttgcttaccctatcaaatagcatttgcgcttcttggcgaccaaataactctgatgcgtattggttaagtacatga

SEQ ID NO: 298744 - DNA, 1149 bp, Proteus mirabilis
gtggctgaagatagcgatctcgaaaagacagaagaacccactctccataaacgggaaaaagcgaaaaaggatgggcaaattgttcgttccaaagagctttcgtccgtattaatgattttagggggcgtcagtctactgtggatgagtgggcgttttatcactcgtgagctttatgccatgttaacggaaggttttacttttaatcaccacataatcggcaacgagaatttattgatcccccgttttgccagtttaatgaaacaggctgtatttgcgttatcgccagtgtttctaggcttggtcttagtggcaattggtggttcagccgtattgggggggattaattttagtagcaagtctatcaagtttgatccgaaaaaatggaaccctatttctggcttaaaacgtattttttcaatgaatgcgttagctgaattatttaaagcgattttaaaatcactctttgtcggcttagccgcaacggttttcttatggcacaactggaacgatattcttcatttgatcacgcttcctcctttaagtgctttagctaatgcgatgcaactgcttatttttgcggtctatattgcggtttttatgcttatcccgatggtggcattcgatattatttttcaaattcgtagccatttgaaaaagttacgcatgactcgccaagaaatcaaagacgaatttaaacaacaagagggtgatccgcaattaaaggcgcgtattcgccaacaacaacacgagatgtcgcgtcggcgaatgatggcagatgtgccaaaagcagatgtcattgtcactaacccaacgcattacgcggttgctttgcaatataacgacaaaatggtagccccaaaagtacttgctaaaggggcgggcgccattgccttaaaaattaaagagattggtgctgaacatcgaattccgcttctagaagcgccaccgcttgctagggcgttatatcgtcacagtgagataggacaggctattcctgcaacactctatgccgctgttgcagaagttttagcttgggtctatcaactgaaacgatggaaaaccgaaggtggtttaaaacctaaacaacctatgaacttgccagtgcctcccgcactggactttgctggagaagataatcgtcatggctaa

SEQ ID NO: 298745 - DNA, 2223 bp, Proteus mirabilis
gtgcaaccactaaatcagttattagttgataaaattgaaaataaaaaaaatgctatctttaatgaaaataatagtataactattgatagtaatgctgctcttcaattaaatgtctcttcatttaatttatcattagatgttgataagtcagcttttgcacccaaagaacatgctagacaatccatattaggaaattcatctgttaattcattttctgctgtggccaactatgatttgggcgtctttcaaagtcgtgttaaaaacgcccaagattcatccagtagctactttaatttagacacattattagctaaagctgaacaccattttaatattaatgcatctgcctacagtataggtaaatccaattccaatattgaactctatagagcaatgtatgaacgtgattttaatggattgcgttttgctatcgggttaatgagcacttggaatttacagtccttagccagcttaacagtattgagcagcagtaaaatttatgcagcatcaatcgggaataattcatcaagtagggtggtgaataaacagcaatcattaactccgatttatgcttttttaaatagtccaggtgaagttcgtatttatcgccaaggtaaattattaaatattcaaaatttcccgatgggtaattttgaagttgataccagcatgttgccttatggtatttatgaagtaacgattgaaaccgttattgatggcaaggtagtgacaacacaacatcaaaccattaataagtcttttggcaccgctaacggtaattttgaccaattaaattgggaaatttatggtggctatattgattttgataaacgtcattatatcaaagagggtggcgcttataaccaaactcccgaaaaaagttatttaatcggtagctcttttgcttataactttcctctgttatccggtattcgttttcaaatgtctaactatggatttgataaatttattgtacaggagacgaatatcagtgtagcggtaaataactatctttctattgcttggcaaggaatgttagagaatcatggtagtcaccgtaatattagtacgctttctattaatatcccagaaggctatggttcattatgggcatctaaagagaaaactatcgtaagaggtgatttaccgctatatgaggctgacagttactcttatggaggaactattaatttcgataagataatggatagaacgggttcatttactatcagcaataccaaagataagcgagttggtagtgattctattaattatgaatatgcaaatacattattttcgggacgttatggcacggtaggattaagagctggggttcagcgttatcattatgataatcaaaatagcactaatgaaaaatttattaatcttgatttctctttacctctttcaacgtggttaagtactgggatctcttcaaccaatggcaatgtaaaagccaatatttatgtgaataagaattttgaaaactccgtgatcactaatgcgggggtttctgtttctaagttagtgcatgataaagataatggtgaatctgacttctcaactctaggttacgcttcttatgatacgaagtataactctggtacggtgaccattaatcgccctgataataaacgactcaatggtaatttaacttctcgtggctctatagcttatagtgaagggatgatcacacccagtggtcaacaaggtaaatctggcattattatcaattcagacattaaaggtagtggcagtatgctcgctaaagttaacgggcaaaattacccgattagtggaaaaaatacctttattccattatctccttattcagattatgacatccaattaatgaatgatggcaaatcgaaagacagctttgacattatttctggccgaaataaatccgtcacattgtatccaggaaatattgccttttatcaaccggaagtgaggcaattagtcacggttttcggacgtctgaaatcccctaatggtgaacttttaaaatatgcttcaattcgaaatcatattggtcgaactaaaacagatcaaaatggtgagttttcaatggatgtagatgtccgttatccggtgatctcgttactacaagaagatcagcaaacaatctgtgaagcagacttagatcttaaaggggcacaaggagcaatgtgggttggagaggtaacttgtcaacctcagtctagtttcgtaaaaagataa

SEQ ID NO: 298746 - DNA, 1608 bp, Proteus mirabilis
atgaatagcaaaatattttttttactcgtagcaccttgtcttttaaatttatcgctgtctacaaccagtcaagccgctacggtaactaatagttacgtttttattgagaataatgtagataatgaatattttattaccccaagaacaaccgatccgcgtttttcgggtgccaataaatatacgcgttattcaaaatcttcacagctcagtttaggttatatggggtataccaatacatccattcaggccaatcaatatgtcgatatttggctagaaaattctcaaatagataagccatttgtgggtaatcgatgtatgaggcgttattgtacagatgatagtggctattggcctgcgcaatatataggtaaagatggggcttataaaatagttcagacgaatactaacggtgaatcggcttatgctcgggggatatttagtgattcggcatacctgtattttcgccaattgcctgtaggcactatagagacatatagttatagagcctgtatgacaaaaacagactatgatcccagtaaaggcgaatcttgccaaagtatcggcggaagaatgcttgcatcacatgagtttaatatcactaagtctgggcatataaaactgacctcaacaggtgctttacaagaaatatttattgatagtaacggtaatcccacgattggcttaggctctcagttttgccgagtgggtattgtatcaaaccaaaatggtattatttgtcaggtgattgatcatgaaactactggggatatatttaccaatattaggcttaatttaaaaattaataatacactgatcccttttacgccagcggcaaatacaataaaaattggccccgatgatggcagtaataactggtataattataatacaacatatcccgctaattattattttaaagttaataataaaaatgtttctatctttttatctaatacctttttaaaaagactcgtctctagtaatgtcgactttaaaaatagccaagacttttttaccttttcatttaccaatacagcagtgcctcaatctgggtattatgagttcaccccctcaaatacacttattctgaaaccgagagattatggcataagcattattcctgctgattttaaccctcatcaatctaaaacgggaaaagtgggtaatgaagagccacccattgagtttaattatattgttaccaccagtggccctagacaagcagactctattactgcatctgtagaagggccacaaacaacattaaaagggcaatcctattgtttattctcctccagtgataaccgacttaatgtggcttttccggcttatctctcatttaaaaatagtgatggcacggatgcaaaatatagagcgagttgtgatagtcatgaaatttcattaaaaaatgcgttatggacagaaacaccatgggatagacctgatgaagacttaggctctttttatagaacgaacctagatttatcttttccaatgaatgatgctaactcatttttcactttagatggtattgattggctaggaacagtctcagccagtggaacggtaacggttaaggctatatggactgggcctgatattaactaa

SEQ ID NO: 298747 - DNA, 939 bp, Proteus mirabilis
atgagtattttttttaatcccgctaaacacccacatcgcttaaagccacaaccattagggacgcaaggcgagcactataacgaagattggcccatgcctgagctcgattttttagagaccgtcgataaacaacagtgcattctagttgataaagaaatacgccgacgtgatgcgtttgctttccctgggtttattaccggtattattacctttattatggtatttcattttgtttttacagaacataattcaaagtatatccgttttaataaaaatcttcatgactatacattagaatataaagcgcaatatgaagataaaactcaaagagataaactaccttcatttatacttgataagtacgccccttatttcaatcaagaaaaactgtctattttagattatattcatgtttattttgggggacatattacatcaaaaccctatcaaaatacgctattttttctttctactttcatcgcacctttcttcttaattggcttgggtggctatcaatcttttttcaaaaaaaatccaatactcgtttttaatcgtgaaagaaatctggtctatacctggcgcaaaaataaggtatttattgcccgctatcctgaaattggtatcggtaaaattggtaaaacacttacctttcaattattcgggttagataagtcaaaacaaactttagtttctgaattgtttttccctaatgtctatgtttattcagtctacaataccagtactgactatcacgaccagcgcttcattaattttatcaatacttatatgcgcgaagggcgtgatgccattattccattcgattatcaccgtaaaaaacccaaagtgtattttggcaaaaacccacctcctgctgattttgaacaacaggtcgaacaaattttagcaaagcttgatcaggagaaagaacaccatgcgtag

SEQ ID NO: 298748 - DNA, 912 bp, Proteus mirabilis
atgaccagtttacgcacagtatcaaaacaccctgaacaattagaaaccacaccattaattgcggaaagtcatcactacgatgatcctttagagcctcaaaagctggtatttttagaagcggttaatcaacagcgttgtgtaattaactcaccacagcgcaatagccaactcactaatacaatacctttttttatcatactgttagttatggccgtttatacactgtttagttttattgaaaaccataaatcaaattattttacccttcaagataactctaactattttaatgaaaaatatggtgtcgataacttaccaatagggttatcaaactatttgccatatatgaaagttaaggaaataagtatcggaacatatttaatcgattactatacggataaaatttacaaaaatgataaatttaagatattgatgattatcggctggctaatttttttccccggttttttatggctatttggctatctctctttctttacgcctcctgtatatcttattgctgataggcaaagaggaatactgtatagctatggcatggggaaagtgcgtttaacccgctataaagaggcgcaatttggttatgcgggcaatatgttggcaattaaactatatagcattaatgaaaaaacaggccaattaaaaacgatcctctatcgccccaatgtgtcccactactccagtttcctaaccagtaccgacagtgaaaaccaccgttttatcactttccttaatgcctatatgcaacaaggtcgagatgccgtttcgcctgttgattaccaagcccgtaagccctttttatcttttggcaaaaatccacttcctgctgattttgagcaacaggtcgaacagattttagcaaagcttgatcaggagaaagaacaccatgcgtag

SEQ ID NO: 298749 - DNA, 288 bp, Proteus mirabilis
atgtgtataagagacaggaatatattaggtataagcatttctcctgtaggaactctttcgataagtcgtcagttaaaaaaagagatagaagttaaaatattttttcttattaataataaagataaatttgtcaagttttcagaaatggatgaaatgagtgcaatattttctttagctggaaaattatcttatgcattaggtgttgatccagtttatataaataagctaagacgtaaatatggtaattcaataattaataaattaattaaaaataaaggtgatttgtga

SEQ ID NO: 298750 - DNA, 405 bp, Proteus mirabilis
atgacgaatgatgaattaattgataaactaaacaatttttttcctgtgtttcgagaaatacatggcgagcatgatggtatttatctaatatttggaggttttggtacgttttttgctgatctgataaatctatatggctctggtaaagtagatgagaaaagctatttttctcaaaatatcgcatctatttacaaggataaagatatattaataaaagaaataaagaacatatttagttttgtcgatgacttatttctttatcaaggtgatgacgtaaaagacatattaaatacgtgtatctttgaagcaataatgggaagtgattatagttataatttggctagaaaatatcttagcaaagaaacttataatcactatttggaaataactaaaagagttatttag

SEQ ID NO: 298751 - DNA, 570 bp, Proteus mirabilis
ttgcgtcgtttcgtttaccagtttaaacccattattgcacctgagccgattgtgcgttttgaaacgcctctcggtcagcagatgcagattgatttcaccactattcgccgaagtaaacagaagctaaaagcgttcgtggcgacactgggctattcccgagcttgttacgtcaagttctttgataatgaacgagccagcacttggcaacaggggttaaaagaagcgttcgattactttgggggcgtgcttcaacaagtactttgtgataacgccaaagccctcattgtcaagcgagacgcttatgctaaaggtgaacataaactgcatgttgaaatgcttcagatgtcaaaaaattatagttttaagttgaccgcttgccagccttatcgggccaaaacgaaagacaaagtagagcgttttaaccattacctaaaaaatagctttatcgtgccatttaaggcggaacttcgcgctcaaaaccttgaattggatgttgagatagcgaacgcaaaaattggtccatggctacagcgaaaatggggtgttggtaagaatgtattattgaagtga

SEQ ID NO: 298752 - DNA, 141 bp, Proteus mirabilis
atgatcagtgatactgtgaatgaaaggattattagggctgataaagaaggaggtaaacaaggggtaatagatacattatctgaaattcgagaaatcctatcctctgctagtagaaatgctaaatggaaaactatattatga

SEQ ID NO: 298753 - DNA, 564 bp, Proteus mirabilis
atgattaataaagtctattatttaaaatcagatttggaaaactatagttcttttattcaaaattatcctgatggagaagaaagtataatagggagagcgatggatcagcgatggtctaaatttactgatgactatactgcaatttcattagagttaaattccaatgattttggaagaaagaattataaatttgattttagtagttttttgtcgccatttatggtttttagtgaagatgcattggtgtctttatctgatattttgagttcaagaggacaagtattacccgttaagactgagagcaaacggaagaaatttgttggttattatccaactaattcactttcaggatgttttgacagaaaaaattctgtttatcgggaataccccaatggattaatgattgaaaagccagttctcataaaaaataacatcactgatgagtatttatttactattgacgaatatattagtcgaatctttgttacggataaatttaaacaaagagtagaagatgcaggtttaacggctttcgatttttcagtggaaatagaattatcgtaa

SEQ ID NO: 298754 - DNA, 918 bp, Proteus mirabilis
atgaaagagatagaacaattttatcgtgaattagaatcagctattaattttattttagaagataaagagtattatgattttatagataatgctttagtcgattatatagaaaatgctactaataagtttatttatgaatggaatgatgatttctttgaaaaaaaatgtaaaataacacttaatattaatgcattactaaatgaaaaaagtagcacaatcgtgcttttattaagagatttcttaatggaggaaaaagataattatattgagttgatcaattatttttatttttctgtattggagtgttattgtgaagaatactttggcaacaaaatagaaaaaaatttaaatgaactaattgctgtatattttatcacattgtcttatttttctctagatgatcaaatagttgtttttaaaagtctaattaaaaatattaaagctaataatgaatttattgatgatgagttgtcagagactttaataccacttgttttttatctttccaaggaaaaattaaactcagttaatgataacttgaataatgatattgagtggggaataaaagaatttgattttaatttaaaatataaaaaatttgttgatggttttttccataatgaagatataagctcattattaaatgagttttgtaattatcacatatcgataaattatcctaaaattaactcaactgaaaactctaatcatgtaatttacaaattaataccttgtgaagtaatagtgttacttagaatgagagagttaaataaattacctattaataatattgatcatcaactaataaatagatttaagatgtttttaaataaagatatacctttaagtaattttaatcgttcattaagaaaatctattttacataaagcatcacataaaattagtcagaatcactga

SEQ ID NO: 298755 - DNA, 1476 bp, Proteus mirabilis
atgaaaacgcaaacgataaataatccgagaacccctacacttctcgagtcactgtttcctatatttacaatggtggtgctattaggcggaggttacgccgcttttgatttacctcccgaaccactaatggtgttatcaaccgtcgtcgcggcattattagttaaacgattaggctatcgttacgacgaaatcttaacggctatctcacaaaaaatcgccaaaacgatgccggctttgctgatcttaattagcgttggtttattaatcgggacatggatggtgggaggaaccattccactgatgatctactatggattaaagatgatcagtcctgaaatgctatatgttacggcactgctagtgacatcattagtatcagtttgtactggtacttcatggggctcggcgggcactattggcgtcgcttttatgggcgttgctgtcggtatggaggctaatcttgcagcaactgcgggtgctgttgttgctggtgcttactttggtgacaaactctcaccgctatcaggggatactaacctcgctgcaatggcggccagaatagatctttatcaacatatctgtcacctgctttataccacattaccttccttgatcctcacagcgattatcatgactgtttatggtatgaatggcgatttagcaggacaaggagtgcctgaaaaagtcaccttaattaccaatgggttggagaatatttatcacttcaacttgatcctgcttattcctgtattagtcattttatatggttcggtcacgaaaaaaccgactattccagttatgctggcctctgccgctattgcgatgttgaatgcttatcttattcaaggatttggcttacatgatatcgtaaaaagtgccgttgatggctttaatgtctccatgatccaaggtaaagaagtacctgaattattaggtaatttattaaatcgtggtggtatgaactccatgatgagcaccctacttatctgtttctgcgcactctcctttgcgggaactctatctttaagcggtgcattagaagtgatcgttcatgcactgctaaaaatggtgcattcaacgggatcgatgatcttagcgaccattgcctgtggactgaccatgattggtgttacttgcaatggacaaatctctattcttattcctatcgaaatgttacgtggtgcgtatattgaacgcggtttacaccctaaaaaccttgctcgtactgttgaagattccgccactatttttgagcctatcttaccttggactgctgccggcgcttatatggcgggtacattaggtgttgcaaccctaagttatttgccttgggctgtattgtgctggagtggcatcttctttgccatgttatggggtttcaccggttttggcattgctaaattaacaccagaagagcaggaagaaatgactgctgagcttggatcacattcagaattacaacttgatactaaataa

SEQ ID NO: 298756 - DNA, 1170 bp, Proteus mirabilis
atgaaaaaagataaatattttcgtatcgtgctgttattcaacgctaataaagtctatgaccgacaagttgttgaaggggtaggtgaatacttgcaggcgtcacagtgccattgggatgtatttattgaagaagatttccgcactcgccttgataatattaatcattgggtttgtgacggcattattgcagactttgacgatcccattattactcaacatttaagccaatcacccttatctgttattggtgtcggtggctcttatcatcaagcaaaagattatccttctgtgccgtatattgctactgataattaccaattgattcatcaagcttttttacatttaaagcaaaaagggcttaaacattttgctttttatggattaccggcaaaaaactacccgcattggtctaatgagagagaatatgcattccggcaattagttactcgcgaaaaataccctggcatcatttataacggtatggatatcacacaagagaattggcaacatgcacagaatcgtttatctgactggatacaaacgttgccaccacaaactggtattattgccgtcaccgatgccagagcgcgtcatttactgcaagtctgtgataacttaaatattaatgtgcctgaagaaatcagtattataggcattgatgatgaagatatgacacgttatttatcacgtatagcgttatcttctgtagtacaaggttcacgacaaatgggatatttagccgcgaagcttctgcatcaaatattagaagggcatctaactgaacaactaccaagaatattagttcctccagtaaaaatcattgaacgtcgctcaacagactttcattcatttagtgatccaaccgttgtacaagcaatgcactatatttattacaatgcttgtaaaggaataaaaactgagcaagtgttagacgctgtaaatatgtcgcgttctaatttagaacagcgttttaagaaagaagtagggaagactatccatgccgtgatttatgaagagaagctgaaaagggcgaaaaacttattagccacaacaacattatcaatacaagagatttctttgatgtgtggctatccgtcattacaatatttttactctatttttaaaaaagagtttggcatgacaccaaaggattttagagatgagaattga

SEQ ID NO: 298757 - DNA, 561 bp, Proteus mirabilis
atgagaaatgatgtttataacaatcgttatcatgttccagtaatctcatcaccaaaccctgccaatgaagccatgatgagagattctgttaatatttacgtcatgattaataatgaattcatcggtcatgtaggattagttattggtaatggggaagatgcattgttatatgatcctgctggaagctataccggatgtaaaaataatcaatgtgaagatggttcttacacattaagggggtcaggtgatttctttcaatatcctgatttcaattgggatgattacctttcttaccagttatgggatggtgatgatatcgttattatagagtttgtaattccgagagaacaagctgaacacattaccaaacttatttatgagcttggtggtgctaatgctctattttgtgctactagaatcactcatgttttaaagttatctggtggtgtatttagtaatcttgatactccaatttatatacgttctccttgggagttaaaaaaacaactgcttgatatctattttccagagcgaggaggaatcatttcaggtgcgtattaa

SEQ ID NO: 298758 - DNA, 474 bp, Proteus mirabilis
atggctgatattatttacctaacattaaatggaaataaacaaggacttatatctgctggttgttcttcttatgattcaataggaaatcgttatcaaaataatcatagtgatgaaattttagtatattcaacagattatgatattagtcgtcatcagaatatatctcacgccccttttgtttttgaaaaagctgatgataaatcctctgccttgcttttatctagtataacaaataatgaaattttggaatgtgattttaaatattatcgtatcgataaaaacggagggttattacactataaaacgatcaaattgacaaaatcatcaattattagaataaaaaatactcaccccaattctttattaaaaaacgaatattacccaacagaaaccatttcactacgatatgaaagcattacagttaaccacattgtggccagtacatcaggatatagcataagtaataatatttaa

SEQ ID NO: 298759 - DNA, 627 bp, Proteus mirabilis
atgagtgacttacttaatcggttaaaaaagctggcaaagcaagccaatattgagttaactgatgttcaagctcaaaaattaaccgcttatgttgctatgctcgataaatggaataaagcatataatttgacctctgtcagagatcctcaacagatgcttattcgtcatatcttagacagcatagttgtgagtcaataccttgaaggaaacaactttatagatgtcggtacagggccaggattgcccggtattcctttagcaataatgcgtcccgatcaccactttgtgttacttgatagcttaggtaaacgcgttcgttttatgaaacaagttcagcatgaattagctctgcataatatcgaacctgtgcaatatcgagttgaagagtatcaagtagaaaaaccatttgatggtgtgattagtcgtgcttttgcctcgatgaaagatatgctttcttggtgttcacatttagtcactgaagaacacgggcgtttttatgcattaaaagggcagattcatcaagaagaacttgatgagctttctgaaaatggtttaaagatgcctgaaaaggtgattaatttagcgatccccgaattgaatgaacagcgtcatctggttattttttaa

SEQ ID NO: 298760 - DNA, 720 bp, Proteus mirabilis
atgtcacgcccttcgttaaaaaatgtaattgtgtataaagcacaactaccaagtgcagaagcgatgtccgatcacctaagtaaaatcccatttactgaagtgttagagtcacatttttgtagttatggctacataccaaacccagtcactaatgaattagttacccctattacagacgggtatttgctgacatttcgttttgatcagaaaatattacctaatgctgttattaaaaaagaagttaatgagcgcattagtaagttaaaagaggatgggattgaatttattgagcctgatattaaaaatacagtcaccgctgaatttttgagaaaggcgtttgtaaaaacaattactacactcgttttatatcatcccagcaaagaatatttattagtagctagctctaataaaaacattgccaattcggctataagcacattaattaaggcgtgtggttcagttaaaacagaaacaattcatatcgatgatgtatcacaaggtctaactactagattattaaatacattaaataataaagaggaaacggattgttttggaaaaaatttctacctaggtcaattttatttacttgaaagaaaaattgataataaaaaagaaattgtaaaatatgatgctgattttaactctataagagatgttctttttgactctttaaacaatcaatttaaaattaatttaattcaggcaataactttttaa

SEQ ID NO: 298761 - DNA, 204 bp, Proteus mirabilis
atgacaactgaaccagtattcataccgccagctaatttcactgatacagatgttgttgcttggatgaaagagaaactatcgtctatcagaaccctcagtgagttaaatgcagaacgtgaagagctggtggataaattaacaaaactagatgcccaaatagcaaagtacgtcggtaaaagtgctattcagatacaaagtaaatga

SEQ ID NO: 298762 - DNA, 579 bp, Proteus mirabilis
atgaatgaatttctcgccatagtcgcagtgctatcagtatttctttactgggttatgtgtcgccatgattcttataaaatccaaaaagaattagctgataatgtaagaaaaataataaacgatgatcaggttgattttaaaataaaaagaatggcttacttttcgtactctattgctacaaaatggtggtcacctattgcgtacatttttttatttatattaattgtccctatcattctgttttccaacgaaattacactaagtaacaacgatgatagtttagacaaactaggcgggaaaagtggttctgctgatttaataaactccgtcatgagtcaatgtgcagagtattcaacaaaaagaaaccctctgatatttactgtaattacagttattggatttatccttgtaggcgtggctcttttatttaaaagcgcactatcatggttatcatcaatcttatttcacaatacaaaggcagtaattatgccaacagccattgatgatattagatgtagaatacaaagcctactagcctacacgctagcaagtgtaacattcttgagctcaaggcgttaa

SEQ ID NO: 298763 - DNA, 264 bp, Proteus mirabilis
atgagtgataacttatctatactaccagctgtaattgagcaagttcgttttttttggaatgatatttatagcaattctccattcatggcattttttactttggttcttttctttgggttaccatggtatgctatatttatctggggcggcattaaaagacaagaaaaagccaccaataaatcagtaaaagctgattatgacaaggcgaaatctgaaaacgataatattttggatggcaatgaatctggaggtaggaatgaatga

SEQ ID NO: 298764 - DNA, 675 bp, Proteus mirabilis
atgaaaataggaacaagaattagagaactaagaaagaaaaaaggattaacaatccttcagctggccaccgctattaatagcgatgtgggtaacatttctcgccttgaaagaaatatacaaggctacacagaaaacactttagtaaagatagctgaagcactaggcgtatctgttgctgatttatttactgaaaattcaccagagccagatagaatagaactgattggtaagataccttctggtttagttcaagttcgaggtgaggcgttcttgggtgttgatggcgctgttgatatgattgaggaccacaacggctggctaaaaatatatagtgacgatgctgatgcatacggcctaaaagttaaaggcgacagtatgtggccacgcattcaatctggtgaatttgttgtcgttgaaccaaacaccaatgtaagatctggtgatgaagtatttgttcgcaccgttgaaggacacaatatgattaagatcttcaacaagacaagagatggtgactaccagtttaccagcatcaacaactcacataagccaataactttatcgccaggccaagttgatactatgcattatgtatcagctatcgttaagcctacaaaatatattgataaatgcgaaagtgaaacaaaactaacccttgttccaccattgattgactag

SEQ ID NO: 298765 - DNA, 228 bp, Proteus mirabilis
atgcaaacaccattaaggaaaattcgggtagagctaaacctaacaatttcagaagtggctaatgccattaattgtgatgtaggaaatctttcacgattagaaagaggtattcaaacagcttctttggagctggctgaaaaattaacagctttttatcgtgggaaaataactgagttagagatcttatacccacatcgttatcagcaacaaaatagcaaaaccgtttaa

SEQ ID NO: 298766 - DNA, 459 bp, Proteus mirabilis
atgagtaaccaatcaataaaacaagtagtgaaagaaatgtgtgaggcaacagctggtgggcgtgaagcgatggctggggcattgggtttatctctgacttcattcaataacaaactttacgaaaagaacggctgtcgttcgtttgatttaaacgagctattagcgatgcaagatatttctcagaccgttttatttgctgaatttgtcgctcgtgaatcaaaccgtttactcgtggacagaattagccctgctgatttagatcagacagaactattcacattacgtagcaatgttgacgaaatgcaggggcgtttagcgttattgatgaaggacagcttagctgacggcgttattgataacgaagaagagcagaaaataaaaatgatgttagatggattaatttcgcagatccgcacatttatgaatgcatttgtttcgttacatcaaaagagaaattaa

SEQ ID NO: 298767 - DNA, 180 bp, Proteus mirabilis; identical to SEQ ID NO: 297313

SEQ ID NO: 298768 - DNA, 780 bp, Proteus mirabilis
atgaaattagagtcagcattaaaacaattttatccaaagtcaccgatgatcaccgatacaccaaactgtacagatcctgacagaatgaaaggaatggatactgcaggtgcgcttggtatgacagaacaacgcgctaagtttggcatatctgctttttttgcgaagaatgatgtgagtgaaaaagataagttcagcaccgtagaacagttaacgcaatatgcacttaaagtaacacctaagctggtggctaaatcggcgggaaataagttgggttactgtttagtgatcctcgcaaaaatggcgtttgaagattacgcccgttcagcgggttcggtgtgtgaatgccctagctgcaaaggtaaaaagcttatttatagctacaaagacgtcattaaatatccgggcattataaaatcgaatggcgaagtgattacggagccagtgattaaaaatgaactggttggtgataaatgccaaatgtgtggaggaaaaggagttattacacatcgatgccgttgtaacgggcgtggtcaagtcttagatgaggaacaaactgaattacaaggtgtgcctgtatttaaaaagtgtcctcgctgtactggtcgcgggtatagaagaatgccttcctcggttgcatatcaagctattagtaaattattaccagaacttaatgaaagaacatggcgtagaaactggaagccattttatgagcaattaattagtaaatgttttagtgaagaaagcaacgctgaagttgtatttagtcaagttactaattaa

SEQ ID NO: 298769 - DNA, 195 bp, Proteus mirabilis
atgttaaaacagtgtgatatgacaacacaggcaagttgtgtacttgaaacaatctcaaaaaatgattggcaaacagtacaagcaatttcaaatcaaactgggctaagtaatgaaaattgtgagtttttattaactcagtttgaaatagcagggtttgtcgcaaagcaaggaaatagctatatgcgtacagcctaa

SEQ ID NO: 298770 - DNA, 1023 bp, Proteus mirabilis
atgcaactatttaatgacgacgcactatctgtattaaaaacactacctgataacagtattgatttaatcgctacggatccaccgtatttcagagtgaaatcgtgtgcatgggataaccagtgggataatgttgaggcatatctgtcttggcttgatgaggtactagttgaattctggcgagtattaaaacccaatggcagtttgtatttattctgtggctctaaattggcatcagatactgaactgcttgttcgcgggcgatttaatgtattaagccatattatttgggctaaaccatcaggaccatggcgacgacaaaataaagaaagcctccgtgctttttttccctcaacagagcgaattctctttgctgaacattatcaaaagccagtcacggctaaaggtcctgaattttctttaaaatgcaaagagctaaagcagagcgtatttaagcctctgattgattattttagaaatgctcgtttagcactgcaggtgagtgcaaaagaaatagaccaagcaacaggtaagcagatgtgcagtcattggttcagcaatagtcagtggcaattacctagcgaggaagactacaaaaagttacaaacactgtttacacacattgctgataaacaagaaaagttatcgccgttatcccgccagtttaccgagttagagcgtgaacaagttacattacaaaaagactaccaagaattaataaaaggatatgggttattaaggcgaccattccttgtaactgcagatgtgccttacaccgatgtgtgggattatccacctgttcagtattatcccagtaaacatccttgtgagaaaccatcagccatgatggaacacattattcgctcaagtagtagagagggtgacttagtagccgatttctttatggggtcaggtgcaacactgaaagcagcactaaaacttaatcgaaaggtattaggtgtggagcttgagagagagcggtttgagcaaaccgaacaagaaataaaagcgctaacttgtaagtaa

SEQ ID NO: 298771 - DNA, 738 bp, Proteus mirabilis
atggcacctataatttcgatgctttacaaaaaggaaacttttgtacttttatatatatcaatgcttggatacggattagcgctatcgcatgagattggatattctatatatttttcttatgatattgaatttattcaaatagatgcaaaatcaatttattatggaattgttcagtctgctgcgttctttttattgtatcttgcagttttatgtacgctaaagcagacaaaaacaaatgacaagctaaaaacaatacaaattatcatctttttatttataacaccatgggcgcccaaaaatatatttactaatgtaatctctacatttatattatttgctactctttctattttaatcgctatttattactttctggcaaaaaaagatgcatttgctatacccgttctttgtggtatcggaacgttgctaattttttcactctctgtttactttggtttggttaaagcatcatctgaatcattatttaatgcatttaaatatgataattcagaatacgtaataataagaatttataatggaaatattgttggaataaaacttgaaggcaaggagctatccaaaacagaacatatttacattccggcggctcaagtaaaaccactaatccttaaagagctttacattgaaagcaaaccagggacagctagttataaagatgaatatcctaaatatccagaaagaagtttaggtcgactaatttataataatgataaatga

SEQ ID NO: 298772 - DNA, 219 bp, Proteus mirabilis
atggaaaaaataacaacaagcacctcctatatggcatcggcaggagggacattatattggctaaaacagctattagatggcttttcttctgagcagtgggccgcaattggtgtgttagggagtctaatgtttggtttgctgacgtttttgacaaatttatatttcaagcgaaaagaattcaaattaagagaggctatcggtggcaaaaataccaaataa

SEQ ID NO: 298773 - DNA, 474 bp, Proteus mirabilis
gtggcaaaaataccaaataaaatcaaaacagcaacagccggtggcttaattgctttgactgtaagcatgatcgcttactttgaaggaatggagaccaaatcttataaggatgtcgttaatgttaccactgtttgtttcgggcacacgggtactgacatcatttccaataaaatatattcagaatcagaatgtttagctttacttgaaaaagatcttagcaaagtaagaagggaggtagatcccctaatcaaagttgaaatcaacgataatacacgggccgctatttattcttttgcttacaacgtaggtgtgggcgcatttgcacgttctacactactaaagaaattaaatgctggtgatcagcatggcgcttgtgaagaaatgaaacgctgggtttatgctggtggcaaagtatggcgagggttagtcagtcgtagagatgcggagtcagcactatgtcatggaaacctttaa

SEQ ID NO: 298774 - DNA, 159 bp, Proteus mirabilis
atgtcatggaaacctttaatcatcattgtcggttttatcctagcattactcattacagttgctggtggcatttatctctcaattgataattcatgtgttaatgataaagccagtttagaaaagcgctgtcagatagctctctcacatcatcggtactaa

SEQ ID NO: 298775 - DNA, 198 bp, Proteus mirabilis
atgcaaagaatgaaattagtcgcttgcgtgacattagcgagcgtaatcctgagcgggtgtacatcaaagccgagtgtccaaaaagcactaccacttccacctcccagctggatgatgcaaccaccgccagacctactgacaccgctatccgaaattattggttactcagagagcgaattgcagagtcagaacagatga

SEQ ID NO: 298776 - DNA, 531 bp, Proteus mirabilis
atgtcttatattgcaacagcaacaaataaacatttctattatctcgatgtacggatcgaagatatagatattcaagatattgcgacaggtttagctaatgaatgtcgctttaatggacagattgataatttctattctgttgctcagcattctgtgtataccagttatttagttgcacctgaatttgctttagaggccctacttcatgatgccagtgaagcttatgtcaaagacctaccgtcaccacttaaaaagttattgcctgaatataaattaattgaattgcgtgtggaaaagataatccgcaaaaagtttggattacctgaaaatatgtctgatgaagtccattttgctgacttaatgatgttagccacagaaaagcgtgatttagacattgatgcaggtagtaactggttaatgcttgaaggtattccagctagcgattttgctgtcaacccgctaaccccaaaacaagcaaaatccctattcttacgccgttttaatgagctttataaagagaaaaatggctaa

SEQ ID NO: 298777 - DNA, 1104 bp, Proteus mirabilis
atgtcagataacagccaaaaaaaagtcatcgttggaatgtccggtggcgtagattcatccgtctcagcctatcttcttaaggaacagggatatcaggtcgttggtctgtttatgaagaactgggaagaagatgacgatacagaatattgctcagcttctgctgatcttgccgacgcgcaagccgtgtgcgataagcttggcatagaacttcacactatcaattttgccgctgaatattgggataatgtatttgaacactttttatctgaatataaagctggccgcacccctaatcccgatattctatgtaataaagagataaaatttaaagcatttttagaatatgcagctgaagatttaggggccgactatattgcaacgggccactatgttcgtcgccgtgatattgatggtaaaagccaattactgcgcggtgttgataacaacaaagatcaaagctatttcttatatacattaagtcatcaacaaatcgcccaaagccttttccctgtcggtgaaatggaaaaacctgaggtgagaaaaattgcagagaagcttgatttagccaccgcgaagaaaaaagactctacggggatctgctttatcggtgaacgcaagtttactgatttcttatcgcgctacttacctgccaaaccgggccctattgtcaccgtagatggcgaaaccattggtgaacatcaagggttgatgtatcacaccttaggtcaacgtaaaggtctgggtatcggtggcacaaaagaaggtagcgaagaaccttggtatgtcgtcgataaagatgttgcaaataatatattaattgtcgcacaaggtcatgaacaccctcgattaatgtccgtgggcttaattgctcaacaacttcattgggtcgcaagagagcctattaccgaagcttttcgttgcacggtgaaaacacgatatcgccaagcagatattccgtgtacagtaacaccattagatgaagataaaattgaagtccgttttgactatcctgttgctgctgttacaccagggcaatcggccgttttctatcaagacgaagtctgtttaggtggcggtattattgaaacacgtattcaggagtag

SEQ ID NO: 298778 - DNA, 1473 bp, Proteus mirabilis
atgatgaaataccgcgatttaagagatttcctttcattactcgaagaaaaaggtgaattaaaacgcatcacctttgaaatagatccctaccttgaaatgaccgaaatagcggacagaacattacgtgctggtgggcctgcactgttatttgaaaatcctaaagggtttgatatgccagtgctatgtaatttatttggtacacctgagcgtgttgctatggggatggggcaagatgatgttaaagccttacatgaagtgggtaagctattagcatttttaaaagagcctgatcctccgaaaggatttcgtgatctttttgataagttacctaaatttaagcaagttttaaatatgccaactaagcgcctgagcaaagccccttgtcaggaggttgtgttaactggcgatgatgttgatttaactaagatccccgtgatgcattgttggcctgaagatgcagcacctttgattacatggggacttacagtaacgcgagggccatttaaagagcgccagaatttaggtatttatcgccaacaagtgcttggcaaaaataaagtgattatgcgttggttatctcatcgcggtggcgcgttagatttccaagaatggtgtcaaaaacacccaggagaacgttttcccgtttctgttgcattaggagctgatcctgcgacaattttaggtgccgtaacgccagtaccagatacattatctgaatatgcctttgctggattattgcgaggtaataaaacagaagtcgttaaatgcctttccaatgacttggaagtcccggcaagtgccgaaattattctcgaagggtatattgaacccggtgagcttgcaccagaagggccatatggtgatcatactggttattataatgagattgactcttttccagtatttaccataacacatctaacacgtcgtaaagatgctatctatcactctacttatacagggcgtccaccggatgagccggcagtattaggcgttgcgcttaatgaagtattagtaccgatattacaaaaacaatttcctgagattgtcgatttttatttacctcctgaaggttgctcttatcgtttagcggttgtgaccatgaaaaagcagtatgctggtcacgctaaacgcgtaatgatgggagtttggtcttatttgcgacaatttatgtatactaaatttgtgattgtttgcgatgatgatgtgaatgcaagagattggaaagatgtgatttgggctatcacaactagaatggatcccgcaagagataccattatgatggaaaatacgccaattgattatcttgattttgcttcacctgtttcaggtttaggctccaaaatggggttagatgcgaccaataaatggcccggtgaaacagagagagagtgggggcgacctatcgtaatgacggatgaaataaaacagcgggtcgatactatttgggaacagctcgatattgttaaataa

SEQ ID NO: 298779 - DNA, 198 bp, Proteus mirabilis
atgcaaagaatgaaattagtcgcttgcgtgatattagtgagcgtaatcctgaacgggtgtacatccgagccagttgtccgaaagacgaaaccaattcaacctccggcatggatgatgcaaccaccgccagacctactgactccgctgtcagaaattattggctactcagagagcgaattgcagagtcagaacagatga

SEQ ID NO: 298780 - DNA, 594 bp, Proteus mirabilis
atggcacagcatagctttatcaaaatgtctaacgatactcttgtaccggctaaccctgttacgagagattttctgcattcaaaaatcaagtgtggtgatgtgctttcagctaattttaagaaagctcgtaaccctcgatttcatcgtaaatacttcgcattactcaacttaggctatgaatattgggaaccagttggcggtaccatttcacctgaggagagggagcttgtgcgtggttacatcacattcctttcgtattacacggataatgctgacgcgctcttatcagcatccgatatctatctagaagaagtcgcacaaaaacgtgcgcaaaatatctcagcaacaaaatcatttgatgcttttcgctattgggttgtagagcaagctggttattacgatacgtttgaaatgcctgacggtagtttacgtcgtgttgctaaatcaatcagttttgcaaatatggacgacttagcatttagcgaactctacaaagccacactcgatgtgctttggaattttatccttcgtaagcaattccccactcaaaaagctgtagaaaatgcagtatctcaattattaagttttacgtag

SEQ ID NO: 298781 - DNA, 339 bp, Proteus mirabilis
atggcaaaaacagtagcagaacgtaaagcggaacaacgtaaacggcagaaagaattaggtgtaactaaaattgaattacttgtagataatcaagaattggaaatgataaagcgtaattgtgtattgcgcatgcctggtcgagaaccgtatggcattgttgaatatttacagatgcttattcggaaagatgatgctgagtataaaaagcaagtagagaaattatctaaacgtaaatgtaagcgttgtggtgatatattacctgttcagcaatgttgtatgtcaggtgattccgaatgttgggtcactagtggatacaaagagttgaaactggttatctaa

SEQ ID NO: 298782 - DNA, 804 bp, Proteus mirabilis
atgagtaagcatcaaattaaacaccccgtgatccgttatcacggaggtaaatttcgtttagcaaaatggatattaagttattttccagagcatcgttgctatgtagagccctttggtggagttgctagcgtcttaatgcagaaagaacgtagctatgcagaaatatataatgatctagatagtgaagttgtaaatctattcaaggtattaagagatcctgaattaaacattaagttacaagaggcttgcttacttactgcttattcccgtgacgagtttatgttagctaaagagtttattgataatccattagagagagctagacgtatggttgttcgcgcttgcatggggtttggttctgcttctggtttaaacggtaactcgggatttcagtctgatagtaaacgtgaatattcaatctactcacatttgtgggctaaatatcctgaaaacttatctgcagtttgtcagcgtttgcagggagtcattattgaaaataagccggcattagatctgattaaaaaacatgacgccactgatactctattttatttagatcctccatatatgcctgaaacacgagtgagtggtaatcgttattacaactttgaaatgactaatgggcaacatcatgagttactgcaaattattaagtctgtttctggaaaagtaattatcagtggctatcactcgaatttatatgatgatgaattatcaggctggagaaaagtaaccaaagaggctcgtatttctgccggtcgtggtaccaaaattcgtactgaatgtttgtggatgaattattga

SEQ ID NO: 298783 - DNA, 234 bp, Proteus mirabilis
atgtctaggcgttcttatttgcctgatgatttacctcacaatcgagctttgtggccagaagaatatcgcgagttagaacaacttgatttattagctagtcgattaattagacagcttaaaaatcaaaaaatacatagaacgcgagtgttggtggaaattgaaaagttgactgaggtacatcgggagttttttagagataggttgaattattggcgtgaggtaatgaaagcatga

SEQ ID NO: 298784 - DNA, 177 bp, Proteus mirabilis
atgacaattaaagactctcttactcacgaatctctcgttcgtgataatcaccctatattacccgacgatgggttagaccatacacagtgtcatattgatcgcctccatgcatcagcaagagcgagaacaaaagcaccttatcaacctaaggttaaaccacaaaaatcgacgaggtaa

SEQ ID NO: 298785 - DNA, 1374 bp, Proteus mirabilis
atgcatgagaaagaattagaacatgcggtgattagtggtttgttagctggtggtgctagtcaagatgcatatgaggtattagccacattacctgaagaagcctttagttctagatattttcgtaatgtctacaaagaaattaaaaaacaagcgctagcaagttctttaatagatcccttttttattgctgatgcgctaggtgaaaaaggcgatttagcaaatttacttgagctatctaaaacacctatttggacagcaaatttaaaaggctatgcctcaaaagtttatagttattatcgtgttagagaagtcattcaattaatttccaagtatcaaaatgatattactactgcaaataatcatgaacaagctgaagaatttattcatcaatttgcaacccaaattggccagctgacaattggtaatcagaacctacttcctgtgcatttaaatacactacttgaaggatatgtagatgttttagaacgcagaaacaaaggggaagatgctgttgggatgataaaaagtggtattgaagctttagatgacaaaattggaggctttaatccaacagacttagtttttattggcggtcgtcctgggatgggaaaaacagagcttgcactaacgatgactgagggaatgaccagagatggaggcggtgcattattcttctcgatggaaatgtctaatcagcaaattactgagcgtctagttgcaggttctgctcaactaccaatatcaacattgagacatcgtgggcgattggatgatgaaggatgggggcgtttaagttcagcactaggccatttaatggatagagatattcatatcatcgatgcgagtaatctaactattgaacaaatatgtgcaatcagtgaaaaccacaaacgtaaatatccaaatttgaaaggaatttttgttgattatttagggttaattaaaaaacctaaagcagaacgtaatgatttagcaattgcgaaaatatctgcatctttaaaaggattagcaaagaggttacacacgccaactattgcgttaagccagctatctcgtgatgttgataaaagacctattaatcaacgccgtcctgtttctgctgatttacgcgattctggtagcttagagcaagacgctgacttaattttatttacctatagggaggccgtatataaccccaatagccctgcgaaaaattatgccgagatcattattgataaatttagacacggagaaaccggcacagtctatcaagaatttaagaatggccactatctgcctaccgaccaaattacagcgtcagaagtgtccaaaatgcaacaacaatcacagcaaaacgataaaagacgtcgttacgcagaaaaagcattttag

SEQ ID NO: 298786 - DNA, 594 bp, Proteus mirabilis
atgtctgaacaaaatttattaactgcggtgaatattccccctcgctttgctaatgcgacatttgaatcatttgtcgcctcaacaccgacagcaaaacataatttaaaaatttgccagcagtacgtcgaaacttggagcgaccgaaaaaacgcaggagaggggcttgtactgtgtggaacacccggaactggtaaaacacaccttgcagtatcaatcgcccgtcagattgccggagaattgcaagaaacggtattcattaccacagcctcacgtatcattcgcgcttttcgaagaacatgggctggaaattcagaattcagtgaacttgatgtacttgaaaaatactgcacacctgatttgttaattattgatgaaattggtgttcagtatggcactgattctgaacgtaatatcttgtttgaggtgattaatgatcgctacgaagatttgctacctacaattttgataagcaacttgcccgttgttgatctacaagaaatgcttggtgaacgagccgtggacagattattacaggggggaacagtattaacgtttaactggccaacatatcgtagaggtaatcatcatgcatga

SEQ ID NO: 298787 - DNA, 852 bp, Proteus mirabilis
atgagtaataaattaaccggctatgtgtgggatgcatgtgctgtttcaggtgttaagggtaccaagttaatgatcatggtacgcctagccgattattcgagcgatgaaggggttgcttatcccagtgttgaaaccatcagtcgtcaaattggtgcgggaattagcacaattcgcaatgcatgtaatgaacttgagcgtgatggttggttagttaaaaagcaacgtagaaatggcaatcgtaatgcttcaaatttatattttttaaatgtcgataaattggaaaaaatcgcattagaagagaacgccaaattaagaaaacaacgtgaaaggctatcaaattttcaccgtccagattctgaccgttcagattctgaccgtacagaaaacagtaaaaatgtacgttttgaccctccagaatctggcgttcaaggtggttttcaccctccagaatctggaggcgatccacaagtaaattcaaaacatgatccacaagtaaattcaaaacatgatccacaagaattactcgaggggaaaaaatcgaaaaataaattcgatccgaaattggctaaaccgtcaaatgtgagtgatgaggtttggcaggattggattaacttcaggaaagaaattaaaaaaccgctgacagaaaccatgtgcaagcaacaagcaaaaaaattatcgctttgcaccgatgccaacgctgtgatttgtaattcaattgccaacggttggcaggggctatttcctgaaagatccgtagtacaaactcaaaaagtaaattctcatactgggtttagcgaaaaagattaccagtctcaagatcctcattggtttgtgggaggtggaaatgtctga

SEQ ID NO: 298788 - DNA, 186 bp, Proteus mirabilis
atggtcaaagaggatgttattaaatacttcggttcccaaagatctgtagcagaaaaacttaacatttctgatgctgcggtacattattggaaaaatattattccagaaaaggccgcattaaagctttctcgaatcactgatggaaagttgaaatatcgacctgaactatatagtaaggtggagtaa

SEQ ID NO: 298789 - DNA, 654 bp, Proteus mirabilis
atgataaaaacatcgattggtgagcgcattagattgcgcagaaaagaattgggactaactcaaaaagcactttcagcgaaggtgggagtttcccatgttgcgatttctcaatgggaaaaggaagaaactgaacccacaggtaataatttattctctcttgctgatgccttaggatgtacacctgaatttatactcaaaggaaaagaagaaaattcaagcaatattgagaccccgagaattcatcattcaaaaggtaaataccctcttatcagtagagtcatggctggagcttggactgaagcattggaaccatacgatagatgtaatattgatgaaatgtatgaaacaaccgtatcttgctcaaatgattccttttggctagatgttgtgggggactcaatgacctcatcatctggattaagcatcccagaaggaatgattattctcgtagatccaaatgtagaaccaacaaatggtaaacttgtagtagctaaattagaaagtgaaaacgaaaccacatttaaacagtatattattgatgctggtcatcattatttaaagccattaaaccctcaatatagaatgatatcaatcaatggtaactgtcgaatagttggtgttgtcgtagatgctaaaataaaaaaactaccataa

SEQ ID NO: 298790 - DNA, 567 bp, Proteus mirabilis
atgcctgagttaacaatacgagagtgtggtgaggaggcaattagattaactaatgagttatttcaacagtctgagcaatcttttatggcatatttattaaatgaatcagacttagcatggtgtattgcaagtactagaaattttccgccagagaggcaacttccttgggatcacgcaggacaaacatttcaaaatgataatggatttagcttttgttttaagtttttagatatgcaaaataggcctgctggagcctgcatttgtgaatattgctctgataatgtattgaatattgaaatgattcagaactttcaaattaaaccatctattcttgatggaaatacgcttaagtttatgctttataccatagtgttttttctgttactgacacaagggacgggtgtacggctcatgtttcctataaatgaaaatgttgcaacatactatgttgaaaaacatggttttcaggatttaactggtgatggttcaaaagaaatactttaccgctcagcagaagatttattaaattggtttgagcaaaataaccgctcagttgatagtgagtga

SEQ ID NO: 298791 - DNA, 291 bp, Proteus mirabilis
atgcttttcacaataaggtttaccgacgatccaacagcattcaatattagaaaacaatatttaaatcatcatattgagtggttggaacagaaacgagaaatagttaaggccgcaggttcattacgagaaaagcataataaccaacctataggtgctttatggatagttgaggctgaaagtgaagaggatgccttatcaatattttctgatgacccgttctgggtaaatggattgagatcatctgttgaaattttatcgtggagcttggcttcagacgatatgattacataa

SEQ ID NO: 298792 - DNA, 921 bp, Proteus mirabilis
atgaactggaaaaacaataaagaaattgctgcatactttaatcttccgaatattacgggaaatgacacaagtgagttacgccaggcaatagttagacaaatggcattattacatccagacaataacagtggcatttttattgatgatgagtcaaaaaaacgatggcaacaacttagctcagcaaaagaatttattgataatcagtctattgaaaaatctatgggtgaaaataataaacaaatggtacccatgtcacaagtaatggatttggttaaagtgattactgcgacaggaactcaaacggttagtttgactccttcattaataaggtcagaagttcggagtgatgtccgaattcgtgcatttctccctcgattggggtcaggagtatttgcgacgctaagcgctttcttttttacgtttcccaatacggctaaagataacccaatcattggcccttggttacagcgcccagaatcgcaatattatttattaggtgtatcgttattatcagggtggctctttattagaacttggattcaagaaaagagacaagaagaattaatagattatttatcctctgatgaggggcttcgaagaattctatctagtatgttctgtgaatgttttaaatttaatatgtcagaacgtaagttttcgcttcctgatttcactcgcgctattaaattacggcatagtgctcgggaacctcacattgcaagagtcatgatggcatataaatcactattattgggttcggcgcctaagttatctcgaaccatcatagaaaaaatagccttaatgcaaattgaaaaacttattcaacgggggttggttgtggaattaccccattccggattggatcggattttcgaaatctccgaggctgcatataatgatattaaagataggaattattaa

SEQ ID NO: 298793 - DNA, 2160 bp, Proteus mirabilis
atgatgttgatagcgttttttaaaacactatttaaattcttatttcgagtaagaattgaaggactaattaatcagttttcacaatatgaaaaatgcattattacgccaaatcatacatcgtttattgatggtatattattgcgtttatttttaccgattaaccctgtctttgctgtttacacctcagtggctaatgccaaacataccaaatggctcagtcgttatgcggatattgttcctttagatcccgctaatccaatggcggttcgccaattagttaaagaagtcgataaaggccgtcctgttgttattttccctgaagggagaattacggtaactattggtttgatgaagatttatgaaggtgctgcgtttattgctgctaaatcaggggcaaaagttatccctgttagaatagaaggtgctgaatttagctacttttctcgagtgcgtaaaacgttaaatataaaagcaaagctttttcctaaaatcacaataaaagtgctacctgcggttgatttacctatgcctacagcggaaaaatcagcagagcgccgtcgcttatcgggagaaaagctccgtgatattatgatggatgctattatgcaagcacgtcctaatatcacgctctatgaggcatttttacaaggaatgtctcagtttggtcgtttcagtcctcttatttcagatattaatatgaaagaggatagttatcagggcctattgaaaaaaatgttaggtgttagtcgtattattgaacgctataccgagcctaatgaacgaattggccttttacttcctaatactaccgttacggttgcggctttatttggggcaacgatgcgccaacgggttgtggcgatgcttaactatactgcgggtagcttaggtgtacaaaatgccatgaaagcggcatccattaaaacgatttttacttcacgccaatttttagagaaaggaaatttattacatattccagaacagactccggatgcaaactgggtttatcttgaagatctcaaagatagcattactagagaagataaacgctggattgcacagcacttactcactcctcataaagcgatgttagcgcaaaaatcgacggatgcagcagttatcttatttacttctggatctgaaggcactccgaaaggtgtcgttcatagccactccagtttattggcgaatgtagagcaaattcgcgctattgctgacttttcacccagagataaatttatggctgcattaccgttattccatgctttcggtttaacggtaagtgtattagcacctatctgcttaggggcacgagtattcctctacccaagcccactacattatcgtgtagtacctgaattagtgtatgaccaaaattgtacagtattatttggtacttcaactttcttaggtaattatggcaaatttgctcatccttatgattttgctcgactaagatatgtggttgcaggggcggaaaaactgtccgaatcgacacgagtattatggcaggataaatttggtattcgtattttagaaggttatggggtcactgaatgtgctcctgttgtctccattaatgtaccaatgagtgctaagccatataccgtggggcgtttattaccaggcatggaagggcgtttaattcctataagtggtattacggatggtggaagattacaactgcgtggccctaatatcatgcttggctatttgcgcgttgagtccccttataaattagaacagcctacagcaataaatgccgaaggcattgaagaagcaggttggtatgatacgggagatatcgttgctattgatagcgaaggtttttgcactattaaagggcgtgtaaaacgttttgcaaaaatagcgggagaaatggtttctcttgaaagtgtagagcaattagcggctaaagcctcggaaggcaaccatgctgtggtggcggtaaatgatccacgtcgaggtgagtcattagtgctttttacaaccgataagcaacttgatcgcagtatgttatcggcattagctaaatccactggtgtggcagaaattgcggtaccaaaagatattcgttttctcaaagaaattcctgttttaggaagtggcaaaacggattttgtctcgttaaagcaactcgctgaacaggaaaataattaa

SEQ ID NO: 298794 - DNA, 3969 bp, Proteus mirabilis
atgagtagcacaacaatgggtgttagacttgatgaagaaacccgtaatagattaaaagatgctgcacaaaaattagatagaacatctcattggctaattaaacaagccatcttcaattatcttgaacaaattgaaaatgatcagctcaccctaacccctattacacaggctgagcaagatattgaagaaagcactgatcccctaacggcacattatcaaccgtttttagaatttgcagagcagatccacccacaatcggtgttacgctcggcaattacttctgcttatcgtatacctgaaacacaagcagtgcctatgctactacagcaggcaacgctacctgagcatgaggctcaagccacgcataaactggcttactccattgcagaaaaattacgcaaacaaaaacagggtgttggacgctcaggtctggtacaaggcttactgcaagagttttctctctcttcccaagagggggttgccttaatgtgtttagccgaagctttattgcgtattcctgataaagcaacccgtgatgccctgatccgagataaaattagccatggcaattggcgctcgcatttagggcaaagccaatctatgtttgtcaatgccgccacttggggtctactgtttacaggcaaactcgtctctacccataacgaagagaaattatctaattctctaaatcgcattttaactaaaagtggtgaacctttagtgcgtaaaggcgttgatatggcgatgcggttaatgggggaacaatttgtcaccggtgaaactatctcccaagcgttagccaatgcacgcaaacttgaagaaaaaggctttagatattcctatgatatgctaggagaagcggccctaacggaaaaagatgcgcaagactatttagtctcttatcaacaagccatccatgccattggtaaagcctctaatggacgaggtatttatgaaggaccggggatctccattaaactttcagcattacatccccgttatagtcgagctcaatatgatagagtgatgtcggagctttaccctcgcctactctctttaacgctacaagccaagcaatatgatattggtattaatattgatgcagaagaagcggatagactggaaatatccctcgatttattagaaaaactctgcttcgagcctgaattagcgggttggaatggtataggatttgttattcaaacctatcagaaacgctgccctttagtgattgattatattattgatttagctcgccgcagtcgtcgccgtttaatgatccgtttagtaaaaggggcttattgggatagtgagattaaacgcgcgcaaatggatggactggaagattatcctgtttatacccgtaaagtatataccgatgtctcttaccttgcgtgtgcgaaaaaactgcttgcttcaccgaattatatttatccgcaatttgccacgcataatgcccatactttatcagccatttatcatctagcgggtcaaaattactatcctggtcaatatgaattccaatgcttacacggtatgggtgaacccctctatgcacaagttgtgggtaaaattgctgatggtaaacttggtcgcccttgtcgtatctatgcgccagtaggtactcatgaaaccctactggcttaccttgtgcgtcgattattagaaaatggtgcaaatacctcgtttgtaaatcgtatcgctgacaccaccatctccttagatgaattagttgccgatccggttaaagagatcaataaaattgcgcaagctgaaggacaaatcggactttcacatcctaaaatcccgctcccaatgcagctttatggtgatgaacgcaaaaattcaccggggattgatatgtctaatgagcatcgtttagcctcattatccagtgcattactgacctctgcgatggaaaaaattcacagtcatcctctccttggtggtgagtgtaatagtgcagaagaagtgattgcaccacaatctatactcaatccggcaaatcacaccgatgtcgtcggtacagtacgtgaaacaacggccgccgaagctaattttgctttagatattgcccaagaaaatggtgaaatttggtttgcaaccccacctgcggaaagagcggcgtttttagtccgcacagcagaactgatggaacagcaaatgggtccattaatgggtgtcttagtcagagaagcgggcaaaacctatagtaatgctattgcagaagtgcgtgaggcgattgattttctttattattactcagcacaagtggcaaatgattttgataataatacccatcgtcctttaggccctgttgtctgtattagtccttggaacttcccattagccatctttagtggacaaattgcagcagcgttagcggcaggtaataccgtactggccaaacctgcggagcaaacccctctgattgcttttaaagccgtagaactattttatcaagcaggagtacctcgcagtgcattacaactcttaccgggtcaaggggagaccattggtgcacaattagtggcagatgaacgcgtgcgtggtgtgatgtttacaggctctaccgaagttgcccacattctgcaaaaaaccttagcgggtagactcgatagcgaaggtcgccctgttcctttaattgctgaaacaggtggcttaaacgccatgattgtcgactcttctgccttaacggaacaagtggtcactgacgttatggcctctgcttatgatagtgcgggtcaacgttgttctgctttgcgtattctctgtattcaagaagaggtggctgatagcacgattgaaatgttaaaaggcgcaatggcacaagccataataggtgatccaagtctcttatcaacagatattggccctgtaattgataaagaggcaaaagcgggtattgaaaaacatattcaaactatgcgcacagcgggttttgacgtttatcaagcaacctataatcaacttactaaacaggctgaaaataacagtacttttgttcctcctaccttaattgagttagataaaattagctcacttaaaaaagagatttttggccctgtactgcacgtcgtacgttactcaagccaagatctgcctgctttattagctgaaattaatgcgactggatatggattaacaatgggggttcatacccgtattgatgaaactatcgcttatgtagcgactcatgcaaaagtaggaaatttatatgtaaaccgcaatatggtaggtgctgttgtcggggtacaaccttttggtggtgaaggtttatcgggcacggggccaaaagctggaggccctgcttatctgtatcgtttattatcaaaacgtcctgaaaatgccataacacaaaccttagcacgtcaagatgaaacattaccccttgatgcctctatgcgacaaaagttattacaaacctatcatcactatatgacgtggttagcaaataaaacggaacctgcacattatcaggcgctagaagaatacgccaatgcatcacaagccggaacattgcgcgtattgccggggcctactggcgagcgtaatacctatcaattagtcccttgtggcaaggtgctttgtctctcagataatgagcaagatatatttactcagttagcgggagtctttgcatcaggatgccatgctattgtccataatgctgttttctcgcaaaaaacctatcgtgaattgcctgatatgatcagaaaagcaatcactctcacggacaactggcaagatgagtcactaagcattaatgccgttatttatcatggtgatagtgatcagttaaaagagacttgtcagcaaattgcacaacgtaaaggggctattatttcagtacaaggcttctcacgtggtgagacagcattgttattagagcgtttattgcatgaacgagcattaagcgtcaataccgccgctgccggaggcaatgccagcttaatgacaatcagttaa

SEQ ID NO: 298795 - DNA, 531 bp, Proteus mirabilis
atgtctgtttcaacacaaaagaaacggccgctaagccgttacattaaagactataaacacagccaaactcattgtttgcattgccataaggcgcttgatcggatttctctcgtattcaatcgccaagttatcaataaagaagccatttctgaaatgacagatttaattgatgatgaaacatgggaaaccttgcaaggaaagttttctgcgctgtgccgtttttgtagtgagatttactgtaatagtgaaactgattactttgacattatgtcttttaagcagtatttgttcgaacaaacggagatgagccacagtactgttcgtgagtatgtggttcgtttacgtcgactcgatgaattgctgacttccactaattttcctcgtcaagaattcacgacagagaaaattcagtcagacttgagtaaaaagctcactccctccgcatttagtaactacaacattgccctacgtaagtatgagcaatatcttgattggtgccaagcgccaacctcgatgagtagtggtcactaa

SEQ ID NO: 298796 - DNA, 723 bp, Proteus mirabilis
gtgagtgatttgtataccgccgaaggcgtgatggacaaaaatagcctctgggagcgatatgtccctttggttcgccatgaagcattacgattacaggtcaagttacctgcgagtgttgaattggatgatcttttgcaagcaggggggattggcctactgaatgctgttgagcgttatgactcaatgcaaggtgccgcctttactacttatgctgtgcaacgtattcgaggctctatgttagatgagctacgaagtcgtgattgggcgccccgtagtgtgcgccgtaatgcaagagaagtgacacaatccattcatcagttagagcaggatctaggacgaccaccatcagaacaggaagttgctgatcatttgcagattgagttagcagaataccggcagatcctattggatacaaataacagccagttgttctcttatgacgaatggcatgaaatttacggtgaaagctgtgaaccgtctcaagacgaagatcacgatgacaatcctttacaaatgttattggaaagtgatattcgccaaagagtcatagacgcgatagaattgcttcccgaaagggaaaaaatggttcttaccctgtattatcaggaagaacttaatttgaaagaaataggcgcagtgcttaatgtcggggaatcccgcgtaagtcagctacacagccaagcaatcaaaaggctgcgagcacgcttaaacccagagaaatag

SEQ ID NO: 298797 - DNA, 474 bp, Proteus mirabilis
atgtactggctcaataacaaatttaacattattgctatcatcgttggtgtactgagtatttttactattttgattaatcaaagtttggagcgcgaatatgttcaaatgagccccaaactagaacaaatcgtccatgaaaaagtgagtagcttaaaaaaatcagtcgttgatgcgataaaagggaaaacttatcaagctgcttctatagatatcgaggcagaacagaggcaaaaattgttaaatcggatggaacaaatcaaacaaattggtttagttctgagtgtattagggattatttttactgcaatttcatttattcgacatgaaaataaatactcttgtcggatagcattagcacttaatggaagtatcctgtctatttctcttttaatgtatgttgcaacaagcattgctagtattgttacgatattacttcttatatggctgctaggtaatatcttcggtttctgttaa

SEQ ID NO: 298798 - DNA, 522 bp, Proteus mirabilis
ttggttgcattgtattttgctgtagagaaaagcactcctgacactaaagaaacgcctgctgtttttatatatcaacctgaaataacattgactggaattgaattttcaaaaagcttagaaaataaatcaaatagtgtaattaatgaaagtaaaaattcacctcctgatagttttattaattcaggaaagatggggagctttatacttaaactattgtcactatgtgaattaatggaagaaaatgatccagcctataatactcctatcgcaataacacattatgcatttgataaaagaatgataaatcaagaatgtatgtttacctatcaaaataatatttataaagaatttaaaccacataataaaggtaattataaaaaaataacaatagctaatccttacaaaataaaaaatgaattaattactttgggttataacgaatctaagatatatccatcaatttctggtttagctaattcattagttcataatcacgcgaacgatttttatcgttggtcttga

SEQ ID NO: 298799 - DNA, 1968 bp, Proteus mirabilis
atgagattatttattgcagaaaaacccagccttgctcgagctattgctgatgtattaccaaaaccgcataaacgtggtgatggttttattgtttgtggtgataaccagtatgtgacgtggtgtgttggtcatttacttgagcaggctgagccggatgcatatgatccgcgctatgcgcgttggtcgttagatgatttgcccattattccgaataaatggcaactcaaaccgcgcgctgatgtgaaaaaacagctagatacgatcaacacattactaaaacaagccgatgaagtgatccacgcaggagaccccgatcgcgaagggcaactgttagtagatgaagtacttaattaccttaatattagtgatgctcaaaggaaacaggcacgccgctgcctgattaacgatttaaaccccgccgcggtatctcgagcaattgataagctccgctacaatcatgaatttattccattatgtgtttctgccttagcaagagcgagggcggattggctatatggcattaacatgacacgcgcttacacgttattaggacagcgcaatggttaccaaggcgtactctctgttgggcgagtacaaaccccggtgctaggtttagtcgtacgccgtgatgaagaaattgaaaactttgtaccgaaagatttttttgaagtcaaagcgcatatcgttactcctgcagatgagcgatttaccgctatttggcagccgagtgaacactgcgagccttggcaagatgaagaagggcgtttattacatcgcaaattagcagagcatgttgttgatagaatagctggcaagcctgctaatgttaccgattatcaagataaacaagagtctgaaatagcacctttgcctttttcattatctgctttacaaattgaagcggcgaaacgctttggtttaagcgctcaacaagtgttagacacatgtcaacgcttatatgaaacgcataaacttattacttatccacgctccgatagtcgctatctgcctgatgaacactttgctgggcgtcatgcggtgatgaatgccattagtgtgcatgataatagtcttttaccacaagaaacattagatattgataaaaagaaccgttgctgggatgacaagaaagtagatgcgcaccatgccattattcctactgcgaaaacaggtaatatttcattaagtgaaaatgaaaagaatatttactatttgattgcccgacaatatctaatgcaatttatgccagatgcggtgtaccgcaaatgtgtgattgaactcgatattgagaatggaaagtttattgctaaggcacgatttttagcacaagccggctggcgtaccttattaggtagtaaagagcaagatgcggaaaatgatggtagcgccttacctattgtggctaaaggtgatgagttactttgtgaaaaaggcgaaattgttgccaagcagacccaaccaccaagaccttttacagatgctacgctactttcggctatgaccggtattgcacgttttgtgcaagacaaagagctaaagaaaatcctaagagcgacggatggactaggtactgaagcgactagggctggtattattgaattactgtttaaacgcggctttctgcaaaagaaagggcgagctatcaactcgacaccagcaggaagagcattaattcatgttttgccagatatggcgacattacccgatatgaccgctcattgggaatcaatattaacgcaaattagtgagaagcaatttaagtatcaagattttatgatgccattaagtaacacactatttgaattaattactcaagctaaacgtcgtcctaatattcaagcgtttagaaacctgcctgcgcctgcgcagaataaaaaacgtaaaggtgcgacgaaaaaaagtgcacaagggaaaagtcgttcagcgcagtctcaatctacgaatcgcaatataaagagtgatgcttag

SEQ ID NO: 298800 - DNA, 819 bp, Proteus mirabilis
atggaacttccaataacagattcgataataattgcgatcgcaaagcttgtagatgatgctcaggttgaatctcgtcagcctagccataacgatctagaagttcaatttaaaagagctggattgatcagtgctgaccctaaaagtcaagggttgacagttggaaaggctaaaagggtaacagctgttttaaattgggctattgaatatgataaaaagtctggaagtaggttgatttcgctcctactttctcacattaaaggtgtaggtggatttcgagaatcatctccaaattttgttggtaaagagcaaatacagaacgcaatggatgcgtttaaatcagaacattatattctttctgaaaacggagacatttctgcgataatattggataatctaagtggtaagaatcttacagttactttactttcatacgcaaatagagctaagcagggtgttgaagatgccgcattgttatctggtacaggtaaagatcttttagaggctacagctaaacatgtaattcattcaaagtttgggtctaacattccaattaatatcaattttccaacactgtttgggcaagcatatgcagctttacaaatgtctacacctcaaactttaaaagtggctaacgaaccagcaatcaaagactacgaacgtgctttatttgagcttgctttatctattaataaagttcgcaatagagagggtacagggcatggtagactttgcattacatcattatctcaaaatgaatctcttagtattattcaggctgttgggttgatttctgagtatatgttgaacaaactttactaa

SEQ ID NO: 298801 - DNA, 792 bp, Proteus mirabilis
atgatagataaaagcgcgaaagtgatagtcgaaaaacttgctgttccaatttatgaagatgctttgagcccttttgctaaagaattatcaaagggattagtctctgttgctaaaattgtaaattcaggagtttttctagtagaagacagtattcatgcaatgacaaatgttttgcgaatgactgctgagaatcttgcattattaccacccaagcaaatttcattcgatcaaccaagaattgctcttcaagctttaaatgaggctaaatttgcaataaatgaggatgaaatacagcgccttttttcaaatttaatatcaacaagcctagacaagaaaacttcaaaatttgcacatcctgcatatatcgaaataatcaaacagctccagccagatgaagccagaatcctacagtttatgtttaacaaagaaaattataaaaaaggacatgcgccaataattgatgtaatccaacaagatttagaggggagtaattttagcgttaagtcagttacatcagaagtaaatctaatttgtgaagatgctgattgtgatactccaaaaaactcacttatgtatttcttcaacttaaaacggttaggtctgttaaccgtaacatcagggacttctttcccaaaggaagaacatgaaagaatttttttatcagagaaagtaaaagaaatatgtagtgtaaatttgcatctagataaagtttcttatcaaagtgggcaatatagctttacaggttttggtagcggttttgtagattcgtgtgtcggcaggcatagcaattaa

SEQ ID NO: 298802 - DNA, 450 bp, Proteus mirabilis
gtgaagaaaatagcaggttgcctcatcttgggattgttatcagtaagtatgtctgcgtcagcaactgaaaataggtatgccagtattactcacactaaagaaagttttcttaaccaaggttattgtagttatgaattctcattagataacggcggtagtcatatgtcactcgataatgctggatttgatcctttagaaattactttgcagatgaaagataaaaaaggaagtatcatcggcaacgaagtgcttgaggttgagccttttggtgagatgggtgctaaccgttcaatgacagcatctttagaagtactgtgtgacgatatcggggagtttaaagtgattaaggtcgttgaagataaaaacggtcgtaaagtccaattaccactgagtacttttgagccaatgaacccagagcttgccaagatgtcggttagtgagtccaaataa

SEQ ID NO: 298803 - DNA, 486 bp, Proteus mirabilis
atgaaaaaaatgatagtaacagccgtattagcatctctttattttatcactaccccggtactctctgcgagtaagcctcccgccaataccatatgggaatttaaaggcgataaaggaaaaacactttggcaagtatgtggaggggaaaatagctcctgtaagatagtgggttctacacaacattatgttgctgttcttaatcaccgatcatcctcggggtgtgcctttggtgatttttatattgtggcaagaacagatagaaaatgggaacaacgagatacaggaacatgcagtccgaatgcctatgtaacaaaagggtcgatgaataacggacaatacatgactgtggatattggcgtgggtaatacaattgtgaaacgttttcctatcgagtactggtcaatgcaaaaaagattttctggctcaaaccgtcctaaatggaaggaaattgatagaggacaaggtggagtaaaagttaatcaataa

SEQ ID NO: 298804 - DNA, 126 bp, Proteus mirabilis
atggttatttacggttatttgtttatctctcaagactgtccttattgccattcatcacatgacatcattccatggggaaaagggtggatgtgccgagagtgtggctatgaatgggatcttgattag

SEQ ID NO: 298805 - DNA, 702 bp, Proteus mirabilis
atgtttcagaccaaccgaaaatatgaccgcatggcggtacgattatctgccttgattgctcgcttgatggcgggagaaagcctcgttttatcctcactcacgaaggagttcaatgtatctgaacgtactttgcaacgcgattttcgtgaacgccttgtttatcttggtgtagaaggtcagcgaggtgtatatcgtcttccgctcaatacactgaatgcttatcgtgataaagacattctgacttttgttaaacagacaggaatgactcgactctttcctggattagatagtcgattgctaagtttattattatctgaacgaaagcaagcaccttgtattatttggcatcatgcgcatcgcacttcagctgaacattcagataatttttatcagcttatttacgctattagtagttatcagcaagtgattgtattaaccgataatcatcgattcaatccactctatccttatcaatttatttatcgcgaaggattatggtatctcgtcgctgaatataataagcaagtacaagtgcttttattagatgatattcatcaagtccaaaatttaacaatgacctttattccaagagacgatatttctcaactttctcgtcaaaacagttttattgccgcattgcctcattttcaagttattaaccaattaataaaacctttaaccccgattaaggaggaaatatag

SEQ ID NO: 298806 - DNA, 837 bp, Proteus mirabilis
atgaatttattagcttctcgttttggctctgccaatagcattcgtcgtgatcgtccactgactatcgaagagttattccacacggtaccgagtgtgttttctgaagaaaaacacgattctcgcagtgaacgttatacctacattcctactatcaccttgttagatagcttacaaaaagaaggtttttatccgttctttgcttgccaaacccgtgtacgtgatatcagtcgtcgagagcatactaaacacatgcttaggttacggcgacatgaccaaatcacaggtattcaagtacctgaaattattctgcttaatagtcatgatggttcaagtagctaccaaatgttacccgggttatttagagcagtatgctcgaatgggttagtgtgcggtgatgtattaggtgaagtgcgtgtaccccataaaggggatgtcgtggggaaagtgattgaaggggcgtatgaggtactcgatacgtttaagcaagtggctgaaaaacgcgaaagtatgcagtcgttattgttaccgccacccgtccagcaagcctttgctgaagcggcattgacctatcgctttggtgaggagttccagcctgtcactcgagaacaaattctacaacctcgacgatttgaggataaaaaggaagacttatggacggtgtatcaacgtttgcaagaaaacctgattaaagggggattatcaggccgaactatcaagggtaagcgagctcgtactcgcgcagtgaacggtatcgatggtgatatcaaacttaacaaagcattatgggtaatggcggataccttatttaatcaactcacaccccgccaacccaattaa

SEQ ID NO: 298807 - DNA, 426 bp, Proteus mirabilis
atgccccattcaatcgaatctgctatcgctataactcgtgttcccgatgagcaacgccttgatttttgggtaactcattttggtggcgttaagggctgggccacttttgagatagtgaccttcactactatgggacagttttgtgaagcctataatggtggatattgggaatactgcacgttatctaatggtggcgcttttatctacccggatgttgcagaagaagcactaacgctgttcaacatacataacggcaatgaggcgcaggtcagttgtgaagccgctggcattgctgtgtgcctgattttatacagtatctggtcattccgaacggaaagtgaagtgatgtgcgaccgcttttatcagcttcgtgactatgcgctacaatattctgaatctgctgccattttccatttaattgattaa

SEQ ID NO: 298808 - DNA, 759 bp, Proteus mirabilis
atgggtaaaactggaacgggaaaatcaagtctgatcaacgccctatttcaatcaccactctcatctgtcagtgatgtttccggttgtacacgtcaagctcagcgtttcagtatgagtatgaatgatcatactctcacctttatagatttaccgggtgttggagaaagccttgagcgtgataaagagtatcactcactctatcgtaacttattaccagaattggatttaattatttgggttcttaaagcggatgatagagcatggtcttctgatgagcagtgttatcattttcttactgagcaatgtggttatcatcgaaaccgttttctgtttgtactgaatcaagtagataagatagaaccttgtcgccaatgggatgaacagcgccaccagccatctgatgaacaagcagtcaatttagcattgaaacaacaggcagtaataaccgcctttaagccctatcacacggtgataggtgtttctgcaatagaaaattttcaacttactgagttggcagaaaaattaatacaggcgttaccggcgcaagccagtagcggggttgctaggcaattgaacacaacctatcgaactgcctctgtagagacttccgcgcgtgatggcttcggacagtgtgttagcgatattgttgatacattaatcgacattgttcctctgccagcattgataaaaaatacactcagtacagtcaaaaacagtattgtttctgtcgccaaatcattatggggcttattcttttaa

SEQ ID NO: 298809 - DNA, 321 bp, Proteus mirabilis; identical to SEQ ID NO: 297396

SEQ ID NO: 298810 - DNA, 2628 bp, Proteus mirabilis
atggctaaattattcaagacgattgatttaaatgttaaacataaaagtaagcagtgcagaggtcgttctgctaccacactgatctatttcgtgattatagggatggcaagtattgccagcgagtcatttgctgttagcaaagatattgaatttaactcagatattcttgacttaaaagatcgaggaaatattgatttatcaagcttttcccgagcgggatatattactcctggcaagtatgagttaattattaatattaataacaatgaattaagtggaacttatcgtgttgactatattgtgcccaaagatgatcccaaggcaagcgaaccttgtatctcacccatattagttaagcagtttgcactcagaccagaatggttaaaaaagttaacttggaaagataagggtaattgccttaatgaggcatcgttaccaggtatgagcctgaggacagatttaggtagtggggttttttttattactcttcctcaagcttatctagagtattcatcaccgaattgggaatcgccttctttttgggacgaaggtattgctggattattgtttgattataacgttaatgccaatgtcagagcgcctagtgatggcaagcagaaacagcagatcaccgcaaatggtacggcgggggcaaatttaggtgtttggcgttttcgggcagattggcaagcaagttatgagcacactacaggtgtattgcatagcacagaaaatcactggaattgggatcaattctatctttatcgagcgataacgaaatggggcgcccgtttagtcatgggggagacttacttacgttcaaacctattagataatttccgttttacgggaataagtttacttacggatgagcaaatgttgccccctaatttacgaggttatgctccagagatcacgggagttgcaaaaacgaatgcaaaagtcactgtgagtcaacaaggacggattatctatgagacacaaatcgcgcctgggccatttcgtattcaagatctgcatgatgcggtaagtggacgcttggatgttcgtattgaagagcaggacggaacaatacaagaataccaaattgatacagccaatattccttatcttacaagaccgggacgccttcaatataaagtatctgcgggtaagccttctcgattagatcataaaactgaagggcctatttttgcaatgggagagttttcttggggagtgaataatggttggtctctttttggtggcactttagtttctaaggattataactcggcctcgctaggttttggacgagatctaatgatgttaggtgctatctcttttgatacgactcattcatgggcaaccttcgctaatgagaataaacactatcatggcagttcatatcgaattagctattcaaagcgttttgaatctattgatgggcaaatcacttttgcaggctatcgattctctgatcgtcattttatgagtatggatcaatatttagataggcgttatcgctatggcgcacaagaaaataataaagagctttatacccttacactgagtaaacaatttcctcaatggggacttagtacctatataaattataaccatcaaaggtattgggatagaccgaataacgactattacaacttctctttatcaaagtatctcgctatcgggaagtttaaaaacattaacattagcttatccgcttatcgtaatcgttttaatggcaatcatgacaacggtgtgtatttcaacattaatttgccttggcgtgatagagcaacgataagttataactcggtcataaataaagaaggtaactcacataatgtcagctatttcgatcgcattgatgataacaataattatcgtctaagtgcaggagttagtagtcgaggtaaaccatcggcggatggtttctttacacattatggtgatgttgctttagtaacggcttcagccagtcatattaacggcgactatacttcggcatctttatctttccaaggtggggcaacattaaccactaaaggcggggattttcaccgtagcaatatgccgggggcaacccgtttgttaattgatactcaaggtgtttccgatgtcccggtaaaaagtcttagtgccatatctcataccaatatttttggcaaggcggtgatccccgatattaatcactattatcgaggcagtgcttctatcgatcttaaacagctaccagacaatgttgaagcactacgttctattcatcaattaactttgactgaaggcgctattggctatcgtcaatttgatgtgattgccggacacaaagcgatggcaacagtacagttggctgaaggaggcgttccgccatttgcagcgacagtaacaacgcttaatggtcgagaattaggtgtttttaacgacggtggaaaggtttatttaagcggtattaattcaggcgatgtcttgtatgtacattgggatggtaaaaaccaatgccaattatccattcctaaattggcggatacacaactgatcacatcactacttttaacttgctttcaaagacagccgactatttcaacatcattcctggaaacagataaaacgcaagcattacctcaacattcattccttagtaaataa

SEQ ID NO: 298811 - DNA, 528 bp, Proteus mirabilis; identical to SEQ ID NO: 297392

SEQ ID NO: 298812 - DNA, 153 bp, Proteus mirabilis
atgagcactcaagctattcccttattagatgatcaatgtgttgatatgaaatttataacccgtttaaccggactaacagataaatggttttataaattgatccaagatggagagtttcctaaaccaataaaattagggcgtagctctcgctga

SEQ ID NO: 298813 - DNA, 1491 bp, Proteus mirabilis
atgaaaaaagataaaaataaatggtatgaaaacagagtattacgttctgttgacaatctaaagctatggcaaaataatccacggtttgacccatcgaataaattaattaccgttagggattatgtagaagagttaatatcagacaaaaatgatgaacagagttttcttgatttactcagttccatatcagatagaggttttctgtcatttgaccctattgttgtttggcaggatgaaaacaacaactttctagtggctgaagggaatcgccgcgtaatggcactgaaattactccgctcaccagaaaaagcaccaatcgcaattcgtaaaactgttattaagctatcaagaaaaatagatcgagatagtatagaaaaaataagggtttgtgttgcaccatcatacaacgatgctcaatggtacattcttcaacgtcattcgaatgctagtcaccaaataagatggcaacgtttacaacagcaaagatttatcattaggttatatgatactcttgatcaaaatatagaagaaacaattaggcaaagtggtttcaaacgagcagctattattgaagcattacgctatgttaaaattcgtgatatagcaacaaaaccagaggtgacagtatatttaactgaagaggagaaaacattaatacttagtcatcgcctaagtatgacaatattagaacgatggtttggaaatagccaagtgagagaggcatggcatataaatttttcagaagatggagtttcaattaatgcggagccccaaagtttttacctggcatatgcagaatttttgaaattaatgcttaataaaaataataagcttggatacgcagtcaatactagaagtattgattctcattttcaggagatctttgattctttgccaaaagtattttctttacatgacaaaacagcccctaaaattatagcctcccccaagccaacagctgataatatgcctgaaggcgaaaatgaaaaaagagatcctaagggaaatgaagatggaaaacccttccttaagggaaatcccaaaaggcgtcaactaactgataaatatcatgatattcatgttaaaaattataaattaaaagcattgtttgaggaacttcaaaaattaccagtatatttatatccaaatgtttcagctgcagcaatacgaatttttcttgaattagcagtagatgaatatgtgattagtaatgagcttcaacatgatctggccaaacgagaaaaaaaaagctataatgatgtcaagctattgcaaaaattgagtattttaagaggggagtttattaatgatcgggatgctaacaaggtgattgaccaacttttacatcatggtaatgattatagtttaaacacattgaatgaatatattcatggtgtcaaaatacataaggtagaacctcaatttctaaatcgtttttgggatatgttatctccattatttagtatattaattaatctcagagatatttaa

SEQ ID NO: 298814 - DNA, 867 bp, Proteus mirabilis
atgttcaaatctcctttacgatatccagggggaaaatcaaaattaaccccctatgtactcgatataataaaattaaacaaccttgagggaggagcttatgtcgaaccctttgctggaggttgtgctattgcatggtatctattattgaacaatcatgtcgataaaatttatattaatgatttagataaatcgatttattcattctggcatagtgttttatatcgcacagatgaactttgtcagttaattgattcaactttaattacaattgacgaatggcataagcaacgaaaaatatatagggaaggagctagtgatcttcttaagcttggtttttcaactttatttctgaacaggactaatcattctgggattattaaaggcggagtaataggtggtttagaacaaaaaggtaattataaattagattgtcgttttaataaaaacagaatcattgaccaaataaaatccatttcaatgtacgaaaaaaatatacggctaactaatttagatgcaattcaatttattgataataatatttcaaagattgaaggtaaggcttttataaatatagatccaccttattatgttaaaggtaagggcttataccaaaattactttgaacatgacgaccactatagattatttgaaagtgtaaaacgtataaaacatccttggattgtgacgtatgacgatacccctgaaatatgttctatctattctgagtatttaccaaaatcttttgggttaagttatactgctcaaaaaaaatacattggttctgaggtgattattcattctcctagcttgattaaatcaaaatttcagcctggtattacctttaatcaaattaaaaataaactatag

SEQ ID NO: 298815 - DNA, 1203 bp, Proteus mirabilis
ttgccaatagtagatacagctgctgaacctaatgataaagttagccatttaacagaaaaagagaagcgacagcaacgtgacttttatgaaacaattttatcaagtatggattataatgattttactgctgtttatgaagtaaataaaaaaacaacatttgccccatgcggtgatgaagctagatatgattatgaggctatctcttctggtgaggataatttaggcgccatattcaataggttattaggttttcagcgttctttcatagatgataataaatgtggaaatggcattttttgtattgatgaatttgagagtggtttacatccaatagcgcagtggaatctttttaattatctattaaaatggtcgaagaaatataaagtacagctaataataacaactcactctttgcatttaattcaaaaaataattataaatcataatgaaaatataaaaaacaacaaggtaatattaaatttcataagcaaggcaaatgttgaaaacaataatttcaatataattaaaaatccaagttatgatatagcatataaagaattaacatttgaagagcctgaggacttgaataagttaagaaagataaatgtgctatgtgaagataaagttgcaattcatttagtgaaatgcctaataaaaaataaagatattatctctctcgttaattttgaatgtaatttaaataatgattcaataaataaaggtactagctttatattattatcaaaactatgttctaatttttcagttttattaaatgaatcatttgttatttttgatgccgatgtgaaaaataaaatagggaaaataaaagataaaaacacatatattgttttacccgataaagataacctagcgatagagaggcgaatcattgtttttattttggaactacctggagatgatcattttttcattaaatttgataaagaaaaagagagatttattaatgagtttaagatgtcagggtttaagacgttaaatccaattgaaataaaagatgaaaaaattgtaagtatttcattatgtaaaaaatgggctgaaggaaatttacctgaatttaaaaaatacataacatactatgttaaaacaattaattctgatgtttttcgaaatgattttatatcaaaaataaatgaaattaataagagaagagggttgcctataataaatcattcattctga

SEQ ID NO: 298816 - DNA, 213 bp, Proteus mirabilis
gtgcgatatatattattattctttatctctttgttttttattgttatttttctattaaaaacacagggcagtaccaaaaacgatgttattaaccaacccacagaaatagaaagaaaattaaataaaaaagtcgaaagatgtatgtttcactcaaaaataaaaactaaacgtttaccttggataatgttaacacgtaaacgttcatgctcttag

SEQ ID NO: 298817 - DNA, 900 bp, Proteus mirabilis
atgaatactaaaataaaagtcgctattgtgggctatggcaatattgggcgctttgcactagatgcagtacttgcagcacctgattttgagttagtgggggtggttcgccgtgatagtcaaaatattccagaagaactgcgaaatataacagtaacaaatgatattaaaagcttaggtaaggtggatgttgctttattatgttcaccaacgagagccattaaagatttggctaaatcgatattgagcttaggtattaataccgttgatagttttgatgtccacagtgatatcgttgcattaaaaacagaactggatgaggtggcgaaaaagcataaccgtgttgcagtgatttcagcgggttgggatccgggttcagactctattattcgtaccttaatgttagctatggcacctaaaggtattacctacactaattttggtcccggtatgagtatgggtcatagtgttgccgctaaagctattgatggtgtaagagatgcgctatcaatgactattccattaggtactggtgttcatcggcgtatggtttatgttgaattagaaacgggtgctaactttgcacaggttgagcaagccattaaggccgacagctatttttcatctgacgagacacatattaaacaagttgatagtgttgatagcttaaaagatgttggtcacggagtacaaatgacccataaaggggtgtcaggcaaaacacacaatcaattatttgaatatgctatgcatattaataatccagcattaacatctcaatttatggtttctgcagccagagcaagtatgaaacaacaagcgggtgcctatactgtgattgaaattccccccgttgattttttagcaggggatttaaatacattaatcgcaaaactggtgtaa

SEQ ID NO: 298818 - DNA, 291 bp, Proteus mirabilis
atgcgccgtcagtttgagtacaagcagctctggcgaggtggtcaggtactggcaataccaccggcctacaccagtcagaagtgcgcttgctgtggtcatacagcaaaggaaaaccgccagtcacaaagtcaattcgagtgccttgaatgtggatatacagcgaatgctgatatcaacggggcacgtaacattttagcggcaggacatgccgtgcttgcctgtggagggagggtgcagtcagaccgcccgtcgaagcaggaacccgccgaggtgattcagacatcagtctga

SEQ ID NO: 298819 - DNA, 2109 bp, Proteus mirabilis
atgagattatcagtcattatattggctatcttcatgattagcctatttataatggccgcctttctattctttaaaagaaggcggcttgatggctcatatcatcttccatccctcgccaaaccgacttaccgtaaactaacacaagatgattatggggtaattagtgactatttgtcctattttggcacctctaagttttcttctgggtattcgttacaaaactttcctgaaatacccactaaaggtgaagtcgttacgacactgcgtaatattgttaatcggtttgcgggatcatcagaggggctcaatcattggcgctattacattgatgcggtagagatccatattcctccattactggtgccttatctgcaacaagaaaatgtcctcgatgtcgtttgtactccttctatccccattgtcattggtgtgaatggccattttcttaaagatgaaaaatcacatttttctgcgttaagtttaaaacaactttctgaacccatactgtcaaatggcacttccactatccagaaaaatgaaggtgatgcggcgcatttattacatattcgccaagaaaccaacgaagagtatcggttacatcattcttcaggtttttggaatggctcgttaatttgcttagggttaatcttatggttaacggcattaatgatgccacaagtctttctcccttggataatggctgcgggagggacttttcttgttttaggcttgtttcttatttatcgacccatcatcaaatcacgaaaacaagaagtacaatgttttaaagggcgtttaaaacgctggggactgtttggtaattttgatcatgggcaggtaaaaaatatttcgttggggggaattgatttagtttatcctccacattgggaaccttatattcaaaatgatattgataaggtgacctatttagaaatgtatcctaatcatcatgttatcaagcaagggccttatttatcattgcatgatgaagaaaaaaactatccgtataagcgttacattaaaaatattatctttgttgtttgtagcctatttattataggtatgctgtatctctatcaaccgttatcattatcaatgaagttaactttttcatggataaaagagagtgaacctcatttagtgactaactttacggagttagaaacggccaagttgcatgtaggggatattattcaggccaaaggtgtcggaatgtgttatatgcctccaaacctttccagtaagaataataaaacaatatttgcaccttttgattgttcggggatttattggaacaacagcaacccaatgccaatgcctgagtctagtacgattgaaaaagcggcagcattattatatttggttgaagagcagctacaccccgtttctaacaaccgtgtaaacccaagcttaggtcaagctattactaaatctggcatgaatcttttggataattttgatggcattatcttgaaaacacaagatttatgcccgagagaaaatgaatgtattcggcttaaaatggccttggtaaacctaagtaatgtcaatgattggccatcattagttcaacgtgcagaaagtggcaaattaacaggaaccaatgttttattacgtgctgttagtgctgaggccttggaaaagctcgttgacaccaccacatcatcttttatctaccgagaaatagataaggccgcaatactgttaaatagtccaccaccgggtggtgtgcttttaatcagtgatgaaagaaaacagctcgttgattatgcttcaaataccaactctgtatttgaacctacaccattagagcaatggcgagaattacagcgattatctgatattttattacacacaccttttaatactggaggtgtaataacggggatggtaattgatgcgaatggcacgttacaaatctttttgcatagcatgcctgactcaatgaccctgttatattatatcggtaatacgttattattattctttgctattggatttttgatcctgaatttattttttatcatccggcgccggcgacaaaataatcaacgcatgcataaaatcagtcaatattacgagcactgtttttatcgccctcctcagtaa

SEQ ID NO: 298820 - DNA, 1092 bp, Proteus mirabilis
atggcacaagtcattaataccaactatctatccctggtaactcaaaacaacctgaacaaatctcagggaactttaggaagtgcaatcgagcgtctgtcttctggtctacgtatcaacagtgcaaaagacgatgcggcgggtcaagcaattgctaaccgtttcacttcaaacgtaaatggtttaactcaagcttcacgtaatgcgaacgatggtatctctatcgctcaaacaactgaaggtgcattgaacgaaatcaacaataacttacaacgtatccgtgagttaactgttcaagcgaaaaacggtactaactctaattcagatatcacttctatccaaaacgaagtgaaagaacgtttagacgaaatcaaccgtatttctgaacaaactcagtttaacggcgtgaaagtactgagcggtgagaaatcagaaatggttatccaagttggtactaacgataatgaaactatcaaatttaacttagataaagttgataacgatacattaggtgttgctagcgataaactgtttgatgctaaaacagagaaaaaaggtgttacagaagcaggtgctgcaatcgatgcgaaagatatcggcgttgctggtgcaacttcatacgattcaggtacagtaaaagaatataaagtagatggtgttgtttctgctgataaagtaattttcaatgatggtactaaagattacctcgtaaataaaagcgatttcgcactggaaggtgctgacaaagctaaatttactggtgctaaaacaactgaatttacagcagatgcaggtaaagacgttaaaactttaaacgttaaagatgacgctttagcaactttagacaaagctatcaacaccattgatgaaagccgttctaaattaggtgcgattcaaaaccgttttgaatctactatcaacaacctgaacaacactgttaacaacttatctgcttcacgtagccgtatcttagatgctgactatgcaacagaagtttctaacatgagccgtggtcaaatcttgcaacaagcgggtacttcagtacttgctcaagcaaaccaagtaccacaaactgttctgtctctgttacgttaa

SEQ ID NO: 298821 - DNA, 708 bp, Proteus mirabilis
atgagagttggcgtaataggtgcaatggaacaagaagtcaaacttctgcgtgaacaaattgaaaactgcgaaatagtctctcgtggtggttgtgaaatttatactggcaaaatcaatggtgtagatgttgcattactaaaatcaggcattggtaaagtggcagccgccatcggtaccacactattacttgaacattttcgccctgatgttgtgatcaacaccggctctgcaggtgggttagatgcaaaattaaatgttggcgatattgtcgtatcaacagaagtacgttatcacgatgccgacgttactgctttcggttatgaaccaggacaaatggcacaatgcccaccggcatttattgccgatcccaaactggtcaatattgctcaagagtgtattggatcactaaaattaaatgccgtgcgtggattaatctgcagtggcgatgcttttattaatggtgccgagccattagcgcgtattcgtcgtacttttccagaagtcgtcgctgttgagatggaatcaaccgctattggacatgtttgccatcaatttgatacaccttttgttgttgttcgtgccatttcagatgtggcagataaagaatcgcatttaagttttgatgagtttttatctgttgccgcacaacaatcaagcttaatggtcactactatgcttgataaattaaaaacagagactcagttttaa

SEQ ID NO: 298822 - DNA, 1509 bp, Proteus mirabilis
atgatcgattttaaactgaagttaaattatcaacgcaaatataacagcagtgatatcgatattgatgatgaaatgcagatctcgcgccaatttgaaagcgatcgcgggcgtattattaattcagcggcgatccgtcggttacaacaaaaaacacaggtatttccattagagcaaaattcggcggtacgaagtcgattaacccattcgctggaagtacaacaaataggccgttatatcgctaagcaaataatcggcgaactaaaaaagcataataaattagaagaatatggcttaaatgaacggattgatagcgttgaaagtttaattgaaatggcgtgtttaatgcacgatattggcaatcctccttttggtcattttggtgaagctgcaattaaacattggtttcgtaaggtgttagcacctgatgcttccatagaatttgataattgtccttttttacctattcgctattcagcagatcgacatttaaatgaattaaaacagactttgcgtcaagacttatgccatttcgaaggcaatgctcaggcaattcgcatggcgcatcacttgttaaaactcaatttaacctatgcgcaaattggctgtgttttaaaatatacacgtccagcttattggcaaggtgctacgccgaaagaatttagctatttaatgaaaaaaccaggttattactggtctgaagctgaatttgttaaagaagtgcaagaaaaacttgcaatgaaagatttttgtcgttttccactgacttatattatggaagcggcagatgatatttcttattgtattgctgatttagatgatgcggtagaaaaaggtatttttgatatcaatcgattagtacagttattaaaaaatgcatggagtgaaagtggtgcggtaacagaaggtgatctgtttgatatcactgttaatcgagcttttaagaaagttgatcaaaatgaagctaagcgtagcatgcaagatcaattttttatgtatttgcgcgtctatattaccggaaaactagtaccttacaccgcctatcgctttatcaagaacttacctcaagtttatgagggcagctttaaccacgctttacttgaaggaaagagtgctgaacatcgtttattggcaacgttaaaacgagtggcgcaaaagtgggtatttagtcaccccgaagttgaagagcttgaaatgaagggctatcgagtgatcagtgggttattggatatttataagccattgcttttattatcgaccgatgattttctaagactacataaatataatgaacatcctcattatgttattgagacgcgtttatatcataagctttcgattaaacataagcttgcttataatgaagcattagaaaaaatttacgatattaatagtgaagagggaaaaaccttagagttttattatcgtacaagattgatacaagattatatcagtggtatgaccgaccattatgcatatgaagaatatagaaaattaatggtatgtgattaa

SEQ ID NO: 298823 - DNA, 618 bp, Proteus mirabilis
atgaatagatatgatgtatctaatagcgaaggaaaatttgctgacggctctgatgaagaggtactggctaacaagctagggctttcaaacgttgatgatatcaatgatgctgagcttgtcctgttagaaaaactgtatcaagtcatttttgaagaacaatttcccactgagcaaattaccgtatcacttattcagcgttggcaccgccaatggctaggaaatgtttacgagtgggctggtcagttacgcacggtgaatattagcaaaggtggctttatgtttgcccctgcgggacgtgttgcaaagttacttgctcaatttgaaaaagagcatctcacaaagtacacaccctgcaccaatatgagccgagaacaagccatagaagctattgccatagtacatgtggaattaattctgatacatccgtttagggaaggaaatgggcgcttatcgcgtttactcgcagatgtgatggcagtacaagctggtttccagccgttggattatgaaagttggactcaacaccccgaacagtacatcgcagcaatccacgctgggttaaacctgaactatgaccccatgaaatattgggttaatgaagccttaaaagaaaactaa

SEQ ID NO: 298824 - DNA, 165 bp, Proteus mirabilis
atgaaaaagaacgaattaattcaagcaacaagaccaactcgtactcaacttattcgttcggtagcaacctctacagcaattgaaacagggcaggagtcccgtcgccttgaagaagaaatgaaagcgaagcgtgagaagtttggacatttgaaactggcgatttag

SEQ ID NO: 298825 - DNA, 453 bp, Proteus mirabilis
atgcgtagtcgtccagcctctcgtttgatagtcctttcacctgaaagccatgtactactctttaagttctgccataaatatgatgctttaaagggaaaaacatattgggctacaccaggaggacaacttgagtgcaacgaatcttttgagcaggcagcgttacgtgaattatttgaagaaacgggcctgacaagaaaaactacgggaccacaaatagcctccagaaccttccctatgatactgccaagtggtgagaatgttattgctgaagaacgtttctttataattaatgcagataaatcagatatcgactgctctggttggagtcacaacgaaaaagaagtcattcacgatcactactggtggaccttagatgagctcagacaaaccaatgagatcatttttccactcgatttgataattaatatacttgaaggtttccccagaacttaa

SEQ ID NO: 298826 - DNA, 183 bp, Proteus mirabilis
atgaagcgaaagttgcttgcccatatgattcaaggactagaaagcggtgcagtctatgattatgtgagttcacacagcggtgtttgtgcattagaacatgatggatttgtgagcttgcgtaagctgtctgatggcgattggaagcacccatatttggatatagtgttgaagcatggctgttag

SEQ ID NO: 298827 - DNA, 534 bp, Proteus mirabilis
atgaaagttgaacaatctcaagttactaagttagtaataacgggtgtagaacgtcacgaccctattcatgtttatcttgaggactacggcgataatcaaaatggtcgtgtcacaattagcgaaagcggttgttcatggtcttgcttttggggttctatgggtagcccgctaattgagtttattcagcgcatcaataatcactactggataggtaagttagattctaatttaatctctgagatagacgctgataacgatgcaaatgctgaatacgctaaaaagcaagttatcgaactgcgcaaagatgatgaaatagataaatacgaagcaagggaatattgggatttaatcgaagcatcagatagtgttaaagatgagtgctgtaatagttttttaggtggtaagttgcttagtttgtttggtgatgatgcttggtataacgattggcccactactcctaaccctcaatatctcagaatggaatcacgattaaacgctgttcgtgaggcattaaaacaaataaaggtgagttaa

SEQ ID NO: 298828 - DNA, 165 bp, Proteus mirabilis
atgactattgaacagttacaagaagaaaatgcgaagttgaaacaagcgattattgacatctacagtaattgcgaggaatgcgaataccaaggttatggaacattctacgctgtagagcaagaccatgttaattcagcatacgaactaacgcaaacaacggattaa

SEQ ID NO: 298829 - DNA, 291 bp, Proteus mirabilis
atggcaattaacacaataacggcaagtggaaacttaggtaaagattgcgaacagcgatggacgccaaatggtaaagcggttgcatcttttagtttgccagtgaaacaaggttacggagaacacgaaaaagtatcttgggttatctgtaagatgtttggctctaaagctgaaaagttacctccgcacctaaccaaaggaataaaggttacggttagtggtgagttcatcatggaagaatggacaagccagagtggtgagaaaaaatcagctccagtaattattgttaactaa

SEQ ID NO: 298830 - DNA, 699 bp, Proteus mirabilis
atgattagtaatgacatcattctaagcaaaacaggcatcgatttaaccaaagtagagcaaggaagcgaagaatggatgtctatcaggctcggtgtagtaaccgcctctgaggcatggaaggttatctctaagccaaagtcagggaaaaaatggacagacacaaagaaaacatatttaaacacccttattggtgaagtctgtacaggagtttacaaggaagtatcagcaaggacgctggaatggggtaaaaactacgaattagaagcaaggatgacattcgagttttacaccggattaacggcaaaggaagtgccaataatatttaaagatgagcaactacggatggcttgctcaccagacggcatttgcagtgatggctctggattagagcttaaatgtcctaataacacggacgtatttatagacttagcattgaatggaatcgatgcaatgaaaaaggaatatgtggctcaagttcaatattccatgtgggttacaagtaaggatatctggcattttgcaaattttgacccacgaatgcctgcaggaaaagaaatagcatatttccctgttgagcgtgacgaaaaaatgatgaaagaatttgacgagttagtacctgagttcattgaggtgatggatcagggattaaacaagttaggtattcaatttggcaatcaatggagtgtatatggcaattaa

SEQ ID NO: 298831 - DNA, 927 bp, Proteus mirabilis
gtgacaaatgcagttcaaagaatatatgaggttgtaaatcctcttaaaaatgagttcgaacaagtgtgtagcgagccaagcattgcattcaaaagggaatctgaatttgctatgcaaatatttgcgaacaatgattatctggcaaatgttgcagttaataatcttgtttcagttcgtagtgcgatcatgaatgtctcagctatcggaattagtttaaatccagcgcaaaagctggcttacctagttcctagagataaaaaagtatgtctcgatatcagttacatgggcttgatgcatattgctcaacagtcacaggctattaagtggtgtcaatcaagcattgttcgacaaaatgataatttccaacttacatcaatagataccgcacctcgccacgaatacaacgcctttgctactcaggagcagagaggtgagattgttggcgcttacacagtagtaaaaacagaagatggagactatctaactcacacaatggctattgctgatatttacgcaatacgtgacagatcaactgcatggaaagcttggatatcaaagaaaaaatcgtgtccttgggtaactgacgaagagcagatgattctaaaaacagtagtgaaacaagcagccaaatactggcctcgaagagaacgtttagataaggctattgactatgttaatactgaggctggagaaggtattgattttgggaacgagcaacaagaaccaagggacataacgccagcaagtgaagatcaattaaaggctatcacggacttgatgcttaaagttaatggcgaatggagtgatgcttttttcacattcattagtaaaaaattcaaccatcagatatccagtccagagcaattaaccgcatttgaggccaataccattatcgacatgctaaggaaaaaggcagaagggaaatga

SEQ ID NO: 298832 - DNA, 222 bp, Proteus mirabilis
atgaatccttaccatgaacttgacgcaagggaagagcgcaaacaagaagaagcatcatggattgatgcaaaggatgctgagttaagcaatgtcgcatttaatgtggttgatggattaccaaaggatattaccagtcaatggagtgacagcgttttcgatatgacaattgatggtctttacaaggagttaaagaactatcaggaacgtaggaggatgtcgtga

SEQ ID NO: 298833 - DNA, 471 bp, Proteus mirabilis
gtgactcagattctagatatgtgctgtggtagtcgcatgttctggtttgacaaggaagatagccgagcaatttacagcgacatccgcgcagagaaacatattttatgtgatggcaggaagttaaatatcacaccagacattatcgctgattttaaaaatctccccttccctgacggctcgttttatcaagttatattcgacccgcctcatttaattagagttggccacaacgcatggatgtttaaaaagtacggacgattaaataaagaatcatggaaagacgatttatcaaaaggatttagtgaagcatttagagtgttgaagccaaacggaacattggctttcaagtggaatgaaacgcaaatacctaccaagcaagttttagcgctaactgaccaaaaaccaacaatagtccagcgtgtcggcaagaacgataaaacgcattgggtgctgtttattaaggaggcgtga

SEQ ID NO: 298834 - DNA, 156 bp, Proteus mirabilis
atgaaaactaactattacagcgctatgcgtgattgcatggcggtgcgcatcactacgcctcaagcacgtaaaaataaacgtacaagcccatggttgttcagtttagctgtggtcattgtaacaaccgttggtgtaataccgacatttgtgagttga

SEQ ID NO: 298835 - DNA, 246 bp, Proteus mirabilis
atggggaaaatgacattcgtagttgagtatgaagatggcaaggagccgtctgtaaatgcaggagtggatattttaggtggtcgattaacagccgtggcatcctatgattaccgtgatgatttgcttactcagggtgaggctcaagctgtaaacaattccattgaatttactgtactgcgagactactgcgaagagtttgaagttgatttcgacgaagttgtcgctaagttagaatcgccactctag

SEQ ID NO: 298836 - DNA, 276 bp, Proteus mirabilis
atggaaatatggtttaaggaatttgagtcacacgggcgtcagattctaatcaagaaagctcataacgccgatgagtcaaaaatcggggtgcaatattgctggccagagaaacttttcgaggtcgattttggattatggatagattacgacgacgatgatgaggaaggctgtaataaagcggaagaagcacgcaacaagctattcgacaccatcgatcaggaagcagtagataccacagtgagtaacttaattcaaaaactcaagcttgatgattag

SEQ ID NO: 298837 - DNA, 276 bp, Proteus mirabilis
atgattatcgcttattcaacagctcctaatgaaactgtcgcccatgaaatagctcaccatcttatacaggcgaagcttgcagcttgtattaacgtccttcctaatatcaaatctatctatcattggaataatgaaattgttgaagataatgaggtacttatgatgatcaaaagtgaaagttcaaaacaacagattttgattgatacactagtaaaaatacacccttacgatacacccgaagtcattattatccctatagaaaatagtggggtttaa

SEQ ID NO: 298838 - DNA, 711 bp, Proteus mirabilis
atgaaaaaaacattactcagtcttgttatgctgactgtaatatcaacgccagtattggctaaaacgcctatcgctaatttgaaaatcaatggtgatatcaaaccaccaacttgtactattaatggcgcaacacaaagtgatgttatttttaatttaggtaaaattagtccatcgttgatccctaaatcatcaaattatatatatcctaataatacaacctcgactaacgtcactattgaatgcgatgcaaacacttatcttacatttaaagccactgatacttatgtaaacagtcagcttgatcttgatcaaaccagtaaaactaaagctagtgggatatttcacctggttaataaagaccaggtagacacttccgtggggggaatactattcgtttggtacaatgtgactgtagatggaaaacccgcatttattagccgggcaaatgatgcaacggtaggtttttcagataataaaactgttatagttaaagaagtcactaatggttggacgacaaaacaacaagaaaatgtagataaaaatagtttagatttaatgccaggtcagattttttctaccagcatttcagcagggaaagtatcttctgcatttattttatctaaagattcattaaataaaaaaggcatagatatttctaacggattagattttatcggcgaggctgttctcacttttaactttggtgtctaa

SEQ ID NO: 298839 - DNA, 363 bp, Proteus mirabilis
atgcgcttagaagttacctgtaaagatcgcatcgggttaacccgcgaattactcgatctgcttgtattaaaaaatatcgatttgcgtggaattgaaatctttcctattggtcttatttatctaaatttttcgcaaatcgattttaatatatttcaacctttaatggctgaaatcagaagaattgagggggttatcgatgttcgtactgtggcttttatgccatcagagcaagagcatcgagctatgtggacactattagaatcagtacctgtccctgtcttttctattaataccaaaggtcaaattaagttattaaacccagctacacggcatctgtttgaattagatgaaaatgatacctaa

SEQ ID NO: 298840 - DNA, 1218 bp, Proteus mirabilis
atgaaaaatgttgcgataagtggatgggaacttaatttaccttcaatagtaaattttgaacaactttctgaacaactcttattaaaaagaacaattaaaacagagaaatacttctctgatgattattttgtagaatattttaaatttaatcataatccggcggtgatcccctatcaaaatattcccaatgatcattttgaaatattaacgcgattaattcataacagtttaaaacgggctaatatcaccctagaaaagcttcgcgcttcacgtaccataatgtatcttgcaggtcacgggcctagagctgattttatggattaccaagggttttatgataaaaacgatgccgaagatgttcaatattctccgcagataaaatcactccatgcagcctcttttgcacaggatgaattagcgaataaattgtgggctgaatatcagttagatttcccacctattcctatctattgtgccagtaattctgcgttaatggctgtgcatataggacataatgaaataagccaagatatggcggatattgtaatagtattgtcgtggaatagcttacttttacaagatatagcctttatggatagccaaggcatgttagttgaagcgcacgctcaacctttgagtaaatacagcgatggggtcaccttatcagacggttatgccgtgatgattttagaaagccaacaacagataaactcgagacaatatcttgcacctgcttatatctatcattccgtttttatgcaaagtaatgctgaacggacaatgggaggcacattatttaacttttatacgatatcaaaagtgatttctcagcttctcgatcttagtcattatttaccaagtgatattggtgctatttttattcatggtaatggttcgattattagtgataaagctgagacggtagctattactaacatctttaaacaacccattcctattattagctataaagggcagataggttatatttctaattgctctggtattattgatttaatgattatagctgattcattaaaaaataatcgattgatcccctcaactacacattatccaatagatgatggaatggaggttaatttcctcactaatcaagagtgtgtgaactatagcgctaaacctattttaaaaatcggcttaggtatggatggctctattattgccatgttattaatcgcaaatggagagcaaggatga

SEQ ID NO: 298841 - DNA, 1293 bp, Proteus mirabilis
atgaaattatataatttaaaagataaccaagaacaagtcagctttgctcaagcggttaaacaaggtttaggaaaacagcaaggactcttctttcccaaagacttgccttcattttctcaagcagaaattgatgcgctattaaaattagactttgcaacacgcagtagccgtattttaagtgcttttatcggtgatgaaattcctgctgatgtgttagcaaaacgtgtgaatacggcatttgcttttcctgcgccagtgacacaagtagaagaggatattagttgccttgaactcttccacggaccgacgctggcttttaaagactttggtggccgttttatggctcaaatgttatcagaagtcgcgggtgaccagcctgttacaattttaacggcgacatccggtgatacaggagcagcggtcgctcatgctttctacaagttagataatgtccaagtcgtgatcctctatccacaaggaaaaatcagcccattacaagaaaagctattttgcacattaggggagaatattcatactgttgctattcaagatgactttgatgcttgccaagcattagtcaaacaggcatttgatgatgaatatttaaagaacaccatgcatttaaactcggctaactcgattaatattagccgcctactggcacaaatctgctattactttgaagcggttgcacaaattccagctgaaaaacgtcaacaattagtcatttctgtaccaagtggtaattttggtgatctcactgcaggattactggctaaatctatgggattgcctgttaaacgttttattgcggcgaccaatgtgaatgataccgttcctcgctatttagatagtggtaaatgggaaccacatcggacaatagcaacactttcaaatgcgatggatgttagccagcctaataattggcctcgtattgaagagttatatcgtcgcaaaggttggctgttatcggatctttcgcatggggctgtgagcgatgaaacgacggaagaaactgtacgtgaactggcacaaaaaggctatatttcagagcctcatgcggcggttgcttatcgtctattacgtgatgagctacaagaaggagaatatggggtatttttaggtactgctcatccggcgaaatttaaagaaaatgtcgaacgtattttaggtgatacattacctttaccaaaagaattagctgagcgtgctgataaaaaattactatcgcatcttttaccggcagatttttctcaattaagagcatttttgttagaacgagcacctaaataa

SEQ ID NO: 298842 - DNA, 180 bp, Proteus mirabilis; identical to SEQ ID NO: 298318

SEQ ID NO: 298843 - DNA, 501 bp, Proteus mirabilis
atgaccaatactactgctatcgcactggcgaccaattacgaaaaattacaacaactcgttgaaacaggagaattctctcctgaagatatcgcagatacgttggaaggtatcgagggcgagttaggtgataaattggatgcaattatgcaccacgttcgcaatatcgaaggtcaagctaaaacactggatgaagaatctaaacgtttatctgatcgtaaaaaatcattcgaaaaccaagctaaaaacttaaagaaatatgctcttaactgcttattggcttcaggattagataaattaaaaacaacaaaaaatacattcactgctagagctggtgttgttcgagtcattatcgacaatgaggctttattaccggatgagttggttgatgttcaaaccatcaccgcgcctgataaaaaaggcatcaaagaagcgcttgaaaacggaattgaaatacctggtgctcacttagaagttggtgaccgatcattaatggttcgttaa

SEQ ID NO: 298844 - DNA, 1968 bp, Proteus mirabilis
atgaaaacttttatctgtgtatttgagcctacgaccgaggctcgtacaaacaacggtgctgtaccgttagcaatagcgttaaacaccgctaatgcaaaactggcaacagcgactgccgtagtaaaattatctgaagcatatccagaagctatggataactttaacaccgatgagccattaattagcgaacaccttgacagctctgtttgccctactttagatatattcgatgaaaaatttgctgttgaaaatgaatttgatggaacacaatggaaacctattgaatataaaaatttcaaaaaactaggaacgaagcccagaattgcgtgtttacttttatttggaaagactcaaataactaacaatgaattttcaactgctctggaatatttggcaggaaaagaagatcccaaaattcgtaatatcgctacaggcctagctgaaataacaaaactttctttgatggatgctgagcaaacaatggaaatagcacaggctatctatgagtttgctaatgaagatgtcaccgttgaagaagctaaatcattaggtgaaagctggctaaccgaagaaccagaacaacaacaagaagaaacatcttctatcaaacgtaactattcaaccatagataccgaaattgccttagcactgttagatgactttgatcctaataatgtcctcgcatctcaagtaaaaaaagccaaagaactgatagatgacgacgacaaagcatggaaacgctggtcaatggatttacgcacaacagctggcatcttggatataccacgtgaaaagattttctcgttaatagctgaaagtaaaaaacagcctgagttattagataatcccaatgcgcgaaaagaatttattgaccgtcatttaggtattaacaagcctactggcaatgctgaaaaagaagaaagtatcacttccaaccaattggataataccccttcggtatctaacaaaagtaccgttgaaaaggaaactaagcctaaacgttcacgtaaaaagcaagaagtagcccctaaaacagaaagttctccggtggttgaacaaactgtagagtctaaagaacccgaaacaccatcagcacaacaagataattttgagcaacgtgccagtgttattgatgaagttcttaacgcgagtgacgctaataacctaagtatttggaaacaagtacaacgtacagaccctcgctttactaagccgttagaaggcatgggatttatagggactagcataaacagcacttacatgtttatgcgcgcgactgaaatattcggccctattggtgaaggttggggttatgaagtccttgaagaaaaatttattgatggaaagcctcttgtagaacctgttctcgatgaacgtaataaacaagttgcaacccgttttttacgtgatgctgatggagcgttattctgcgaacaaaaccactcaattaagatccgtttttggtacatcatcgaatgtgaaacccgcggtgagtttgaaagttatggtgcaacaccataccgctatcaaactaactatggcattaaggttgacggtgaagctattaaaaaatcactaactgatgcaatcaaaaaagccctatcaatgcttggctttagctctgatgtctttatgggtatgcatgataaccctgaatacttagcgagtaataagcttgagttcgaaatcaaaaacgcgagtgaaaaagcggaagatatcacacgtattcgcaaagaattagacgagaaatttactaaacatacggaagtgatgcgtagtgctgttactgagaatgaattgcgaggcattgcatccacattaacgcgcgaaatttctgcacatatcaaatcagctcaagagcgtcgtgacaacgattatgagaaatatttgtccggccgtttacgtcgattaaaccaaatcgaaaaagagtgtttagaccaactgaaacataaagaagaggcaatctaa

SEQ ID NO: 298845 - DNA, 699 bp, Proteus mirabilis; identical to SEQ ID NO: 296367

SEQ ID NO: 298846 - DNA, 534 bp, Proteus mirabilis; identical to SEQ ID NO: 297266

SEQ ID NO: 298847 - DNA, 162 bp, Proteus mirabilis
atggttatttatttttatagagaatgggtaaaaatattattttttatgcttatttttttacctgttgcaaatgcggctacaacaatgaattttgatggtactttgattgatacgccatgtagaattgatcagcccccatctctggctctggctgcccattaa

SEQ ID NO: 298848 - DNA, 1068 bp, Proteus mirabilis
  misc_feature (1050)..(1059): n is a, c, g, or t
ttgatccttgattataatattaacaccaatgttaatatccctcatgaaggaagcaatacgcaaagtatttattacaatggtactgttggttataacttcggtagctggcgtattcgttctgattatcaagggaattataatcgaacctctggtgatgcggaaaacaataaagatttattaaattttactcgagtttatggatatcgcgcgatccgcagtttaaagtctaacctaaccatcggtgaaaactttataaactccaatatatttaattcctggcgttatacggggattagtttagaaagtgatgatcggatgctctctcctcaactaaggggatatgcaccacaagttacagggatcgctgaaactaacgcaagggtagttgttaagcatcaaggacgtattctttacgattcaacagtacccgcaggtccatttgccattcaagatttagacagttcggtgcgtggtaaattggatgttgagattattgagcaaaatggaaagacgaataaatttcaaattgatacagcctatgttccttatttaacaagaccgggacaagttcgttataaggttgttgcaggacgctctagagataaattacataatacagaaggacctatatttggtacgactgaagctgcttttggtttaagtaatgcttggactatgtatggtggtaccattttcgccggtgattataatagtgtagcacttggggttgggcgcgatatgttcgctttcggtgcggtatctgccgatattacacaatcttatgctcgattacctgatcgtggcactatgcaaggtaagtcatggcgagtcagttactctaaacgttttgataatttggatgcggatgtaaccttcgctggataccgatttaatgaacgtaattatatgacgatgcaaaattatttagatgcacgttatcgtgatgattttactggaaaagagaaagaactctatacagtaacctttaataaaggtctttctgaatataacacatcaattggggtgcaatataatcatcagacatattgnnnnnnnnnnttctattaa

SEQ ID NO: 298849 - DNA, 897 bp, Proteus mirabilis
atggatgtttttgcagttaaaaatatttcattaaatttatctgcatcgagatctaaatactatggcaaagataatgatgtcttctttgcaagagtcagtattccattagagaataatagaggatttataaattatgatggctcaagaaattcggggaactatacgcataatatagggtactttaataccactgaagataacttagctaattataatttaaatgtttcaacgacatatggcgatgatatggatagtagttcaagcttctctggctattatggacgctatacttcaatcgctaatattaatgcgaatgccactatctcaaataaaaatacctcatcatttggtttttctgctaatgggggcttaacgattaccgctaaaggagcagcacttcacccagatggatttaatggtggtactcgcttattagttgatactgaaggtgttgcaggagtaccagttgatggtggccgtgtaacaaccaataattggggttatggtgttgttaccgatattaatagttattatcgcaatgaaacaacgatcgatttaactaaattacctaataatatagaagcgacacaggcgattgtagaatcttcattaactgaaggtgctattggttatagaaaatttgaagtgttaaaaggtgagaaggcctttgcaataattaggttagctgataactcttatccaccatttggttcaataattagtaatgctaaaggacgagagctaggaataattagtgatgatggttttgcttggctaacaggtattaacccaaatgaagaaattagagtatcttggggagctgaacaacaatgtgtcgctaaacttccaaataaaatagaaccgagtaataagatattattattgtgtgaaaaataa

SEQ ID NO: 298850 - DNA, 711 bp, Proteus mirabilis
atgaaaaaaatatcatttttattattaggattaatggttacattaaactcctatgcagcaatttctttagatagaacaagagctatatacgaaggtgggtcaaatgcattagttattaatattactaatgataataaacaattaccttatttagcccaaacatggattgaaaatgataagaatgaaaaaattgagctagggccattaattgccacaccattagttcagcgattagagcctggtgataaagcgttaattaaagtatctgcgacaccagatattgaaaagttacctaacgatagagaaacattattttattttaatgttagagaagttccacctaaagctgaagacaataatgtattacaaattgccttgcatacaaaaataaaattgttttatagaccgaaacaaatattgagagagccaaatgctatttggcaagatcaattagttttaaataagctatctgacggttatgaaatagagaatccaacaccttattacgtcactgtattcggtattggtggttcaaagaaagaagcggttgattctgagtttaatgcagtcatgattgcccctaaatcgtcacaaagggttaatagtaaagtgtactcaacgccatacttatcttatataaatgattatggtggaagaccgacaattaaatttcaatgtcaagctaatcgttgtgtagcagagaaaaaataa

SEQ ID NO: 298851 - DNA, 1737 bp, Proteus mirabilis
atgagtgaaattaaatatattaaagaaaagcagtacttacaaaaactgttcagtgagtatgcagataaagcgccacatttagcgagcgtacttgatcctcaagatccacaaacaagttatctcttagaaggctttgcttttttatctgctcgtttacaagataaaattgatgatgcttttcctgagatcacattacccctactgcaacgactaaattcccaagccattaaaggcctaccatcaacaacaattatccaaattgaccaaagtgaaattctcccctatcccatggagattaatgaaaaacatttggtgattggcgacaacggggcacaatttagtttctgccataatttcaccatcatgccttatagcattttggatagaaaaattactcagcatccaaaccactcttgtatctctcttgaaatattatatcgtggtgatgtggaattaactcaaacaaatgcacttaatgtttttttaggggaaaataaaaccacctcagacattttattactcgcatttagtcaatattttgaaaaaattgaggtggtacataacggtgaacgttatgaaggcgatcctcttaattatgcttttgaacccaaaattggcaatgactataaaatcttcccacagaaaaataactcattttctgcgccacaacgtttattagaaggtctttatttaccccatgttcaccattttattgagttagatataccacaaatagtgactcaattagattggaaacaacagcagcggtttgttgtgaatatctatttcagtcagcaacttcctttaactcaagaagagtgtaatcagagcttttttttaaactgtgctccagcgattgatagtgaagcaaaacatacacttttaattgattttaaaaagaataaatcaagttatttactccctattccaacccatcactatttggccgatcttgataaaattgagttatcactagagcctcatgagctagcgcgtggcatatactgtcatttttatcctacgacagaattaaccgccgcctctcgtttaatgccccaatttcataaagccattttctattcattaacaatggagaaaaatattactgggcatacactttattatttgaatttctttgataataaaggtgatcctatggtcacaccgcctagtttacattttgcatgtgtttatattggctttgaacaatataaaagaaatgagttaggtctattaaataaacacagcgaaaaaatgcctgatgcagtaaaaacaggaaatatcacattattatcatcttgttatccacctattgtaaataatcaccatttttggaaattgttatctcattacagtgctaatggttcaatgttaatgtcattagatactattaaacatatgatttctgattatattctttaccgagatactgataggcagatcactcgaaaatgtgagcgattattaaatggactcgttgaactaaaaacacatttatatgactatattttaaaaggtaaaccctatcgttgtttatctttatcgctattcattgacgaaacacaatatgaaaatagaggtgaagcttttgtctttactacacatctttaccattttttcccattctgtttatctgaaaatatgttattggaaatgtcagttacactcaatgatcagaaaaacaccacttggtatttatctccctcaccactaaggggctataaatcaatgatttaa

SEQ ID NO: 298852 - DNA, 1998 bp, Proteus mirabilis
atgcgtttaaaatcaattaatgcttttgtgttatccttgttagtaagtccattttatgtttgcgcagatttaaatatggacttcttacatggaggagttcaactgcaagctgctggtgtatttgatgaaaataccaattatcctgctgggcattatattgttgaggttattttcaatcgaaaattaattagtaaaaaagaattaattatctcaccagaagataatgaaaatttatgtttaaaaaaagattggattaatgagttatcgcttccaataaaattaaatttatttgaattatattatcatcctgagcgcgattgttatgatattagccgttatcctggggctcaggttatttttgataattcgaagcaaactttaacatttagtattcctcaaattgcattagatgaatctctgcgccggcaggaatgggattatgggataacaggtattaaattaaactattcgggctatatttctaaaaccagttcttcacaagcacaaatttatggtgattttgatttatatgctaatttaggtcgttgggtcgcttatgttcgtagtagttaccaaaggaactcgggtacagaaacatcggaggcaacagtttccacagcaattaaatcaatacaaggaagttttaccgtaggtaaaacaataacctctttatcaatattacctaactttgctttttatggaatgtcactgcgctcggaaagggatatgcgcccatgggaaaaacgaggttatgcaccggttatttctggtgttgcaaactctaatgctaaaattactatatctcaaaatggatatgtattaagttcacaagttgttcccgcaggggcttatcaattaaaaaatatagcaccagtaagtaatggaaatataacagtgacagtagaagaaagtgatgggacaaaaacagttcgctattatcctgttgccacactttcttccttattacgcacagatgaaataaattacaacattgctatcggagaaaaagaaacagtaggtaaaagagaaaatagtttattttttctaggtgcatttgactacggattaactaatgttacggttcatgctgcgggaattttgcataataattataaaagtgcagcattaggaatgagtaaagattttggacgatttggtgcaatgtcatttactgctaatactgctgtaagtgtatttcaaaaacagacaccaacagcacccgaagttaggcagtctggtatcagctattcgttacaatatgcaaattcattgactgataatactaatttacagctactcgcatatcgctatactggtaaagattatgttgattttaatgaatttaattcaaatgctttatatcatcgcagtaatcgtaaagagcgttatgaaacgatattgtcccaaagttttgatggtagctttgttagcttatctgcttggatgcaaacatatagaaatagtattagtaatgaagttggcgcaaatattacttacaatacaacaattaaatctgtcgatttctcattatcagcggattatcaaaaattaaacgattatgagcatgataattatattatttctgttggaataaatattccctttagcttatatgataaaaatcatttttgggcaaattctgttagctacgataggaaaaataaagctagttttaattctggtgtttctggaagtattaatgaaaaaataaactatagtatcaatacaagtaaagatcgtgataactggtctaattctgcttattttggtattgatcatagtattattaatacgggatatgcgatttctcagaatggccatcaaactaccagttctattaatgcttcaggaagtttattagccaccccagatacaggattattattcagtaatgtcagaagagatactgtcgcaattgcaaaaattaaaaatatagagggtataacattcaatttccataattttatgatcattagattctactttctccaaatttaa

SEQ ID NO: 298853 - DNA, 429 bp, Proteus mirabilis
gtgattggtataaaatacagttttgccgataacaatacgacacttggctatttagcggttacagataatttttcagtacttcatggctacgataaattattccttggtttattagatgcaggctgtgatggcacagtttcaggatgtgcctgtgttttccctgagccatttgtgaatatgtatcaagcctatattacgggtaattatcaagaagcgaagcactggcaacaattttgtgtgaaatttagtgatgctttgaaatcaggcgcgaacatggcgatatttaagtcagcattaactatgcgtggcttaaatggtggtcatatgcgtttacctcaacttgatttattacctgaagaaaaccaacaattgaaagaagatctaacgcaattatgcaaagaagcggggatcgctttttcaattaattaa

SEQ ID NO: 298854 - DNA, 972 bp, Proteus mirabilis
atgaataaattagcgcttcctacttacccagatgtggttgaagcacatcaacgtattttgccatatcttaataaaacacctatcttaacctctcgcactattaatgagttaacgggtgctcaattctattttaaatgcgaaaactttcagcgcataggcgcttttaaatttcgcggagcaatgaatgcattatcacaatttacgggcgaacaacgcaaaaatggtgtgataactttttcatcaggtaatcatgctcaagctattgcactatcggcaaaattattaggtattccagctacaattatcatgcctgaagatgcccccaccgctaagatgcaagcaacaaaaggttatggtggtagagtcattctatataaccgttatacacaagatcgcgaagagataggacaaaaacttgctcaagaagaaggattaactttaataccaccttacgatcatcctcacgttattgccggtcaaggtactgcagctaaagagttattcgaggaagttggtgagttagatatgctgtttgttcccttagggggaggtggtttactttcaggttcattattatcaaccaaagccctttcgccacattgtagaatttttggtgttgagcctttagcgggaaatgacggacaacaatcattacgcaaaggtgagataatttatattgatacgccaaaaactattgcagatggcgcacaaactcagcatttaggcgattatacttttgagatcattcgcaacaacgtagacgatattttaacagcaacagatgaagaactaatttctgctatgcaattttatgctcagagaatgaaaatcattgtagagcctacaggctgtttaagtttagctgcagctcgtcaatttggtgataagttaaaaggcaaaaaaattggcattattatcagtggtggcaatgtcgatattatgcaatatggtcattttttatcacaaaaataa

SEQ ID NO: 298855 - DNA, 759 bp, Proteus mirabilis
atggatgcacaactgtataaagagtttaaaattatagaaaaagcgttttggtcagagatatgtgaaaacaatattcgtattggtgatcatacccactgctttatgacaccgatggacgcgcctatttttaattttatctatcttcgtcaaggcgctagcgaaaatactttccaacaagcaagtacgctgttctcctcgcaaaaaaaaggtcacatgctggttctgccggaatctctgttgcctgaatttgaagagataataaaaaaagcaggttatacgggtgacggtatgacaaccgctatgtatctctcattgtctgatgcgacttatcccccctataaaaataacccgtgcgatattattttaactaaccatgatcttaaacagtgggcgcaaccattgaaaaccgcctttcctgttggtgacgatacgataactaatgaatatattcgttatcaccaaaaagcgttagataatggtgcgacgatccttcattatgcattattagttgcagggcagcctgtatcatcattaacgctgacattacatgataaactagcaagatttgacgatattgggacggatattgcctatcaaggcaatggttatgccacacatttaattactcacgtattagagttttgtcgagagcaaggtgtcgagcgttgtttcttagatgcgtcagcggatggtctagcgctatatcgtaaatttggttttaagccactttttaactatttaagctttattaacgaataa

SEQ ID NO: 298856 - DNA, 1398 bp, Proteus mirabilis
atggcagccactcgcattgaaaaagactcaatgggacaaatcgaagtaccagctgaccagttatggggagctcaaacgcagcgttctctagaacacttccgtatttcagtagaaaaaatgcctgttgcactgatccacgcgcttgctttaaccaaaaaagccgccgccggtgtcaatatggatctcgggttattacctaaagaacgtgcagatgcaattattgctgctgctgatgaagtgctggcaggtaaacacccaactgaattcccattagcaatctggcagaccggttctggcactcaatcaaatatgaatatgaatgaagtgttagctaaccgtggtagtgagatactaggtggtatccgtggcatggaacgcaaaattcatccgaatgatgatgttaacaaaagtcaaagttcaaatgatgtgttcccaacggccatgcatgtcgctgctgttatcgcattacgtcaggatttactgccggaattaaaatcattactgaaagtatttaaagagaaagcagaagctttccatgatatcgtcaagattggtcgtactcacctgcaagatgcgacaccacttacattaggtcaagaaatctccggttgggcggcgatgcttgagcataatatcaaacatatcgaagattcagttcctcatgtgtgtgagcttgcgttgggaggaacggcggttggtacaggattaaatacacatcctgagtacgcagttcgcgttgctaaacgtatcgctgaattatcaggtcagccatttgtcacggctcctaacaaatttgaagcattagcaacctgtgatgcactggttcattctcatggtgcgttaaaaggtttagctgcctcattaatgaaaatagctaatgatgtacgttggttagcatctggccctcgttgcggtattggcgaaatttctattccagaaaatgagccaggtagctccattatgccaggtaaagtgaacccaactcagtgtgaagcgttaaccatgctgtgcgctcaagttatgggtaatgatgttgctatcaatatcggtggtgcttcaggtaactttgaactgaacgtatatcgcccaatgattattgataacttcctacaatcagtgcgtttattggctgatggtatgcgtagctttaacgagcattgtgctattggtattgaaccaaaccgtgagcgtattaataaattattacatgagtctttaatgctggttacggcattaaatacccatatcggttatgacaaagctgcagagatcgcgaagaaagctcataaagagggcttaacgctgaaagaatctgcactgaaactgaactacctgacagcagaagaatttgatagctgggtacgtccagaagatatggttggtagtatgaaaaaataa

SEQ ID NO: 298857 - DNA, 888 bp, Proteus mirabilis
atgtcaattgaccttaatttattacgtattttttctgcggttgcagagcaagcacagtttgccagtgctgcacgatcgctttctatgccaacatctaatgtcagtagggcaataaaacagctagaacaacagcttaactgccgattaattgatagaaccacgcgaaaaatgcgtttaactgagcaagggaaagtcttgtatcaacaagccaaaaagaccttatatgaattagataatgttgtagaacatataacgagtgatggcccattaacaggaacctttagactcacgatacccagtgaatatggtagtgagttacttgccgatattttagcggattttgctgcacttcatcctaacttaaccattcaatgtgatacgcagctaatgccaagaaatgttatagaagatgatattgatttacttctaacatttcatcgtggccaattagccgatagtagctaccattcacgtctcataaagtcgtggcgtagtattgttgttgcctcagagagcttattagcaaaaacgggtatccctacagatattgaacaactaagccaattaccttgtatttccagtttaagtgcattagaagggcaaccgtggatctttattgataaagagcagaaccctgtaaaagtgacaattaatagctgttatcgtgtaaatagtgctatcttagccaaagctgccgtattaaaaggtttaggttttgctattttagctgaacattgttgccttgatgcgataaaggcaggcaaattgcgagccatttcttttcctcaacagcccgcatcaattagtttagtcgcgatatatgcaagtcgtcgttcgctttcacgtaatattgaacattttcttgcatttttaactcagcgtttataa

SEQ ID NO: 298858 - DNA, 1011 bp, Proteus mirabilis
atgaaaaataaatcattttatttcacgctattattattttttattgctatggatacttctgctgctcgatgtcggaatgtgtcaatcaaatataattttccagcccaaatagatattacaaataaaaaagtgggagataagctttattcttttggtgcgccagacgcccctataaacgttgctggtcaatgtctacgtgctaatagtggggcgggaaatacaaatggaaattatatctatattgttgatcaatatggatcatcaccaacattatgcccgactactggtacagttgataaaaattcaccagatggatacttgcgttttcgttcaacgggaagttgtgctaattcttcttggctgctagttcttgattataaaatatctggggttggctggaccaatttaacaggtcccggtggtggtactgattcaggcgttgtttatttacaaaaaaagccacctgtaggaaaaacggttattaatcctgtctatatgttgaaacgtaattattattctcgaattggtcaaatgggcaatacgttacaaaaggaaagcgttgctcttagtgcaccaacatcgatgacgttgataaataatgcttcttgtgcagtgtctgttaatgacgtcgcatttggtgaacaaaccgctagtgacgtaaaaatgaatactattgcaggaaaaaatataaatatttcttttacgtgtaatgctgtattacctgcatacacactcagtttttctggtaaagatggtgtgaataatgccacaacagggatcattaaggttaaagataatagttcagtggggtatcaactttcttgggcagatagcactgttaaacccattaatagtgctgtagttattaataatgtggcaatagctccgaatacaaagccaaaaaccaataattttactattccgataagggtaaaacctgttgcgttatccactcagccaatccctgggccggctaatactgcattaacgattaatataaagttaaattaa

SEQ ID NO: 298859 - DNA, 669 bp, Proteus mirabilis; identical to SEQ ID NO: 295338

SEQ ID NO: 298860 - DNA, 780 bp, Proteus mirabilis
atgaacacgcttcccatttattatgttaacgcttttacttcaacacctttttccggaaatccggctgcggttattttgttagataaatggctacccgatgacacactacttaaattagctaatgagattggtttacctgaaacggcttttttagttgccaatcatattcgctggtttacgcctaaagtagaagttcccctatgtggacatgcgactttagccacggcttttgtattaaaaacgattaacaaagcacctgcgacaagctttaaattccattctttgtctggagagctcacggtatcttgtcattcttcaagttttactctcgattttcctcaagtacctgcatcattaaatccaactataaaaccatcattagaaactgcactaaacatagatattgaagaagtttggcaatctcacgacagatatacctgctttgtggctgatcctaacaaggttattgattatcaacctgactttaatgctataacacaactaccacttcccggtgtaatattgaccgcgaaaggtcatgcgccttttgattttatttcacgcttttttgcaccacgtaaaggggttaatgaagatccggtaactggcacttcacattgtgtattagcaccaatttgggcaaaaaaattaaacaaagataaattaaatgccagacaagtttccgcgaggggaggcaatatacagtgtgaactcaaacaagagcgcttattgcttactggtgatgctgtactatttttaaccggtgaaataaccttttaa

SEQ ID NO: 298861 - DNA, 2163 bp, Proteus mirabilis
atgaaaagttataaaatagcggtcagctacgatatgtctgactatatttcaacccaccgtgaatgtgtcgatattctacatactgatttttctgatgttgccgtgattattatttcacttaatgacattcagaatggaaagcttaatttaattgaacaaaatagctttgaacagcctatttttgccgttattaataaagatgaagttatccctgctaatattattaatcgattaactggtgtaattgatttaaataaaaaaaatagtgagttatataataaacaactagaaactgcagcgttaaaatatgaagagagtctattacctccttttttcggcagcttaaaaaaatacgttgaacaaggaaattcagcttttgattgtcctgggcatcaaggaggtgaatttttccgccgtcatcctctaggtaaccaatttgtcgagtattttggtgaaaacttattccgctctgatttatgtaatgccgatgtttctatgggtgatctgctgatccacgaaggtgccccatgtgccgcacaacaacatgcagcaaaagtctttaatgccgataaaacttatttcgttcttaatggtacatcttcctccaataaagtcgttcttaatgccttattggcaccagatgacctagtattatttgatcgtaataatcataaatcaaaccatcacggagcattaattcaagcaggagcaacgcctgtttatcttgaagctgcacgtaacccatttgggtttatcggtgggattgatgctcactgttttgaagaaaaatatcttcgtgaactcatcaaagaagtcgcccctacacgtgcaaatgaaaagcgccctttccgcctagccgttatccaattaggtacctatgacggaacaatatataacgcacgtcaggtagtcgataaaatcggacatttatgtgactacattttatttgactccgcgtgggtgggctatgaacagtttatcccaatgatgaaagattgttctccacttctacttgaactgaatgaaaacgatccggggatcttagtcacacaatctgtacataaacaacaagcgggattctctcaaacctcacagatccacaaaaaagatcgccatattaaaggtcaaaaacgctatgtaaatcataaacgtctcaataacgcctttatgatgcatgcctcaactagtccattctacccattatttgcagctttggatgtgaatgcaaaaatgcatgaaggtgagtcaggtaaacgtttatggatgaattgcgtaaaaatagggattgaaacccgtaaattactcctgaaatcctgtaaacatattcgcccgtttattccagaaactatcgatggccgtgcatgggaagattttgatactgatgaaattgccaatgatctccgattctttaattttgttccgggagagcgctggcactcatttgagggatatgaagaaaatcaatactttgttgatccatgtaaattactactaaccaccccaggtattaatgccaaaacaggaaaatatgaatcatttggtgttcctgccaccattttggcgaactatctacgtgaaaataacattattcctgaaaaatgcgatcttaactccatattattcctgctaacgcctgcagaaagcatggcgaaaatgcagcatctggtcgcacaaattgctcgctttgaacaattactggaacaagatgccccactgaaagaggtacttccatcagtatatcatgccaaccaaacacgttatcaaggatacaccatccgtcaattgtgccaagaaatgcatgatatgtatgtgaaatttaatgtaaaacaactgcaaaaagagatgttccgtaaatcacatttcccacaagtcagtatgttacctcaagaagccaatatcgcttttgtgcgtggcgaggtggagttagttgccgtggaaaaaattgaaggccgtatcgccgccgaaggtgctctaccttatccaccaggagtactgtgtgtagtaccaggggaaatttggggtggctctgtacagcaatattttctagcgctagaagaaggaattaatctattcccgggattctcaccggaattacaaggtgtatatatccgcaatgatgaggacggtcgtctgcgggcatatggctatgtaattaagcactaa

SEQ ID NO: 298862 - DNA, 1566 bp, Proteus mirabilis
atgttagataataatttaaaagctcaactgaaagcttacctagaacgattaacccagccagttgagttagttgcaacattagacgacagcaaacattctgctgatatccaagccttattaaaagaaattgaaccgttatctgataaagtcacataccgtgaagataacagtgctaatgtgcgcaaaccatcttttcttattaccaacccagggaaaacaactggcgttcgttttgcaggctcgccattaggtcatgagtttacttctttagtattagcattattacaaaccggtggtcatccatctaaagaagccccagaattacttgaacaaattcgtcagttagacggtgagtttcatttcgaaacctattattcgctctcttgtcataactgccctgatgttgttcaggcattaaacttaatggcgattttaaatccgaacatcacccatacggcgatcgacggaggcatgttccaaaatgaaattcaggaacgtaatatcatgggcgttcctgcggtattcttaaatggcaacgagtttggccaaggtcgtatgactttagctgaaattgttagcaaagtagatagcaatgcagaaaaacgcactgcagagttattaaataaaaaagatgcctttgatgttttgattgtcggaagcggccctgcgggggcatcagcggcagtatatgctgcacgtaaaggcttaaatacaggtcttatcggtgaacgttttggtggacaagttctcgatactgttgatattgaaaactatatctctgtacctaaaacagaaggtgcaaaattagctggggctttaaaagctcatgttgatgattatcaagttgatgtcattgacagccaaactgtcagccgtttaattccgggagcagcggaaggtgatctacaccaaattgaaaccgcatctggtgcgattttaaaaacccgtagcttaattattgccacgggtgctcgctggagaaatatgaacgtaccgggtgaaaacgagtaccgtactcgcggtgtaacatactgcccacattgtgatggtcctctatttaaaggtaaaagagtggctgttattggtggtggtaactcgggtgttgaagctgccattgacttagcgggtttagtggagcacgtgaccgtactagaatttgcctcagaaatgagagccgatgctgttttacaaaataaactgcgtagcttaagtaatgtcgatgttatcttaaatgcccaaacaacagaagtatatggagatggcactaagttaacaggactgaaatataaagatcgcactaacgattcaatgcatgatattgccttagcgggtattttcgtccaaattggtttactgccaaacacacaatggttagacggaactgttgagcgtaataaaattggtgagatcgtggttgattcacgtggtgaaaccaatattaaaggggtatttgctgcgggtgactgtacaactgttccttataaacaaattattatcgccgcgggtgaaggtgcaaaagcctcattaagcgcatttgattacttaattcgcacaactgcaaaataa

SEQ ID NO: 298863 - DNA, 564 bp, Proteus mirabilis; identical to SEQ ID NO: 296689

SEQ ID NO: 298864 - DNA, 174 bp, Proteus mirabilis
atggtattaattctgttatcgcaaaaaaaagattttgtaactgccctctcaacattaactttctatgatcagtataacttttatctatatattttaattgttccacccaattgtttatggcgtttaagtgagccgttgaagggcgacaaatggggttttcatgcaaaaatgtaa

SEQ ID NO: 298865 - DNA, 453 bp, Proteus mirabilis
atgaaaaaattacaaacagaacgattattattacgtccatggcgaatatcagatgcagagagcctctattattatgcgagggataagcgagtaggccctatcgctggctggccagcacataaaagtgttgctgaaagtaccgaaattatccagactatatttatgcgtgatgaagtttatgctgtcacattgctcgatgatgataaagcgattggtttaattggcttatctttttgccatgagagcaatttccctataggggataatgatgccgaaatttcttattggattggtactcctttttgggggaaaggacttattcctgaagcagtgaaagcgcttatttgtcatagctttgagactctacaattagataatctatggtgtggttattttaagcgcgagactgattgttccttatctggatatcgccaacaatatcaacggcaataa

SEQ ID NO: 298866 - DNA, 1185 bp, Proteus mirabilis
atgttctcaaaaaaatctcgttctacaactgcactactcttttcatcacttattctgactataggaagaggtgcaacactgccttttatggcgatatacttatcacgacaatataaattgcctgttgatgatattggtatcgcaatgtctatttcactgactacggggatagtatttagccttgcctttggtatgctggcagataaatttgaaaaaaaacgttatatggttttttctattattacctttattatcgcattttctgctatcccaatggtcaatagtactattttagtggttatctttttctcaattattaactgttcctatttagtcttttctacggtattgaaagcttatttttctgaaactttatcaatatcagcaaagcctaaaatattttcactaaactatacttttattaatatcggatggacggttggcccacctattggcacattattattaatgtatggtactcaattacctttttggttagcggcaatatccgccagtattcctttatttatgatccaatgttttgtgcaacgttcagtggtagaccattccacagaagaaaatagtgtaaagtgggatccgaaaataatgctaaaagataaagcattaggctggtttgtgctttcaactttttttggcacattaacttttggtacatttgcttcgtgtatttcgcaataccttttagttgtttatgatgctaaattggctgaatctgctattgcggtgatcctccccgtcaatgcggccattgtcgtctcattacaatatatcgtcggtaaacaagtggttgctgaaagactacgtaaattaatgaccttaggcacactcttttttatcttaggattagcgggctttatgctggcgggtgataatttaattttctgggcaatggcgatagcaatatttacctttggtgaactgatttatgcacctggtgagtatatgatgatcgataatattgcgccgttaggaatgaaagcaagttatttctctgcacaatctttaggttggttaggtgctgcattaaatccacttgctagtggttatatcctgacaaccttgccccctatttcgttattcgctattttaatggggatcgcagtactagcttggctttgtatgctgcaaggtatgaactacagtgaaaaaagaatagctgcttaa

SEQ ID NO: 298867 - DNA, 861 bp, Proteus mirabilis
atgcctacattaacgaagatagcgtggataaaaccagggatggcgacaaatcaacgtaaaatagcggattatattttagaacaccctgaaaaaatcgtgactttatcatcacagcaattagccgaaattatgggagtcagccaatcagcaatagtgaaatttagtcaaaagataggatttaaaggatttccttctttaaagctggctatcagtgaagatttagggagaaaaaatgctaattcagaaaaaaattccagcatattacataaccaaatagattcagaggatagcctggttgttattgcgcagaaattagcacaagaaaaaaataattcaattcgggataccacacgtcaaattaattatcaccagtttgaacaagtgatccaacagattgatgacgcctctcgggtacaaattataggtattggtggatcaggtttagttgccagagatttaagttataaattacagaaaataggtattacgactttaattgaaactgatcaccatgtacaaatttctgttgctcagatgttaagccctcgggatttacaaattgtgatctcttacagtggcaaaagaaaagatatgctggtcgctgcatctgtggctaaaaaacaaggtgctaaaattatagcgatcacaggagaaaaacattcaccactaggtctgatggccgattatatattagaaactattgctgatgaaggtgagtggcgtagtgctgctatttcttctcgcactgcacaaaacaccattaccgatcttatctttatggcattattaaagaagcgtgatgaaaatgcgaaggctttagtattaagctctcaagcactaattaatagtctggatgattaa

SEQ ID NO: 298868 - DNA, 1026 bp, Proteus mirabilis
atgagtaatccatttacgatatctaacgttcctgaacaactagagacctcccctttaatagatgaaagccatcactatgatgaccctttaccgccaaaagatctcgtatttttacaaagtatcaacaaccaagaatgtaagattaaatcatcacaagtcaatggtcgattcactaatactgtcccgatgtttttggtattactagtaatgatgttttataccctatttaattttattgaaggacatattgttacaaaatatactttagaagataatattaaagaaattgaaaattatagtacctattatacagggaacgatcgcgttgtacttagagatataaataaatataaacctttctttggaaaggaaaagataagttggtgggaatatatcaaagcatataattcaggtaaattttttgtaggtagtgaagatgacaaatattttgtcctcgcatggttagttttatttcccagtggattatatatcttaagctcccttgctttctttgtgccaatgacctatttggtggctgatagaaaacgacagatcttatattcttatgtagatggcattgtgatggcaacccgttatgaagatgctcaattcggttatgccggtaaaatgttagcatttaaattattctatatacatcctgaaactggtgagctaggaatacatatatatcgtcccaatgtctctcattacacaggttttttattaagtagtgatactgaagatcaccgctttattacttttcttaatgcctatatgcaacaagggcgtgatgcagtctgcacaagtgactattatgcacgagcaccactattctgctttgcgaaaaaccctcttcctgctgattttgagcaacaggtcgaacagattctggcaaagcttgatcaggagaaaaaaccatgcgtaaaattgataaggaaggtacggaatgacccgtttacgcacagtatcaaaacacccggagcaattagaaaccacaccattaattgcggaaagtcatcactatga

SEQ ID NO: 298869 - DNA, 1638 bp, Proteus mirabilis; identical to SEQ ID NO: 297794

SEQ ID NO: 298870 - DNA, 378 bp, Proteus mirabilis
atgatctatgctgatttacatgttcacacaaaccatagtgatggtgtttgtgaaataaaagatgtccttgaaaatgcatttagaaacggcattaagactattgcgatcaccgatcacgatactaccaatcattacgacgaaatttaccgagaaggggagcgtcttggattaaatatcgtcaaaggtgttgaaatgagttgttatgactttgacgtttataaaaaagtccatgtagtgggactttggcttaacgaaaaaacgcccaacgttgacaagctgtgtgataacactcttaactgtcgtgatcagtttcaccgagaattaatattatcctcgccaccaacaatagcgagaatttgttttgcaaattctttataa

SEQ ID NO: 298871 - DNA, 1899 bp, Proteus mirabilis
atgatttataagtttctattagcaataaaaaacaaaccagaacttatcgtactatcagtgatgatactggttataatgatgttaattatacctttgccaacttatttggtcgactttcttataggtttaaatattactattgcaattcttatctttatgagttcattttatattaaacgtatactgaactttatgacatttcctgcattattgcttataacaactcttttccggcttgctttatcaataagcactagccgtcttatattattagatgccgatgcaggagagatcattacctcatttggtgagtttgtcattggtgaaaatcttgttgtaggttttgttgtcttttccattgtgaccatagtgcaatttctcgtgattactaaaggatctgaacgagtagcggaggtcgcggctcgtttttctttggatggtatgcctggaaaacaaatgagtattgatgctgatttaaaatcagggatcattacgaatgaagaagttcagatcagaaggaaagagttaggacaagagagtcaattatatggttcattcgatggtgccatgaaatttataaaaggggatgcgatagccggcattgtcattatcttcgtgaacttaattggtggcatatcggtaggtatggctcaaatggggttatctattacagaggcattacatacatatacacttttaacgataggggatggattagttgcacaaattcctgctttacttatctctattagtgccggatttattgtaacacgtgtcggtggtgaaaataataatttgggctatagcattatgaatgagctattggcacaagattttgctttgcttgttacagctattttggcttttggtatcggttttttaccaggatttcccacacctgtttttcttattttatctgtaatgcttggcgtttacttttttaaaataaaatggaagagtagtaaaaaagaatataaaacagaagatgaaaaagataatcataatgctactaatgccgacagtaaaaaaggacttatgtcaaatttattttctggtaaacatggggaagaagtagataatagtttattaacagaaaatattaccttatcacaagctgaaactttgccattaatcatcactctttctactaagaaaaaaccatatttaacaaaaatagtttttgaaaaatggttacaaaaagaatttattttacaatatggtatattattaccagatattgtgattcactattcagataaaatagatgacgataaaattattattttaattaacgaagttaaagcaaaagaacttaattgtccttttcctctttttcatatagaaaatcctaatgatgaattgctctctttaggctttaacttaataagtattgaagatgataataaaacccattattggattgagcgtgatgatgaatctaaattagcgccattaggttacaaagcggaacgttcagaaagttacttttatagaaaattctctgatctgatcacattaaatattacagagtttcttggtattcaagaaacaaaagatatccttgataaattagaaaaaagtgcccctgagcttttaaaagagtgttataggcaagtttctattcagaggataaatgatgttttgcaacgattagtacaagaaaaaattcctattagaaacataaagactattatagggggcttagttcaatgggggagcaaagaaaaagatcccgtgctacttactgaacacattagaacgcttcttgctcgttatattagttattttttttcaaccgatgggaagtttaatgcaattatcttatctaacgatatggaagagataattcgtagtggaataagacaaagttcttctggcacattattgagtttctattag

SEQ ID NO: 298872 - DNA, 261 bp, Proteus mirabilis
atgacagcaccaccaggaggcaagccaagctttccagaaggaatgcttatcttggttgatcctgaggaagaagttgagttcggagatttttgcgtcgcgcgtttactgaatgatgaattcacattcaaacgattgattagagaaggtggagttgagtatctagagccattaaacccacgctatgacctgatccctattaacgggaactgtacaatcataggtaaggtaatcaagtcacaatggcctgacgatacgttttag

SEQ ID NO: 298873 - DNA, 579 bp, Proteus mirabilis
atgaaaaacaatatttttgatccagaaaagtacactatttcaattaaaaaaattctggatgacggagaagaaatctatgtagcaagcgttgctgagctaccagatattcaagaatatgcagactctgcggattttgctagagatatggctcttgactccataactactgcatatgaaatgtttaaagaaaatggaatggcattcccattaccaatcgacacaactgaaactgataacgtaagtggtagagtgacgcttaggttaccaaaatcactacatgcaaagtgcattaaagcagcagagagtgatggcgttagtttaaatacctatctaacaacatgcgtagttcattattctgctcaaaatgaaatgatgaataatataaatacgcagttcactgaagtgaagcattggattaaagcacaatctaaaccaaactttcatacatatagaaatgctaataaaactggtagctactggtcttcttcgtggaactctaagcttgtcagtgatggtgatttatctgaaagagatagtgagattgaattatccactaagtattcggagtgttttcaatga

SEQ ID NO: 298874 - DNA, 462 bp, Proteus mirabilis
atgagttttatttcatcaattatccttagatctgtaactgttacatctaataaaatggacttcacaagacctgatattgatgtcacaaaagtagcagttaaatttaagttacgcaatgagttagaagaagataaagactccaagagctgtaagctaactttttcatctgatgtcattggtaaattaactgatggcgagggtgatgatcctgattttgatttggttgataacgagtttagtttttcacttacagtggagtatgagtttgagattaaagattatgaaaaattctcttcggttgatgaggatgaaagaactgaggcttgtgcaaatatagtttatttagacttccgaagaagaatgactgttggtgcaaataacataggtataagtagttttagattacccttatctataatgtcattaaataaatcaaaagaaaaagaaaaagaaactgaataa

SEQ ID NO: 298875 - DNA, 924 bp, Proteus mirabilis
atgcgtatttgttctttgttgctctgcaccactttcttagtatcatcaataacatcaagctacgcagaaataagcacacataaactgattcgccaagataatagcgaactgatttattatctagataaacaagctgaacataacaaaacactgttagttttaatgcaaggttctgactgtaatagcataaaaaataatacttttattcaagaaacctttggtagatggctaccgagtagtgatgttttaatggttgaaaagtatggtattacagcacaattgacttattccgatgataatggtgaaagagaagattgccctaaaaactataaactgcatgataatcctagccaaaggcttgctgattatttagcagtgctagataaattatcccctaattacaccaatattgtattacttggaggaagtgaaggcgcaacaatggttcatttagttgttgctgaacgtcatgatattagcgctgcaatcgcattaaatggcggtggtcgttttttccttgatgatgtactgtacaatatacgcaatacaacacctaaagagcatgtggaagaagcaataaatagctttcaacaactcgctaatgcaataataacgaatcaaattggtgatgagcaatttgttagtgaacatagcaaattatggtggcaacaatatcttgctattgatctacttgaggtgattaagcgcaacacgcaaactccggtattaattgttcaaacattagatgatatcaatgtagatgtggctgcattccatcaattatctcaagagataacgcaacctaatgtgacatttattaaatatgataaattaaatcatggtttttataatcaacaaggtgagcgattaaccggaaaagtcgttcaagatatacagcaatggtatgcgcaatataataaataa

SEQ ID NO: 298876 - DNA, 750 bp, Proteus mirabilis
gtgtttaagcaagcaacgggcttaacattagcctcttatattcgtggtagacgactgaccaaagccgccactgaattgcgcttaactaaacttccggtattaactatcgcactacgctatcaatttgattcgcagcaatcttttacacgccgctttaaagctgtttttggcgttactccttcggaataccgtaaagttgatgtgttgtgtagcgacaattttcagccccccatcaattttgaagttaccgacctccctattccaaatattatcgagctacctgaaagctttctttatgttattcaataccaatacttttgctctatcgaggatattggcaagctacatgaagatattcgtcatcagttttggaatgattttttgttgtacacagataaaaactttacggaaagtagtgtgttaatttcttatcagccaaatacattacgtaaagataagatccagattgattatgaaattggcctaaacaatttagatcactttaccagaccccgtggttttagaaaaaaagcgattgcaggcgggcgttatgttcgtttccaatttaaaggcacgttagaagaatataaacaatttgccatcaagatctacttttatactttaccggctttggggttatgtcgtcgtttagggccagatattgaaaactacatttgtatagaaacagatagcgacattatggaactaccaaaaacactggaaattgattattacgttccaattcattaa

SEQ ID NO: 298877 - DNA, 1164 bp, Proteus mirabilis
ttgattaaatcagctatactggttctagaagatgggaccgaattccacggcaggtcgataggcgcagaaggcgctgctatcggtgaagtcgtttttaatacttccatgaccggttaccaagaaatattaaccgacccttcttactcccaacaaattgttactctcacctatcctcatattggcaataccggcgttaattcctcagatgaagaatcagcaactatccatgctcaagggttaattattcgcgatttacccctagtgatgagtaattatcgtgccgaagagagcttagccgattaccttaaacgtcatcagattgtggcgatagctgatattgatacacgtaaattgacgcgattattgagagaaaaaggcgcacaaaacggttgtattatcgcaggcactcatcttgatgctaaacaagcgcttgaaaaagcaaaagcgtttccaggattaaaaggaatggatttggcgaaaacggtgacagtgaaacaaccttatcaatggacacaaggcagttggacattaaaaggggagttgcccgccactcaatcaccacaagatctccctttacatgtggtggcctatgattttggtgtgaaacgtaatattttacgtatgctggtggatagaggctgtcgagtaacagtggttccagcacaaacctcagcccaagaagtgttagcgctctcacctgatggcatttttctctctaatggtccgggggatccagagccctgtgattatgcaattgacgccatccaaactttcttaactaccgatattccagtatttggtatctgcttagggcaccaattattagccttggcgagtggtgcaaaaaccgtaaaaatgaaatttggtcatcatggtggcaaccatcccgttaaagatttagataataacagtgtgatgatcaccgcccaaaaccacggctttgctgttgatgaagcatcgttacctgattgtttaagagtgacacataaatcactatttgatggttctctacaaggtattcatcgcacagataaagctgcatttagtttccaaggtcacccagaagcgagtccagggccgcatgatgcggcgccgctttttgatcactttattgaacttattgagcaatatcgtcaaaacctgcaatcagtgacaaacaaataa

SEQ ID NO: 298878 - DNA, 1152 bp, Proteus mirabilis; identical to SEQ ID NO: 298334

SEQ ID NO: 298879 - DNA, 429 bp, Proteus mirabilis
  misc_feature (412)..(421): n is a, c, g, or t
atgctattattgtatagcattattgctatttattattattttttagtgaataaaatcattatcatcactatcaaaaaagctattggtgatctgttcgaatttaatcgattaggtatttggcgaggtagtttttctcgattgtttattttattggctatttttatgactataacaatttctataacgatattattaattcatcagctattatcttggttgattaattttaaacaaatcaatatttctttatctgataataatagctattcattaatgatcccttggctatggcaatatgatgctatgtttaaaatccctctattattatttttttgcgcaacaatcgcttcgtgtaactctatttttaaagttagccactatttaaagaaatatcaaaaaaataatattactnnnnnnnnnnctatttag

SEQ ID NO: 298880 - DNA, 792 bp, Proteus mirabilis
atggaaaatattattatattcatctcaatatttattttgatagtattactttctagttcattatcttggttttatatcaaatacacattagggttactttatataacccttagccatttttatcgaaatttatgttttatcgttttactctgtgtcgccatctcgattttggcgggtttttatcatcacctcacgctactgctcaaagagcaagtagcatattccaatttagggcatatcgaaatttataaaacagataataaacaggatattactaataagaaagattatttggaaataaccaatgctgaagaaatcatccatttattaacttatgataagcagttattagaaaaaattcaggtgatttcaccacaaattattttttcaggcatgatagaaaatgttatcaataaaaaaacagtattgttttctggcctagccatcgagcctaagtcattattaaccataggagcatacgatctaactgtttcagggagtgaattgtctcatgtcagaagaactgagatcacgatagataagtttattgctgatgctataaatataaactatggggatttagttaatgttgtatttattcataataatgaaaaaatggtattaccaacttatgtacgtggtatttttaacacacaaataaatagttatccttatgccatgatcaaagttccattagaaacactacaatatataaaaaaaagtaaaagtgtctcaaaaataaatattctattaaaaaatgtgcatgatattgatagcgtaatagctaattaa

SEQ ID NO: 298881 - DNA, 1596 bp, Proteus mirabilis
atgtattatttccataataatcaacaagggtatcatctccatcaccaacaaaaagttatcgaagaaatattacaacacacctcagatatcgtacctatattttttaaaaaaatatcaccatataccaatgctgatttaaaatttggctattataatcaatttgttaatatatctggtacaaaattcatttcaggttatcgaaaaggcagtgctagtcatcctaacgaggaaggtacacctataaaagagataaaaccagatgaagaacatgatgatccgggtactatatttattgatttttcttcacgcgaatattataaaacaattaagcaagataatattgatgaatatatagaaaatgaggcagatatctatgatatatattatattaataatgataaaactattacaatagcaaggggtaataatgagttacgcaaagaataccaacaaaataaacataaaatcggctcatttgtatatcatacttttatacatgaattaggtcattctctagggctattccatatttgggaatacatactaaatgaaaagcataaagtattagattcaattaaatactcagttatgagctataagtgtcctgatattaaagatgcagattttggtggcctttatcctatgacctttatgctagtagatatattattgttacaatatctctatggcgaaaatatgaccacacgtcttgaaaataatacctatggttttcattccaatacgggacgcgctgcttactctttaaatagcatagaagataaactagtgagctgtatttgggattcaggaggaattgatacattagacttttccctatataccgttaatcaagtcattaatctcaatgaaggctgtttttcagatattggaggattacggagtaatatctctattgcctataaaacgattattgaaaatgcgattggtggtaaaggtgatgatactctcataggaaatccttttgataataacctaatcggtggtgatggcaatgatttattctatggcggtgatggcaatgatttattctatggtggctctggaaacgatgttatatacggagaattgggaaatgatgtgctctatggtgatgatggagatgatatgcttattgattattatggtgctaatatgttggatggtggtaagggtaatgatcggatctgtgtagcatcaacagatagagggcttccaggtagaaatatcattctagggggagaaggtgatgatgaaatatatttgggcacgggaactcatcgtataacaggtggacaaggaaatgatacctttaattttttctgctatgagagcgttgaaagcaatagctcaatttgggattttgaaaaaaacaaggataaaataacattgattactagagattatagaaaaatagatataacaaaaatgaaaaaagttgataagttatcaggaagtaaaaatgaattttcattaaatcataacaaaccagccaacaaaaccatcatagacgtttcaacatcttctaacgatgataagtccattgtacatatagagattgtcggtatatttaaccatgatgaactctttgcagtataa

SEQ ID NO: 298882 - DNA, 1665 bp, Proteus mirabilis
gtgtcagggtctgctattgtctctggcacaggtaccaaatggacagttaataatcccgctattcgagcaggaacattaattttaattaaaaacggcaatatgaattacccctatatggtcgatagagttaatagcgatacagaattagtcatttcacaaccggctacatttaccgtaaaaaacaccagttacagtattaatctcactgagccgaactcatacagcgacgctaataatcgtatgaccgctattgcatcagatacgacgtattttctgcgagcaatggatcaatggatgatgaataacggtgtggtgacagtagagctatctaacgggcaaaaggtaacgttagatagcatcaagaagatgcagggggaaattagtaaaaaagcggatgataataagaccattcatattggtgattttggattaggtcgttcaaacacaacgggagataaacacactcaaaatgcaaatgatataaatttcacaggcgtagccactccaccgggtagcaatggaaccaactattggaataattattatccattattcagcatggttcgtggcgggggaaatataggtaataatgttcaactacagattacacctgaaggagttgcatatagacgaacctcgactaacgagtgggttgattggataaagttattgagtgttggcgattatggtattggtttaaacgccaaaacaggcacatctcaagccgaaagtaccaatgcaaataacttagatactaatggattttgggcatcaggcgggtctaatagctctaatttttacaacccattcggaccattaatatctttcgctagaggaggaggagccgatggaactgggcaagtggttcaaatccaagcttccagtaagaatctagcatatagaatgcgaaatgttaataattggacttactggtctgagctaatgaatgtgaatagtgatggggttaaatcatcaaaaaatgattttaaaaataatgggttctatacatcaacaaatattgatagtgagaatcctaacacagtttacatgggaataatatcagcacacgcaacacagcctgatggctatcaaacaggtatatttggtagaggtaaaaaactactttatacatacaaagaaaacagtaaatggattggtacttatgaaattcttcatacaggcaatgccaaaccagattctaacggattctacaaacgcgcctctccaattatagacatcaatcccgacggcacattcaccactaacgatgaatcagaaggtgctacggttactcgaatagctcagggtgaatatcttatcgaaggtgtactcggttttaactcagatgcaggttggggcggtgtcgatggtggtattgaaattccactagatgttaataaacagccgttgatatgggtagactctgacgttatggaggacggttctatcctcgtgagaacgtatcatcgaactcaccctaacgcacctaaattcgcctgtaatgatattgatggttacaaagacggtgacccaattgatatccctgatggtcgttttatctctgttcgtgtacagatgccagagcaatccatctataacgtgagaatgcgtgagatggaaaaaatatcaaaaatggaaactgaatgtaaggcaggagaagattaa

SEQ ID NO: 298883 - DNA, 597 bp, Proteus mirabilis; identical to SEQ ID NO: 296287

SEQ ID NO: 298884 - DNA, 1125 bp, Proteus mirabilis
atggtgggaaccctgtataaaaaagatgatacacgccgcgatggtggtttctccttgttttatatggggatcaatatgggctcgtttatcgcaccgctgatcaccggcttcttagttcgtgattatggctggcattggggctttggtattggtggtattggtatgctagttgcactactgatcttccgcttttatgccgtaccgacaatgcgtcgctttgataaagaagttggcttagattcaagttgggatcgccctactgttgtgcgtcgtaatgtcggacaatgggtattagcacttgctgtgatattaattgccattgttggtttaattatttcaggcactattccatttaatccggttattgttgccaattttatggtttatgtgatctccggctgtgttatcgcctactttatctatttattcctatttgcaggattaagtagtagtgaccgttctcgcctgtttgtttgcttcctattattagtttcagcggcactgttttggtctgcattcgaacaaaaaccaacctcatttaacttatttgctaacgactatactgatctaaattttatgggctttgagatcccagcggtttggttccagtcagtcaatgcgctatttattattattcttgcccctgtatttagctggttatggccaatgctagcacgcaacaatatgaatttaagtagcatgagcaaatttgtgattggtattttattcgctgcaggtggctttaccgtcatgatgtacgcctctgaaagcgtgcttgcaacaggcagtggtgtttcaccattatggttaatttccagtattttattgctgaccttaggtgaattatgtttaagccctataggacttgcgacgatgaccattttagcgccagcaagaatgcgtggacaggttatgggcttatggttctgtgcgagtgcattaggtaacttagccgcaggtttaatgggtggaaatattcgtcctgataaacttgatgttatgcctgatttcttctctcacgtctctatagcattggttatttgtgccgttgttcttgcagcattaattattcctgtgcgtaaactgttacaaagtgcagatgataaagagaatgcgcaagcataa

SEQ ID NO: 298885 - DNA, 261 bp, Proteus mirabilis
gtgcttaaagtttccgcagatagcgtgaattcaaatcgatttggccttgccttatatcaaggagagagtgttgatgagaataatcctttgcgtttgaatggttcagcccctcgaggttatgccattacaaaaggtttttctaatacagggcaagacaggagccaatttactattactgctgttccttttaaaacaggtactgctgatttatctcctggaaattttacggcctccgcatcattaagcattgtttataactaa

SEQ ID NO: 298886 - DNA, 567 bp, Proteus mirabilis
atgaaaataaaaaatcatatcagattactatctgcattattagttatctcttctagcatgaatgtattagcagataatagcaaaacaacagaaaagaaaaataacaatattattaattttagtggaacagtaatatcaacatcctgcaatatagatagccctagttctcctatcactttgcctacaattaataaatcggaaatagtcttagataaagattgggccaatgccaaaagcagtacaggtagtaattttgaaattaaactattagattgtggcaataataatgcaacattaacatttaacggcactgatttagccggtgaaaataaaattatgaagaataaaagcatcacaaataatagcgctaaaggagtaggaattttcattcgtagtgatgaaggtaataaaaatattattcatttaaatggtaaccaagcaataactaagagaattgaaaataaaacagcaacttataaattccatgccaattacgcgagttatcttccaaatccaacatcaggaactgtcaatacatcagtaaattttaccgttaaatattcttaa

SEQ ID NO: 298887 - DNA, 597 bp, Proteus mirabilis
ttggatccagaattatctattcctaatattgtctatttagatgcagaagcgcgtaaatgggtaaatccaacagcaacgagaaaatcattatacccagacgatcttaaccaagcatggctcgcgacttatacggtgactaatgattggaatgggcaaatagaaacttcactgtttaatttaaaagcgacactgcctaatgaataccctaacatgataaagagtttaaattactttttttcagataaaagaattgatagtgaaattcttccaggtacacgtcaacagattattttatcaaatggaaggcaacatacgtttgatgagttaagttctggcgaacatcaaatacttattatgttatttacaatccaacgttggctaaaaccaggaggaattgtattaatagatgaacctgatctacatctacatccttctgttatcgcacctctcttagcggctatcgaaaatattgtgactaataagaaagggcagttaattttaacgtcacactcaacagaagtttggcaacgctatgaaaaatttggttcacgtattgatcttactttgctaaaaggatcggtgaatgtcgaaaattga

SEQ ID NO: 298888 - DNA, 1221 bp, Proteus mirabilis
atgatgagctatggatacgatccattgttatcggaaggctctgtcaaacctcctgtatttttaacatcgacatttatttttaaaagtgcagaagaagggaaaaatttttttgatacggtaagtggaagaaaaccccttccagaaggagaaaaagcaggtttagtctattctcgttttaaccaacctaatagtgagatcgttgaggatagattagcagtttatgaaaacacagcatcatgtgtcctcttttcatcaggaatgtcagctattacaacgacattaatggcttttacacaacctggcgatgttattttacattctcaaccactttatggtggaacagaaacattaatagccaaaacattcgctaagttcggtattcaagcaacaccatttacagatggtttaaatttagcacatatccaatcgcaagctgaaatggctagccaaaaagggagagttgcggtgatatttgccgaaactcccgccaatccaactaattcactggttgatattcaagcgttaaaaatcgttgcggataaattagaaacaagccaaggctatcgacctattattatttgcgataacaccttattaggacctgtttatcaacatcctatagagcaaggcgctgatatttcactctattcattaacaaaatatgtgggtggacattctgatttagtcgccggtgctgcaatgggatcacgcgagcttattaatcaagttcgcctattaagaggtgcaatagggacacaacttgatgcgcattcttgctggatgttaggccgctctttagaaacattgcaaattcgcatggaaaaagccaatcaaaatgcgctattagttgcacaatttctacgtgaccatgaaaaagttaaagtgatccactatttaccttttgtagatgaaaatagtattgaaggtcaagtatttgctagacaatgcacaggcgcaggatcaacattctcctttgatattgttggtggtgaagcagaagcttttcgttttctcaatgcgatgaaaatatttaaattagcggtgagtttgggaggaaccgagtcattggcatgtcatcctggctctaccacacattcaggtgttcctatggaattacgtcacaatataggtattcaagaaacaaccattcgtttatctattggtattgaaaatccttatgatcttattgctgacttatctcaagcattagatcatgtttaa

SEQ ID NO: 298889 - DNA, 930 bp, Proteus mirabilis
atgaaatatcaagatgtaacaaaaaccccctgtgagaacgcttattttctagtctttaatcttattaactcatcggaaacccgccctactcttatcgacttttgtaataatctatcaggtcttcttcgtagtatgagaacccgtttccctgaattagacgtaagttgtgtgatgggatttggtgctgatgcatggtctaaactattccctaatcaagctaaaccgcgagaattaaatacctttaagcaaatcaacggcgatgtgtataccgcagtatcgacacctggcgatctgttttttcacatacgggcactaaaggtatccgcttgttatgaattagctgcaattattagccaaaaattaaactctattgccacctcagaagatgaagtacatggtttccgctattttgatggtcgctcaattattggctttgtggatggaacagaaaatcctgagtttgaagatgagcgtgtcgcttatgcggttattggtgatgaagatccactgtttaccggtggaagttatgcatttgtacaaaaatacattcatgatatggcggcttgggaaaaccaatctctcatcgagcaagaaaaagtgatcggtaggcataaattcaatgatgttgaactaactgatgaagaaaaagatccaggctcacacaatgtcgtcaccaatattcaagatgaaaacggtgatgatttaaaaatcgtacgagcaaatatgccgttttcaaatccctccaaaaatgaatatggtacctattttattggttatgctcgctatttctcaacaacaaaccgtatgttagaaaatatgtttgcaggaacacctgaaggacataccgataaactactaaaattcagtactcccgtcacgggcacattattttttgtcccatctccggcgtttttagatgatatagaataa

SEQ ID NO: 298890 - DNA, 423 bp, Proteus mirabilis
atgtcccgcttgcctttgcgttcaatcttgcccgattttttaacttccgttgctcgtgtacttctaggtacactgcgcgacggcttgaaaaaatcgaccaaccttgttagcaaattcggcgctattttcggtgatgttcttgcatcactcagtgcgaggcacttgagtgatggggctcctactgcttgtacgtacacggtttcaggttctttttcactcccctcgccggggttcttttcgcctttccctcacggtactggttcactatcggtcaatcaggagtatttagccttggaggatggtccccccatattcagacaggataacacgtgtcccgccctactcgtcgagttcacaataacagcatcttcagatacggggctatcaccctttactgccggactttccagaccgttctcctga

SEQ ID NO: 298891 - DNA, 423 bp, Proteus mirabilis; identical to SEQ ID NO: 298890

SEQ ID NO: 298892 - DNA, 759 bp, Proteus mirabilis
atgcaatttaacccagaatggtttttatcaaaggaatgcgtacagacttttgtgcattatgctcaagggcaaataaaaaaagcgcaagggttaaataagaagatcatggatcctatagataaagagttaaaaacaatccttgatttctgttatatcattgaagatggaaaaagcctattactcaataattggcttaaaaaacgttgttgggagcagcaaaatattgggttggttaaaatcaatcatgcacaaaatctttatgcagttttttatgatccaaatagtgattatcaaggcgtaataaaaaaagataatgccaccgatgttttactaagcagtgtctctgaaacagctatattacaagcctatcttagttttaataaagacggctacagtacctattgcaagcagtatcatgcttattggcaatgggttgaggagcgtaatgaagcccgctatcagcaaaatattgaacatggacgaagttacgatagtaaaaatatgatgcacacttttaggttgctttatattgcattaggaattgctactgaaaaaaaagtcaaagtttggtgtgataacagggatgaattgttagaaattaaatctggggctttaagttatgaaacattatttgagcgaagcaaaatattaatagaaaaaattgagcaagcttttcaacaaagtcaattaccagaaaaaatcaatcctcaattaattaaacaagtattagtgaatattcgtaaagaattatatcaataa

SEQ ID NO: 298893 - DNA, 654 bp, Proteus mirabilis
atgctaaacacatatgttctatctgatgaagaaaagaatgttgcgagaaaaataatagcgaaaattgtagataacaaattatcaaaatacaacaatcagcctttagatattcctcatcttggccacacagagaaacctaaagtattagttatcgatcaaagctacggtgatatgtctttgcaattagggatggtcactgatgatatttttcataccatgattatagatgctatacaggaaaatccaaatcacgaaattatctttaaaactcatcccgatactatagcaaagaatacgagttcaaaatttctaaataatctaaaagataaaataactatactaacggaatatactaatccaatatcactattgagccaggttgataaagtttatgttgcaagtagtcaaatgggatttgaagctttaatgtgtggtaaagatgtccatgtttatggactaccattctatgctggctggggtttaactacggataaacaatctacacacagaagaaaacgagtgctaacagtagaagaattattttacattgtatacgttaagtatagctattatgttaatcccaaaacacacgatttatgtactattgatgaagctattgattatttgctcgagttaagaaaacaaaaaatataa

SEQ ID NO: 298894 - DNA, 954 bp, Proteus mirabilis
atgcataatgtactagaacaaattgagttagtcgctcaaagtgacagtactgtacttatcttaggcgaaacaggtactggtaaagagttaattgcacgagcgatccatcgtttaagtcatcgtaaaaataagacgatgataaaaatgaattgtgcagcagtaccttccggtctgttagaaagtgatctttttggacatgataaaggcgcttttacgggtgcaacacatgcccatgtgggtcgatttgaaatggcagataaaagtacgctttttctcgatgaaattggcgatatgcccattgaattacagccaaaactattacgggttctccaagagcgtgaaatcgaaagattaggtggtaataaagttattcctgtggatgtacgcttaattgcagcgaccaataaagatttatgtgaactgacggatgaaggggaatttcgagaagatctctattatcgtctgaatgtttttcctattattatcccgccattacgggagcgacctgaagatatccccttattggcaaaatattttacgcaaaaaattgcccgccgcatggatagaaaaatagactgtattccaacacatgctttggagcaattaacccattatccttggccgggaaatgtacgagagcttgaaaatattattgagcgcgcggttattttaactcgaggctctacgctaaatttgcaactaaaagagttaaatatcaataaaccatctcgtttaaaacaagtgctttcgcaaccatcagccatagaaaaaaagatgcaaactagcgcacctgaaagtgatgatgaagagcgtgagcggataatacaagcccttagagaaactaacggtgtagtggctggtgccagaggtgcggcattaaaattaggattaaaaagaaccaccttattatcacgtatgcaacgcttaggtatttccattcctgaaattctttag

SEQ ID NO: 298895 - DNA, 201 bp, Proteus mirabilis
atggctaatgtagtcattttgcgtggtgctttcataaccactaaacgcataacggctgataataatcccgctcgttcagctattccgacaccgagtaaagccaccagtacggttcctaaaggagcaaaccctgtaaaattggtaacaatattagcaagaatacgtcgtataccatcagcatcaagtaaactgattatatga

SEQ ID NO: 298896 - DNA, 363 bp, Proteus mirabilis
atgccagaaagtttatttaataaagtaaactctagttctgtttggaatgattttaatattaagttaatagattgttctccgggggtaaatcaagtaaagctgactttttctggaacgcctgataatgcagatgtgaataatttatataaaaatgaggggacggcaaaaaatattgccgttcaattacaaaataaaaacagtaatggcgaaattccattaggtaatggaaaaaatttatatatcgcggttaatggtaaaccatcggttactgttccactaagaacacgagcatttagtaaattaggtaatgcaacaccggggacggtgtccgccaaaataacagcaacgcttatttatcaataa

SEQ ID NO: 298897 - DNA, 855 bp, Proteus mirabilis
ttgcatgaagttggtcatgcactcgggctaagccatagttggcaatacttagaatataaagataaaaatcatgtattagcttcattgaaatattctgttatgggttatgatataccaacctcagagcatgctgattttggtggtctttatcccatgacctttatgctattagatatattattattgcaacaactctatggcgaaaatatgactacacgccttgaaaataatatctatggatttcattctaatacgggacgcgccgcttactccttaaaaaacatagaagataaattagtaagttgtatttgggattcagggggaattgatacattagacttttccctatataccgttaatcaagttattaacctaaatgaaggtagcttttcagatattggcgggttacgtagtaatatctctattgcctacaaaacgattattgaaaatgctattggtggatcaggtcatgatactatcataggaaatagtgctaataatgaacttataggcggtgatggtaatgatactatcaagggtggtttgggtaatgatcacctctatggtggtatgggcaatgatattctctatggtgatataggcaatgattatctctatggaggtataggtgatgatattctccatggtggtatgggtaatgatattctccatggtagtatgggtaatgattacctctatggaaataaaggtaatgataaactctttggtggtgatggagatgatacccttgttgattattatggaaataatacattcattggcggtaaaggcaatgatctattattttcgatatcaaaagcaggacgaaataacttaaaaacctcactgatgtga

SEQ ID NO: 298898 - DNA, 513 bp, Proteus mirabilis
ttggcacctgacttaggtaatacttttgctattgtaaatacgaatggcattgccggaattaaaactaatcgttcttcacaagccattacagacaataacggtaatttaatattaccgcacatcatgccatatcgtaaaaatactattggactaaacataaattcgttacctgagtttagtaatactaaaactcaaagtaaaatcatcgtacctactttaggagcggtagcaaaaatcaatttccctataaataggggctataatgttttatttacctcaaatacaccaattccttttgctgccaatgtaatggcatttgatgataataataatctcatttctagtgattctgtctatgaccacaatagaatattcctctccggaataaaagaaagcggaacggtacaagtaaaatggggagatacagaggagcaacaatgtttcttccattataacgtaaaaaatgaaagtaaaaataattcaattattaagaaacaaatttattgccaataa

SEQ ID NO: 298899 - DNA, 846 bp, Proteus mirabilis
gtgagtaatcaagacagcacacaacaaaagaatatttatcgtcctgcaccgcctcgtttggtgcaagtaaaacgtatagtagatatcacgccgggcatgcgctctattacctttactagcgatgacttggacaattatccaagtcacacaggtggtgcccatttaaaaatatttttacctgtagaaggccaaactaaaccaacaattccaacactcactgacaaaggccctagttggcccgaaaaccaaccaagagcgatagtacgaacttacagtgtgcgagctattcgtcctgaattaaaagagcttgatattgaatttgcggttcatgaagatgcagggccggccattaattttgctttaaatgccaaggtaggtgattatattggcattactaatcctggaggccctgatcccctattggctcccgcctctcattactatatggcagccgatcccagctcattacccgctttaatggcattaattgaaacaatgtcacccgatgtacagggtaaagcggtgatccgcatagaaaatgaatccgatcgccaaatcattgatgctcctcaggggctagaaattgtttggctagtcggctctgttgaaacacaaactcaacctctgattgatgaatttatctcttggtcgttaccaaaggaagatgtggcattttggatcgccggagaagataaaattatccgtgcactaagacgttatattcgtcgtgataaaggctatgagcgcggacagatttatgctatcccttattggcgttttggctttaatgaagaaggttatcatgcagagcgtcatcatgttatggataatgaagatgtaagctaa

SEQ ID NO: 298900 - DNA, 483 bp, Proteus mirabilis
atgcaaaaaggatggcgacaaattgctaacgatgcccaagattggcctgacgatttaagcaaagcgctttttcaatgcagcaaatcattacaaaaagcctgtgcgtcttcttttggtactttgcaagcaacggcttttatggcaatggccaaatattgcaaagaaaaccacctgcaagaaatagcgcttactgatatttccccactattgacggtcgcataccaaagcatgatggcgagaggaaaaggggaattagggcaaaagtcagtattagatattctttatcatttatctgaagatctagcgtcaatctcatctctgactgaactaaaacccaccgctttaaaaagtattaataatacgctaaatgaatttcgccctaagcctaatttattgggacgtgcccgtatgttcccagaaaaatcgataggattagacgatcccggaatgttagcgattaacgttattgttgaagcaatttga

SEQ ID NO: 298901 - DNA, 624 bp, Proteus mirabilis
atgaaattaaaatcacggcaacaagagaattcagaacaaacacgcttagctttacttgaagctggacaatatctctttgtaaatcaatgctattatgatgtttccattgatgaaatatcacgttatgcaagggttactaaaggggcgttttatcatcactttagtaataaaaaagcccttttgagagagtgttatttactgcaagttaagcatgctgttcaaaaattagatgaagtgcctacttatgatgataaatggcaagagctaacggcgctcttctctctttgtgttgaccatatttatcagtgtaaaaacgagttaattcccttacaagaagttatctcggtattaggttggaaagagtgggaagagattgacgccaacattcttattcctcgtatccaacactgtgttgatattctctttgctgaaaaacagatctgtgcttattcaccggctattgtggtgaatttaatttatggttttattactcatattgctatcaatctaaaaaatgaagcgtcattgccgaaagaggcatgtagtgactttaaagctatttttgctgattttttaatcggggtaaaacaagcatcaccacagcgtcatcaacatagggtataa

SEQ ID NO: 298902 - DNA, 474 bp, Proteus mirabilis
gtggctttttttggctggacaaatatagggcaagtgatcgctgttaaaggtgcggctttacttaatagtattgatatgccaagtgggttgctatttttgggctttattttaatttgcgcctttatcaatttaatgattggttcagcttccgcgcaatgggcagtaacggcgcctatttttgttcctatgttaatgctggcaggttatgcaccagaaactattcaagcagcttatcgtataggtgattcggtgacgaatattattacgccaatgatgagttactttggtttaatcttagcggttgccacaaaatataagaaagatacgggtattggaactatgatctcgatgatgttgccatattctattatcttcttaattggttggtcactgttattctacctttgggtatttgttttccacttacctgtagggcctggatcgccaatttattattcaccgcatgcgggataa

SEQ ID NO: 298903 - DNA, 456 bp, Proteus mirabilis
atgtcttctaataataaaaaaggagaatccacatggaaggatacagtattaaaagtaataattagtgcggcaggggctataattccacctgtaataatggttgtatttgattcgaataataaggcgatctattttattgttgttttagttgccatatttgttggatttggttttaatcaattgtctatctttcttgaaaagaatgaggtggagtccagaacaaatgaagaattaattaatcttaaatctgataatgaaagactgtctagagaggttgaaggattaaaggtttatcttgatactaaaaatataaaaacagaatgtttgtgtgttatcaatgacatacaacttcttattgagaatggtcactccattgagagtataaggcgttatactatatatctatcaaaaaagaatcagattagtgattttagaaaatacatacaaataaaatga

SEQ ID NO: 298904 - DNA, 159 bp, Proteus mirabilis; identical to SEQ ID NO: 297609

SEQ ID NO: 298905 - DNA, 300 bp, Proteus mirabilis
atgtccagacatatcttaaaaaattcgaatgtgctgataataaaacaaaaaaaatttacatttaaattacttaaacaagctctagaatcaaatcctgaatcagttcagaagatagttaacgatgttttagaattatcccaagaagagcaagatgatttagctaatttattagagaaaactacattttcctcgattattagtgcttcaaaatcagtaattgataggattgattttattcatggattgaagcaattagtattcgataaagaatctaaaaagtccttattagaaagagactag

SEQ ID NO: 298906 - DNA, 672 bp, Proteus mirabilis
atgttgcaagggcttgatttgctgacaggtgaagtatcatggacggtcaacttagatacaccatcattatccgtacgtggtgaatcagcaccggctgttgcttatggtgcagcgattgtgggcgctgataatggccgtgttagtgcggtggtgttatctcaagggcaattagtttggcagcaaaatatttcacaagtgaaaggttctactgagatcagccgcttaaatgatgtcgatattacgccaattattgatgaaaatactgtttatgccatggcttacaacggtaatttagtcagtctagatatgcgttcaggacagatcatctggaaacgtgatttaggttcagttaatgacatggtacttttgggtgacaatctataccttgttgaccaaaatgaccgagttttagctgtgcgcaaatctgatggtgtgacattatggacacaagaagatctactgcaccgtaatttaaccgccccggctatcgttgatggttatttagtggtgggagatgcagaaggctatctccattggattgataccagtacaggcaaatttattgctcaaaataaagtaaatagctcaggtttattaagccgtccacaggctgttcaagataaactgatgatccaagcacgtgacggtaaactttatctatatcgtcggtaa

SEQ ID NO: 298907 - DNA, 747 bp, Proteus mirabilis
atggatattcctcgtattttcactattagcgaaagtgagcatcgtattcataaccctttcacaccagagaaatatgccaccttaggtcgagtattacgaatgaaagaaaactggcaaattcttgatctcggaagtggctctggtgaaatgctatgtacttgggctcacgattacaatattacaggtattggcatcgatataagcccgttgtttactctacaagcaaaatctagagcagaagagttaggcgtcagccatcgagtacattttatccatcatgatgcctcagattatattagtgataaaaaatgtgatatagcagcatgcataggagcaacttggattgctggtggtgtaattgaaactatcgagctactagcaaaaagtattaaaacaggtgggcttattcttatcggagaaccatattggcgacaaattccaacaacacaagagatagcacaagcttgtggtgcttcatccatatcagattttttaactttatctgagcttgttatttctttcgacaatcaaggatacgatctagtcgaaatggtactggcagatcaagagggttgggatagatatgaagctgctaaatggatgactatgcgccgttggcttgacaaaaatagtgccgatgattttgctcaagaaattcgaacggaattgaccatagcccctaaacgtcatgttagttttacacgagaatacttaggctggggggtatttgcattaattgctcgataa

SEQ ID NO: 298908 - DNA, 318 bp, Proteus mirabilis
atggcaactattacagttaaaaagtcacgcaagcctgagtttttacgtggagcatctgcaaatagacgtcacgccagacggaaagcagaagctattgcaaaaaagaatattgaattgaaattagaatcagtattccctcaagagaaaagacttacatcagtagaaaaaacactgtcattaagtcacataccagttactagaaatattgaacctaaattcaaaccatcggtagataactgttgcttacctaatgtagcagtattttcaggagttaaaacaaaacagccgagcagtgagttcggggtgacggcaagataa

SEQ ID NO: 298909 - DNA, 384 bp, Proteus mirabilis
atgtctgttgaccaatttcccattattaccatgcaggttttcccagaaacgttagagcatgctaataactggattgctgaaatggacttagtgcttgctcaaaaacaaaactttgtattggtttacccacctatcaacaagaaaaatgaacaagaggatatggagggcatgaaagccgttagacgctggctgaaaacagggaaaatgccattaagtcaatattgtgctggaatgatcatgaccgtcaatcaacaaacaaatgataaagagcaactgatgcagttatctcccgttgtttctgcggtgtacggtgtacctatctttgttgaagaaacccttgatggggcttatgctcaagctaataaacttctgggcaataaataa

SEQ ID NO: 298910 - DNA, 525 bp, Proteus mirabilis
atggcggtaggttttgatattgatgacactgttctgttctcaagcccaggcttttatcgtggtaaactggaatattctccaaacgatttcagttatctgaaaaacccagaattctgggaaaaaatgaacaacgaatgggataaattcagtatgcctaaacaagtcggtatcgatcttgttcagatgcacttaaaacgtggtgatactgtttatttcattaccggtcgtacacagactaaaacagagactgtgactaaatatgttcaagaaggtttaaatattcctgcagataaaatgcaacctgttatttttgccggtgaccaacctggcgcaaataacaaagtaagctggatgcgcgatcacaaactgaaaatttactacggtgatgcagatgctgatatcgcagcagctgatgagctaaatatccgtgggatccgtatcttacgtgctgctaactcttcttaccagccgttacctaaagcgggacaatttggtgaagaagtggttatcaattcagagtactaa

SEQ ID NO: 298911 - DNA, 423 bp, Proteus mirabilis; identical to SEQ ID NO: 298890

SEQ ID NO: 298912 - DNA, 195 bp, Proteus mirabilis
atgctagcgctcgctaatgtctatttaaaaccaaatagtagtttttataattttgaaacgttatgcgatcacatagctgactatgatgtcgtaataaccagtgatgagtataagcagatcattggtattgtaaataagctaaatcttgagttagatgatagatatttatatataaatccagataatattaagtga

SEQ ID NO: 298913 - DNA, 561 bp, Proteus mirabilis
ttgcgtgcattagatttaagtgatgaagaaaaagcgattatccgttatttaagctttttaaccctgaaaccaaccatgtatattgccaacgtcaatgaagatggtttcgaaaataatccttatcttgatacggtacgtaaaatcgctgaagccgaaggctctgttgttgttcctgtttgtgctgctatcgaagcagatattgcagagctagacgatgaagagcgcgaagagtttatgcaagatttaggcatcgaagagccgggcttaaaccgtgttatccgtgcaggttatgcgttactcgatttacaaacttactttaccgctggtgtaaaagaagtccgtgcttggacaatccctgtaggtgcaactgccccacaagctgcaggtaagatccatactgactttgaaaaaggttttatccgcgcccaaaccatctcatataatgactttatcacttatggtggtgaacaaggtgcgaaagaagccggtaaaatgcgtgcggaaggtaaagattatatcgtgcaagatggcgatgtgatgaacttcttgtttaatgtgtaa

SEQ ID NO: 298914 - DNA, 417 bp, Proteus mirabilis
atgaaaaatgaaactaatattcgccgtggcagacattgtgtattcctgatgcacgtccatttggtctttgtcacaaaataccggcgaaaaatatttgatcaggatgcaattgaaaaattgcgaggctactttgccagtgtttgtgctgattttgatgttgaactggttgaaatggatggggaacgggatcacgttcatttactgattaattacccgccaaaactggcgatatctaatctggttaacagccttaaaggggtatcgagtcgattacttcgacgtgatcgtcctgatattgcccaacgtgattactacaagggggttctttggtcgccgagttatttcgcggggagttgtggtggcgcaccaatatccattatccgccagtacattgagcaacaggaaacaccgagttag

SEQ ID NO: 298915 - DNA, 438 bp, Proteus mirabilis
atgttaaaaattagaatatcacgctcctcagaagcaccagaaatcatacaaatctggaaaaattcagtcgatgctacacatgactttctgacagctgacgatcgccaagagattgaaaaagaagttatcggttttttttccgaaacaccggtatgggttgctactaatcaagaagatcgcccactcggctttatgtttttacatgacggtcatctagaggcgctttttatcgatgcatcagcacgcgggttagggataggaaaacagttaatatcacacgcattaactcttcatcctaatttaagcgttgatgtcaatgaacaaaatcagcaagccgtcggtttttatcagcatatgggctttcaaatatctggacgttcggagttggataatcaaggaagagcgtacccattattgcatctaagtagagctaagtaa

SEQ ID NO: 298916 - DNA, 429 bp, Proteus mirabilis
ttgattattgagaagcctcagaataaagtttgcgaacttaatattgaacaacctaatattgaattagcgcctgtagaaaaaaacagtttaagtgattcaatacccgctaatgaaacacatttttctattggtgttatttgtaaccaagatacattagtttcattaaagcttgatgcacctgctatttataaaagtagaaatactaatttattaacacttcttaataatggcaccccttctggggtaggtttatcaattaaatataatgataataaatattatttaggtaatgttatttataatagcgttcatagaacaccttcgacggaatatacttttcctttttcagtaggttatgtgaaaatgagtgaaaacatcttgcctggcaaggtaacatcacaaattaatgtaaacttagaatataaataa

SEQ ID NO: 298917 - DNA, 138 bp, Proteus mirabilis
atgaattcaccttgtaatcctaatactctgcttgttgatttatcatattgctggtgtaataattcagcaccagggcttcctttcctttctaaatctaataaagaatttggtataaataataataatgaagatatatag

SEQ ID NO: 298918 - DNA, 333 bp, Proteus mirabilis
atgaattataaaaaatatctctttagttttgtattaatcacagcattgattagttcaaatgcgcttgcgttaacacttgatgaggcgcgcgcgcaaggtttagtaggggaaacctttagtggttatgttgagttagtgcaaccaaaccataagcaggctcaaatattggtgaatgaaatcaatcaagccagaaaagccaaatatgctgaaattgctaaaaccaatcaagtggctcctgagtctgttgcccgtttagcgggtgaaaaattagtggcaagagccaattcaggtgagtttgttaaaggaattaatgggcagtgggttaagaaataa

SEQ ID NO: 298919 - DNA, 378 bp, Proteus mirabilis
atgtctaaatcggcaaaaggtacgacagaacggcatggacggaacgtaaaagctaaatctggtttaaaccgctcaatactggaacagggctggtatgaaatgcgccgtcagcttgagtacaagcagctctggcgaggtggtcaggtactggcaataccaccggcctacaccagtcagaagtgcgcttgctgtggtcatacagcaaaggaaaaccgccagtcacaaagtcaattcgagtgccttgaatgtggatatacagcgaatgctgatatcaacggggcacgtaacattttagcggcaggacatgccgtgcttgcctgtggaggagaccgcccgtcgaagcaggaacccgccgaggtgattcagacatcagtctga

SEQ ID NO: 298920 - DNA, 378 bp, Proteus mirabilis
atgtctaaatcggcaaaaggtacgacagaacggcatggacggaacgtaaaagctaaatctggtttaaaccgctcaatactggagcagggctggtatgaaatgcgccgtcagtttgagtacaagcagctctggcgaggtggtcaggtactggcaataccaccggcctacaccagtcagaagtgcgcttgctgtggtcatacagcaaaggaaaaccgccagtcacaaagtcaattcgagtgccttgaatgtggatatacagcgaatgctgatatcaacggggcacgtaacattttagcggcaggacatgccgtgcttgcctgtggaggagaccgcccgtcgaagcaggaacccgccgaggtgattcagacatcagtctga

SEQ ID NO: 298921 - DNA, 213 bp, Proteus mirabilis; identical to SEQ ID NO: 297906

SEQ ID NO: 298922 - DNA, 246 bp, Proteus mirabilis
atggatggggaacgggatcacgttcatttactgattaattacccgccaaaactggcgatatctaatctggttaacagccttaaaggggtatcgagtcgattacctcgacgtaatcgtcctgatattgcccaacgtgattactacaaaggggttctttggtcgccgagttatttcgcggggagttgtggtggcgcaccaatatccattatccgccagtacattgagcaacaggaaacaccgagttag

SEQ ID NO: 298923 - DNA, 126 bp, Proteus mirabilis
atgtttaaacaacgtggttttgatccacaagctcgaatggctcacagtgatgcagagtcaaccaaaatttatacagaaaaccatgtacaatgggttgaagtaccacattgtgaaataaatggataa

SEQ ID NO: 298924 - DNA, 912 bp, Proteus mirabilis; identical to SEQ ID NO: 293855

SEQ ID NO: 298925 - DNA, 501 bp, Proteus mirabilis
atgaatatgattaaaagaaaacccgcagctaaaacgcgtaaaaaaacacgtgaagagctaaatgcagaaggacgtgaacgtaagcgccagaaaaagcatcgtggcaatcctgctggtaaccgtcagcaggaagcgatgaaaaaagagcaagcgcaaaccaatgaacagaaagatccacgtattggtagtaaaaaaccaattccactcatcgtggataatcaggcgcctaaagtagataagaaaaaatccgcgccaacaaaaatggagcctatgcgcttatcgttagaagaagagttagcactcttagagaatgatactcgtttagatgaattactctctcgtctggaagaagggggtaaactcaatcctgaagagcaagcttatactgaaaaaacccttgatcgcatcgatgcgttaatggcggaattaggcattgagtttgaagaagatgacgatgaagaaaaaacagaagatattatgcagttattaaaaggtaagtaa

SEQ ID NO: 298926 - DNA, 2004 bp, Proteus mirabilis
atggtgcccgttgcgacattgcctgctgcagcaattctgatgggaataggctactggattgatccggtaggctggggaaacgataatgcgctagctgctttactgatcaaatcaggtgctgccattatcgataatatgtcagtattgtttgcgataggtgttgcttatggtatgtcaaaagacaaagacggggcggcggccttaactggctttgtcggctttttagtggtgactacactttgttcacctgctgcggtatcgatgatcaaaggtctaccacttgcagaagtgcctgtggcttttggtaaaataaacaaccagtttgtcggtattctggttggggtactttcagctgagctgtataaccgctttagcagtgtcgaattacctcgtgcattatcattttttagtggtcgtcgcttagtgccgatcctcacgtcattcttgatgattatcgtcgcctttattctaatgtatatctggccggtaatttacggcggcttagtgagctttggtgaaagcattaaagatatgggggctttgggcgccggtatttatgctttctttaaccgcctattaattcctgttggtttacaccatgcgctgaactctgtgttctggtttgatgtggcgggtattaatgatattcctaacttccttgctggtcagcaagcgattgatgcgggcttggcaacggtcggtgtgacaggacgttatcaagcaggtttcttcccagttatgatgtttggtttaccaggggcagcactggctatttatcattgtgcgcgcaaagagcataaagcaaaagttgccggtatcatgatggctggggcatttgcggcattctttacggggatcactgaaccgcttgaattctcctttatgtttgttgctccagtgctttatgttattcacgcattcttaatggcgatttctgtttatattgccgcaagtatggagtggatttcaggctttggctttagtgcgggccttgtggatatgttcttatcttcacgcaaccctctggcggttaaatggtatatgttgattgtgcaaggtatcgcattcttcttcatttactatggtattttccgtttcactattactaaatttaacctgaaaacaccgggtcgtgaagatgaagtggcgggggatgaaaccgcagacggctatgatgaagatatcaaagccgtccccactaatagcaaagaagcagtgcaacaagaagcacgtcaatatatcgctgcagttggtggctcagataacttaactggtattgatgcttgtattactcgtttacgtttaaatgtaaaagatgccagtgtagtcaatgatgcttacgcaaaacacctaggtgcttcaggggttattcgcttaaataaacagagtgttcaagtgattgtgggcacacgggctgaaatcgttgcgagtgccatgcgtgatgtattagcacaaggcccagttgccgcttatgctggtagacatacagataacgcggtatcgacagaaaaaacatcagaaaaacagactaataatgatgccaaagtcattcttgaaatggtcgcgccatttgatggtgaagtggttgcattaaaagatgtgcctgatgaagctttctcaagcggtgtcgtgggagatggtcttgctattaaacccacatcaaatattgtgatggcacctgctgctggtacggtagtaaaaatctttgatactaaccacgcattttgcattgaaacggataacggtgttgagattatcgtccatatggggattgatacggtcgcattaggaggaaaaggctttaaacgtctggttgaagaaggtacagaggttaaactcggccagcctatcttagagctagatcttgagtatttaaacactaatgctaaatcaatgataagtccggttatcatcagtaatatcgatgactttgataaagtgagtgatattgcatccggccaagtgacggcaaataacaccataatctataaagtattaaaataa

SEQ ID NO: 298927 - DNA, 468 bp, Proteus mirabilis
atgaaaaagtatgacttaattctcgctgacccgccttggcgatataataataaagtatcaaatggcgcagcagataatcattacaacaccacgggtttataccccctctctcgattaccaatagaaaaacactcctctaaaaatgccgtgctatttatgtggtacacgggaaactttgcactcgaagctattaaattagccgaagcatgggattttaaagttaaaaacatgttcgggttcgcatgggtgaaattaaataaaaatgcaggagatagaataaataaaaaacctccagaagactttttcgatttcatggaaatattaaacaacgagacgaaaattaattgcggtaattatacccgccaaaatgtcgaaatgtgtttaatagccacaagaggaaatggattacctcgtcaatctgcaagtgttcgacaagttatttatttgtgcttagatgaacacagctaa

SEQ ID NO: 298928 - DNA, 246 bp, Proteus mirabilis
atgaataatgaatataacagagagcaaatgaaattaggcgttctatatgctcgcaatcatttaattagcgcatacagagctaactttatagagtgtgatgagaagcagttcgcttatatcatggcccaattatctcacgttgtaaaggaatctatcgatattgaattaatgatggatagtgttttgtcatgcaatgatgaagctgaaaattggattaaagaaattctaattaaacattctaaataa

SEQ ID NO: 298929 - DNA, 255 bp, Proteus mirabilis
atggataaatcaagacggcagtttgaagtgtggatagcggataatgcgtatttatttatgcatataaacttaacgtaccacgaagcagcattatataagttatggcaagcatcacgcgactcactcgtattagacctaccagaaagagaaaagaataaaggaaattatgattttttcactgatggatataatagtggaatatcagcatgtgaaatttcattattagataacggagtgaaaataaaaaatgaataa

SEQ ID NO: 298930 - DNA, 255 bp, Proteus mirabilis
atgaagtatttgctaattaaagatgatggcgaagtaaaacttataacttatctaaataagttttcaaaagtaaaaggcattccgtcatatggtaaagcagcaccaatcgtagttgataaatataatgaaacttcatttcgtgtaaaaggtgttgattacaaagtagcatatgaaaccaaagaaccaacagaagaagaatttagaaataaatcatcaggtctattagatggaaaaggtggatatattaaaaaataa

SEQ ID NO: 298931 - DNA, 456 bp, Proteus mirabilis
atgaaagacagaataaagtttaacgatgcaatgttagcggctgtcatggatggcagaaaaacgcaaacacgcagaccgattgagccacaaccaaaagtaaccgaagatgggttacgctatcttagcgcatggcaagatggttacacactatcagagaaagtatgcgcagcatatcggcatggatttgttgatgttgattgcccgtacggtgagattggcgacatcatcaattttgcagacaaggacggtaatatcaaagggaaaattgaaattactgacgtctggattcagcaagtaaacgatatcagcgaaagtgatgcagaagccgaggggtttgacgggaaactaaatgcacatacttctgactttgctgcggtatggattgcaatatatggagttgatagttgggtaaataacgaatgggtgtgggttattgggtttagcagaattgattga

SEQ ID NO: 298932 - DNA, 183 bp, Proteus mirabilis
atgactattgaacagttacaaaaagaaaatgaaaagttgaaagaagttctttttgctggcgctttcttaatggctaaagcggttcataaatattatttcggcgttggaatggaagagcaagccaccgactttatgaaggacgcagaggaacttacaggtaataagctaccaaagttcgcatga

SEQ ID NO: 298933 - DNA, 153 bp, Proteus mirabilis
gtgactcagcatcaacaatggctagaagaattacgcaggaagcgtaaagaatcgcaggaacgcgaacacgatgaatttatgtatcaaacggaagtgttaggacgacaaggattgtctatgcctctcaaggacttttcaggagattttcaatga

SEQ ID NO: 298934 - DNA, 228 bp, Proteus mirabilis; identical to SEQ ID NO: 298588

SEQ ID NO: 298935 - DNA, 186 bp, Proteus mirabilis; identical to SEQ ID NO: 298590

SEQ ID NO: 298936 - DNA, 153 bp, Proteus mirabilis; identical to SEQ ID NO: 298591

SEQ ID NO: 298937 - DNA, 216 bp, Proteus mirabilis
atgattaacttaaaaatgtatgaatatctaagaaatgacggagcaagaattttctttaagacagaaagtatttcttcaataaaggaagagactttgtcagatgggcaaccaatcactaaattaactctaaattgcggaacaaccattatggaattagttccgctagaagagtttttaaaaatgcatcacataaagatagaaaaattgaagtcttag

SEQ ID NO: 298938 - DNA, 489 bp, Proteus mirabilis
atgagcgcaaatgaatccccaaacctaccatcaacagtagcggatgagccagataaaaaccagcagcaaaccaaaaaagataagccaaatccaatagcagctatcgagaagtttgttgaggttcaatctaaagagattgaattaaaatctaaagagattgattttaaaacgcaagagctagaaataagacgacaagagattgaaagcaatagagagatagctcttaagtctatcgatgctcaaaaggaagacagagaaacacaaactcgtttttttagcggactagaaactaaaaaagtttactttaaatgcttggttgcagtgtgcgttgtacttgttgttatagtttcaatgtatactgggaatgctcaatatgcgattgaattagctaaaataggtggtggcgtgctagctggataccttgctggagtatacaaaggaaagtcagaccagctagagcgaacctcaacgcaaaaaaatgaagattaa

SEQ ID NO: 298939 - DNA, 261 bp, Proteus mirabilis
atggaagtgctacctgagactttagggttacctttaggagatcatatgaaaatcaatcaaaaaagaaaatatttttacaaaaaagtatttgaaccagttaaagctaaaaaggtatctccaactgaatatctagaaatagttcagaatcatactgataatattgaaagagttgagtatttagcgccgaagattggtgatgacaactttggttcatttaaagttacttatagaatacctgtactttgtgaagttaatatatga

SEQ ID NO: 298940 - DNA, 645 bp, Proteus mirabilis; identical to SEQ ID NO: 298596

SEQ ID NO: 298941 - DNA, 348 bp, Proteus mirabilis
atggaatgcgcaaatacacgcaaacaattcaatcaatttatctctaaccacctaatagcttcagcattacaagcattgagaaataaaactcagtctgccgtggctagaacgttaggtgttcatgattcaactatcctacgtcgaactgaaaaatatcctgaaatatgcgaaacacttgtcgcatcgggaattattgattttgtgatggaaggagaacgaaaaatctcagaagaagagtaccgatttttgtggaaacaaatgggtgaactttctcaaatgaaaataaaagaaaacgcctcgattgcggcaacaaacgaggcgtgttgttcaatggaattcaccatttaa

SEQ ID NO: 298942 - DNA, 2304 bp, Proteus mirabilis; identical to SEQ ID NO: 293650

SEQ ID NO: 298943 - DNA, 591 bp, Proteus mirabilis
atgaatcattcatttgattttatatcatgtgaaaacagcggtgaggttttagatagaatcatagaagcgtatggtttctcatcaaaaataatgcttgcccaacacttcaatatggtagctagtagtttatctggtagatataaacgaaatatttttcccgcagatatggttgttagatgcatgtatgagacaggtgctagcctccaatggttagcttttggcgagggaaaaccattcgattatgaaaaactagataacttaaaacttcctaactttcgcctaaaagacgggcaactaatactctcagatcatattatgtttgataaagttatttttcctaacaaaacccctctaccaagcgaacctatatcagttcaagacggaaacaattatttcattattgataaaaaatttaatgatgtatttgatggaaaatggctcattgaaattgatgggaaaaatagtattagagaactaactagaatgccaatgcaacgagtacgagtttctggtgttggaatggcttttgattgtgaaatttctgatataaaaattcacggcagagtaattactattatcgaaaatcaataa

SEQ ID NO: 298944 - DNA, 225 bp, Proteus mirabilis
atgcgccctaacattacaataaccattccagacccatacgtcacagtgagtgagtattgcaagcgtactggcttatcagaaagctcagtaagaaatatgattgctgatggtcgattacctgttcgcgaaaagcataaaaacttaaagcaaggtacggtctttattaaccttgcagcaatcacagtagaagccctttcaaaatcaaatatttcgcttcaagcgtag

SEQ ID NO: 298945 - DNA, 510 bp, Proteus mirabilis
atgtttgattatcaggtttccaaacaagcgcactttgataatgcatgccgtgctttcgcaaatatccataaaggggatttagtgcaaatagctgaaagcatcggcatgaacgcccaaatgttgcgtaacaagttaaatcctgaacaaccgcaccaattaacgtgcattgatttaatgaaactgactgatgcaactgaggacgcctctatccttgatggtgtcttagaacaaatgcaatgtcagccgtcagtgccagttaatgaagtgtgtgattctaatgtacctgcttatttactaacggcggtcggtgaagtggggaagttagcaacaaatacagtttcaggcggtaatttcaataatgcacgtgtcgctgactttaaacgttctgttaatacagcaattcgttgtttaacgttggcaggcataacactatcggccagattacatactaatccggcgtttgcctgtgcagtggatgcagtcgctaatcttagcccatcaatgatgtga

SEQ ID NO: 298946 - DNA, 2193 bp, Proteus mirabilis
atgactacctcgatagataaaaatagcgatggattgaaattaaaacatcgctataaatttcctaagtatcctttcaaatatccatcccccgtagtgtgtgctgtgggggaatttcctcgttctgataaaaatgaaaaactatatttgtggaatgaaggtaaagggaaagcaatttatcgcccatttgaaacctacgagcaaatccatcaaaaggaacgtgagcataaggcgtttcatgatgcggaagccttattatcgaaacaacctaaattagtacaaatcgttgttaacaagcgatatagcgatttagataaagaacaaggtcgcaaacgcgctaatgcttatcttgcgaaaacctttgttgaaagaacctacccaagaataaagatgatcactgaccgttatgctttgcctgcaatgacggtagaaaactgtaatttcttcaaccgttttaatcgcctacctgatatgtcaaaaaaagatatcgaaaatcttgcatgggatatcgcaaacttaatgaatgaacagctcatgttagtaggtaaagaaaatatcactgatagtgaattgaaattaacctacaaactttttttacatgcttcaaaaataacctcaggttttaaacaagatgtgcctagatgggcaaaattaactactcgttattttaatcagaaagatgctgattcggctatttctcggatgatgtcagataaatggtggcttaaccgtttacgtaaatatgcgtctcaatggcgtgagcatttaagcattgcaatcaacttggtcagtaagaaagccaatatttatgcgagtaaaaccgccatcaacgaatggaaagagcaaaaaaataggactcgtgagtttttaaaatccatggagctggaagacgaggaaggaaatcgcgtcagcttgattgataaatactatggcagtgtggccaaccctgcgattaagcgtactgaaatgatggtgcgtattcgtggttttgaagacatctgtaatgaattaggttatgtcggtgagttctacacattaaccgccccgtctaaatatcatgcgacaacaaaacacggttaccgtaaccgtaaatggaatggttgcagtcctgctgatacacaaaaatacctttgtaagctatggagtaaaataagagcaaaattacatcgtaaaaatttgcgtgtctttgggatgcgcgtagctgaaccgcatcatgatggtacacctcattggcacatgctgttatttatgttgccgtctcaacttgaagaaatccgctcaattattaaagcctataccgtagcggaagataatcacgaattaatcactgacaaagcgcgtaaggcgcgtttttacgttgaagaaatcgatcccgaaaaagggtcagctacggggtatgtggcgaaatacatttcaaaaaatgtcgatggttatgcgcttgatggtgaagttgatgatgaaagcggtagaccaatgaaagaagctgcaatggcggctgctgcatggtcaggacgttggaatattcgccaatttcaatttataggtggtgcgcctgtgaccgtttaccgtgaattacgccgaatggctgaccacgatagagcgatgggattagatgttgaattcgcccttgttcacgattgcgcagacagtggaaattgggcgggttatatcaatgcccaaggtggcccgtttgtgaaacgtgaaaaccttatcgcgcgtctttggtatcaggaatcggaagatacaaacgaatacggtgaagaagtgatccgtgtaaaaggggttttttctacattagttggcatagatacacctattttaacccgtttgaaacagtggaagattgtgaagaagttagacgacgcgcatgcggagtctgcttttagtggcgcgaacgcgtcacctaggagttctgtcaataactgtacgggggaaacccgaacgattaacgatgaagaaaagggggtaacggaaattttagataatttcaggtcaatcgggcatgaaataaccctagaagatgcccaaaaaatgagaaatgggtcgggaatagtcattgatgatattgcatttagaagttttgacgatggttctttgattagaacaggtacgacacgactgaaataccgtcaattccatgaaaggaaagcgcgaatttttaacaaagtcaataaattaaggggaataaatgtatag

SEQ ID NO: 298947 - DNA, 1647 bp, Proteus mirabilis
atgaaacccattaatcgactttatttatccggtgatgaaacgcaccttgtcgacgttaaaatggtgctggaattatcgcaatgtggacgtggctttattacggctaaaaccgataccgattacacgggtaaattggtgcgccttgatattggctacactgatttactattacgatatttcacgggttacgtagaacgttcgcaaccgtcacaaaacggttttcaaaaattgtttgtgcgggagttggttggtgtattcgacagaatgtggccgtgctcttttcagcatcccaccttaaaacagatcaccgattatctaaaagagcacagcggattacattttgtgttaccggatgccgaatatgtgaatactccaatcccacattacacccataatggcacgggctaccaactattaaatagcttgggaacagtgttcaatattcccgattatgtgtggtatcaaacgccagacggtgacgtgttcgtggggagttgggcggattcattttggaaagataaagaggtcgaaatagacaatcaattctcttctgaacaacgtgccggtaatcaaatgaccatccctatggtgcaaagtttacgccctggtgtgaaagtgaataataaacgattagagcgtgtggcgctggataacgataatatgacgttaacgtggataagccctgatgctatcactgggagagccgaaaaccgcaccatagcccaacaacaaattgataatgcctaccccgagctttcggcaggattgcacttgccgaaatttgcccgtgttgaagcacccaccgaaaacactaccgcgggggatatttctgatccattcagaccaaaatatgcggttgatgtgcaactggttgatgctgatggcaatgatgtggcacccgtttatcacgcggtgccgttaccattacccatggcaggcaatgaatcgggaatgtttcaatatccgcctgtgggttcgatggtcgaaattgcgtttgaaaatggccgtgcagataaaccttttattcgccaagtgttaagtcatggcaataccttgcccgacatcaagccaggcgaacaactgcaacagcaacgtcaagaggtatcacagcgggtaacacaagacggcacatggcatcgtcaaactgaccaaaaaattattgaagaatcgatgcaccgtgaagttaaaaccgacacagaaaatcgcacggttatcgccagagaaaccaccgtacaagccaccgataaaacgaccgtgataggcacaagcacgttaatggcaggtgccattatgcaaattgcagagggtgactttagccaggcaacacaagccaataaggttgtggctgttggcaaaaatatgacggttgatgtgggccaacagttagaagaaaaaatcggggcagtgcgttccagtatcgctggcgcgatgcaaaaaatcacggcaccggttgtttatttaggtaatgagcaattgaatgtgatgcaatgcatgttagataccttagatgtggtgaatgagttagctgcactcactgcaagtcatactcataataacacgggcggtccgttaaatgcctcagccattagcaacacaggcaccaaatcagcaggacttaaacagaagtattcacctgtcattgggtga

SEQ ID NO: 298948 - DNA, 678 bp, Proteus mirabilis
atgaaaaagatatttgcttttattatttttttattcccacttattgcttattctaatggtgtttcattaggtgctacgcgtattatttataattctaatattaaacaaactaatcttgttgtgactaattcagataaagagaatagttttctaattcaatcatgggtatctgataatcaaggtaataaaaataatgattttattgttacccctcctttatatattcttgacgctaataaagagaatgctttaagaattatgtatacaggtgaacctttacctgcagatcgcgaaagtttattttggatgaatgtcaaagctattccttctttagatgaaaagcttgctaatgaaaatacactacaaattgccatccagagtcggataaagcttttctaccgccctagtgggttgtccgcttatactgaaaaatatgccaatgaagtgactttttcctataaaaatggggagttaattgcccataatccaacaccttatcatattactatggtcaatttagccgcagccgacagtcaacttccttcaagtattatgattaacccattttcacaattaacattaggaaaagttaatcagaatgctaataccatttcattccaaaccattaatgattatggcgcacagactcctgttttaaaaaaagaaatcgttcattaa

SEQ ID NO: 298949 - DNA, 561 bp, Proteus mirabilis
atgaaaaagttattattatctgcaattattacttcagcaatggccataattgctacacctgccctagcagaagatactggtacaccagcaccaacagaagttacagttaatggtggtactattaactttgaaggttctgtcgttaatgctgcttgtggtgttgatagtagttcaagtaaccaaactgttcgtttgggtcaattccgtgtcgctgaattcactaaaaaaggtgatgaaacaggacgtattccttttagcattaaattaaataactgcgatattactgtttcatcattagcagcaattacctttaacggtacagcttctgatggtgatgcaactgcattcgcattacaaggcagtggcgcagcaaccaatgtagcgttaaaaattaccgattcaagcagcaaaaatgttgttccaggacaaccttcttcaactcaaaaattaatcgaaggtgaaaaccaattaaattataacgcttctcttatttccactgatgatacagtgaaggcaggtagcgcaaacgttacaactaactttatggtgacttactcttaa

SEQ ID NO: 298950 - DNA, 1185 bp, Proteus mirabilis
gtgtctaaagaaaaatttgaacgttcaaaaccgcacgttaacgttggtactatcggccacgttgaccacggtaaaacaactctgactgctgcaatcactacagttttagctaaaacttacggtggtgctgctcgtgcattcgaccaaatcgataatgcgccagaagaaaaagcgcgtggtatcaccatctctacttcacacgtagaatacgatactccaactcgccactacgcacacgtagactgcccaggtcacgccgactatgttaaaaacatgatcactggtgctgcgcaaatggacggagctattctggtagtagcagcaactgatggtccaatgccacaaactcgtgagcacatcctgttaggtcgtcaggttggtgttccttacatcatcgtattcctgaacaaatgtgacatggtagatgatgaagagctgttagaattagttgaaatggaagttcgtgaacttctgtctcaatacgatttcccaggcgatgacactccagtaatccgtggttcagcgctgaaagcactggaaggcgaagcagagtgggaagcaaaaattgttgaattagcagaagcactggatacttatatcccagagccagagcgtgcaattgacaaaccattcctgttaccaatcgaagatgtattctcaatctcaggtcgtggtacagtagttactggtcgtgtagagcgtggtatcatcaaagtaggtgatgaagttgagattgttggtatcaaagaaaccgcaaaaacaacttgtactggcgttgaaatgttccgtaaattacttgacgaaggtcgtgcaggtgagaacgtaggtgttctgctgcgtggtacaaaacgtgaagaaatcgaacgtggacaagtactggcgaaaccaggttcaatcaacccacacaacaaatttgaatcagaagtttatattctgagcaaagatgaaggtggtcgtcacactccattcttcaaaggctaccgtccacagttctacttccgtacaactgacgtaactggtactatcgaattaccagaaggcgtagaaatggtaatgccaggcgacaacgtgaacatgatcgttgaactgatccacccaatcgcaatggacgaaggtttacgcttcgcaatccgtgaaggtggccgtacagtaggtgcgggtgttgttgctaaagtattaggttaa

SEQ ID NO: 298951 - DNA, 480 bp, Proteus mirabilis
gtgatccaacagattgatgacgcctctcgggtacaaattataggtattggtggatcaggtttagttgccagagatttaagttataaattacagaaaataggtattacgactttaattgaaactgatcaccatgtacaaatttctgttgctcagatgttaagccctcgggatttacaaattgtgatctcttacagtggcaaaagaaaagatatgctggtcgctgcctctgtggctaaaaaacaaggtgctaaaattatagcgatcacaggagaaaaacattcaccactaggtctgatggccgattatatattagaaactattgctgatgaaggtgagtggcgtagtgctgctatttcttctcgcactgcacaaaacaccattaccgatcttatctttatggcattattaaagaagcgtgatgaaaatgcgaaggctttagtattaagctctcaagcactaattaatagtctggatgattaa

SEQ ID NO: 298952 - DNA, 1134 bp, Proteus mirabilis
atgcaatgcgcacgctccagtgcgggtgattgccactcttgtgggtggctttctcttgcttattccgaacaaattaatcaaaaacaacataatctattagacttattgcccaaaaactacgcgtttactcaattagcgccggtagaaagccaacaagttcaatttcgtaataaagcgaaaatggtggtaagtggtagtgttgaaaaaccgattttagggttacgtaaaccagagggggaaggtgttgatttatgccaatgcccactctatcccgcttcttttgaaccggttttcccaatattaaaaacctttattgccaaagcaggattagtgccttataacgtggaacgtcgtcgaggcgagctaaaatttattttattaacagaaagtcgccacaatcacagcatgatgctacgttttgtgttgcgctcagaaaaaaaactggcgcaacttcgccaagcattaccatggttacaggctcaattaccccaattagccgttatttcggtgaatatccaacctgtccatatggcgatattggaaggtgagcaagaaattgtattaacagaaaaaacctttttagatgaatattttaatgagattccgttacatattcgcccgaaaggtttttttcaaaccaatcccgatgttgccgcgtcactgtatgcaacggcagggcattgggtcaaagagttgcagataaaccggttatgggatctcttttgtggctcaggggggtttggcttacattgcgcacaaaaaaacacggaattaacaggcattgagattagccctgaagcgattgaatgtgcacgtttatccgccaatgaattagggttagagcatgtagagtttcaagcgctggactctactggttttgctttagcaaaagagtctgttcctgaattagtactggttaatccgccacgacgaggtattggcgaaacgttatgcgactatttaaatagtatgaagcctcgttttatcctctattccagttgtaatgctcaaacgatggcaaaagatatacaacaactttctcattatcgtatcgatagagtgcaactgtttgatatgttccctcatactgctcattatgaagtgttgacgctcttggttttacaacaaagttaa

SEQ ID NO: 298953 - DNA, 126 bp, Proteus mirabilis
atgcaaaaaatagttttgttaaaatgtttcttaattgttttaattttaacaaaaaacaaacaatggaattttggcggttttaataacagaaatcttcctgttttagcaggtagagagtatgagtga

SEQ ID NO: 298954 - DNA, 654 bp, Proteus mirabilis
atgattttagtttttgcttctgataaaggcggagtaggtaaaacaacaaccgcgatcaatatggctgttatgcttaaaagaaaaaataaaagtgtgattatgctaaaagcagatagaaaccgagacttgtttgtctggtctgatattcgcgcacaagctggcttctcagcaattcccattcatgaagcattcggaaatattagtgatgaaataaaacgcctagaaaagctctgtgacgtggttgttgtagactgtgcaggacatgatagctcagaatttcgaagtgcattaacggtggctgatgtattgctcacattggttaagccttcatcctctttagaaaaaaacaccttaacgaatgtgactaaaaccgtcagaaccgcgcaaaagcagcatggtaatagtgacttaaaagctcacgtactcatgacgagaattaagtcgcataaactgcaagatgccgtatcgcttgagaatgaattaaagtccgatgaaatttggctgcaaccgcttaaaaatcgaatttcagaactagatatttttgaaaatgccgttaacgctggcgtgggtgttcatgaagtagaaaaagcaagtagtttaggtgtggcaaaagcgcaaattgaattaatcgcaaaagaaatagggctgatttaa

SEQ ID NO: 298955 - DNA, 282 bp, Proteus mirabilis; identical to SEQ ID NO: 289902

SEQ ID NO: 298956 - DNA, 219 bp, Proteus mirabilis
atgtatttgattttttcaatattgctaatgcttggtgcgatatgtgcattatataatacaattcgattattatatttaaatggtgttagtggaggattagaggataatatccaattaataataagtgtaatcggtattattgtcatgcctgttttttcatatggttcttataaggcatggagtgaacacctgacaatattacaagtattcggctcataa

SEQ ID NO: 298957 - DNA, 204 bp, Proteus mirabilis; identical to SEQ ID NO: 289934

SEQ ID NO: 298958 - DNA, 366 bp, Proteus mirabilis
atgagttatcttagacagcaatttttgacagaagaagaaagtaaattattagttattttacaagaaaatgtaaaagaaaactatcatgttttttgtaaagtgagattgagtgagtttttatattcttctcaaaaaatgggaacatctgaattttttaatgaatttgagattattaatagtattaatttaccttttgcaatttatgacacattagagaatcaattagtcgctgctattagttacattaatcctatcgaaaaatcgaatttattagaaaatcaagatataaaggttattcatttaacgatgttaaaagatacattaactaatggtgagctatcaatgttttattctgatagtgtttga

SEQ ID NO: 298959 - DNA, 405 bp, Proteus mirabilis; identical to SEQ ID NO: 289906

SEQ ID NO: 298960 - DNA, 957 bp, Proteus mirabilis; identical to SEQ ID NO: 289918

SEQ ID NO: 298961 - DNA, 516 bp, Proteus mirabilis; identical to SEQ ID NO: 289892

SEQ ID NO: 298962 - DNA, 558 bp, Proteus mirabilis; identical to SEQ ID NO: 289891

SEQ ID NO: 298963 - DNA, 159 bp, Proteus mirabilis; identical to SEQ ID NO: 289890

SEQ ID NO: 298964 - DNA, 231 bp, Proteus mirabilis; identical to SEQ ID NO: 289889

SEQ ID NO: 298965 - DNA, 198 bp, Proteus mirabilis
atgaatgaattaaaacgattaagagataagttaggtctgtcaaatagtgatcttgctgaacttatgggattatcagagcaaacgataaaaaacagaatggcatctgattttaataaaaaaacagcaagtaagttagaaattgaatttttaaaactattggcaggtgaacacgaaaaatattcaattttagaaaaataa

SEQ ID NO: 298966 - DNA, 333 bp, Proteus mirabilis; identical to SEQ ID NO: 289919

SEQ ID NO: 298967 - DNA, 216 bp, Proteus mirabilis; identical to SEQ ID NO: 289920

SEQ ID NO: 298968 - DNA, 135 bp, Proteus mirabilis
atgtcggataaaatgatagcagcagccaaagattttgcaaagggaaaaaaaaccacttttccaatcatgacagtcaaagaattacctttttttcttcaacaaatacgtaaagaaagtgaattgttaaaacattaa

SEQ ID NO: 298969 - DNA, 549 bp, Proteus mirabilis
atgaagcaaattaattttagaattaatgataatgaatatgaattatatcataaaaaagtcaaagaaaacttaaatatgtcattgccgagtttttataaattagtcggtaatatgatgttaaataaggacaaagatattaaagaaaccttgtctgatcatgcgatatcgataggtgaagaatctgattataccgataaaagagcatacttgtatttaacggctgaacaagaaaatgcgctaataacatcagcaaaaaagcatggttggtcattatcgagagaaatgcgttttcgtcttcaaacaaccttaagtaatgaaatggattttttcgaccaagagttacaagaaatgaaattatgtcgaaatcatattaaacgtattggactcaatattaatatgatattacgacgtgatgaaggacgtgttttagataaagagggaatgcgtcaagatatgcaagcattaaccgaacagcttaatgaacttgaaaataaatttaattactttatcaataagtgtaaaggtagaattattgcaaatcgattgtga

SEQ ID NO: 298970 - DNA, 1164 bp, Proteus mirabilis
atgggattggatatcgaaaaagagtaccgagctaaacgggctagacaagagagtagtcgatcagttaaatcgattaaatcagctaaatcctcatttgtacataaagtgaaaaatggagggaaattttatgaccgaaacgctcaagaatcccgaataaaaaaaggggcgagcaaagaggttatgactaaaataacagggagcgcaaaagttaaacaaggggtaagaaatagtgttgattatattagtcgagatgattcattagaacttgttgatgagcagggtatcaaaatcaatgcggaagaagctaaacaatctttaattgatagtgatgatgcattgcagttaagtgataagagcagaagaacacctgatataactaaaaatattgttttttcaccccccatgactgcaaaggtaaaacccgaagaagcgattgaagccgttagacaaacgttaataaaaaaatatccagataatcgttttgtgatagcttatcatgatgataagaaagagcaccctcatgttcatgttatattgaaaacacgtaaagaaaatgaagataagcgaatcaaaattactaaacaggatttgcgtgatttgagatctggattttgtgatgaattgaagctcaaagggtatgatgtaaaagcaacacataaacaacaaattgggttaaagtcacagcttaaagatgattcattaactgcgcctaagcgccaaaagaatgtttatgaagtgattgattttgggcgagcaccttatcaattcaatactaaaaataaatcacaaaattatttgacagtgaaaaccttaaacaagggcgttgaagcaacgtattggggtaaagagtttggtgctttatgcaatagagaaaaaattcaaaaaggggatttaataaaattaaaaaagataggtacagaagatataaaaatccctaagctagatgataaagggcagcaaacagggtggaaaatcacacagcgtaatcaatgggagatgcaaaacttaggcgttaaaggcgttgatcgcactaaaaatattttacccaaaaattcggggattaaagagatccaacaattccaaaaacaacaaacgcaatttaaacagcaagcaatggaattgattaaaaaagaacaacaaattaaagtggggcttaaattttaa

SEQ ID NO: 298971 - DNA, 288 bp, Proteus mirabilis; identical to SEQ ID NO: 289896

SEQ ID NO: 298972 - DNA, 252 bp, Proteus mirabilis
atgccaaatacgattttaagtgatacaacagccagcgtcagtgaactcaaaaaaaacccaatggcgacagttaacgcaggtttaggctatcccgtagccattttaaaccgtaatcaacctgctttttactgtgttcctgctgagttatatgagcaaatacttgatgcgctagacgataacgaacttgcaaagctggtcaaagaacgagaatcacaatctcttgtcgatattaatttagccgagtacctatga

SEQ ID NO: 298973 - DNA, 411 bp, Proteus mirabilis; identical to SEQ ID NO: 289910

SEQ ID NO: 298974 - DNA, 270 bp, Proteus mirabilis
atgaagagtgatgaaattataactttagtagagaaatgcgatatttttgatggtaaaaagttgagttttaagcaaaaggagatagctatacgttatgtgtttggtcaaacagcagaagaattagctatgcattttgataattctactcgcagtatttggttacatttggatgtggtgagaaatgaatttggtaatgtttctctttcatcattgagaacaattatttttatgaaattaatatgtcagtttataaatattaaaatacgatga

SEQ ID NO: 298975 - DNA, 183 bp, Proteus mirabilis; identical to SEQ ID NO: 289923

SEQ ID NO: 298976 - DNA, 615 bp, Proteus mirabilis; identical to SEQ ID NO: 289924

SEQ ID NO: 298977 - DNA, 288 bp, Proteus mirabilis
atgaaaacatcacaaaaattgccatttctattaatgtgcggattaatgtcattgattgcttttacttttcctgctcaagctgctgatgtaactacagcgacaacaggattcttagataggatcattgattttttaacgacaattagaaagccagctatcactatttgtgctctaggtattggttttattgcattatttgcacgtaatcatatggcttggatatatccactgattatcgggattattatctttatcattgcgccatatctgcctgattggttgggttaa

SEQ ID NO: 298978 - DNA, 2772 bp, Proteus mirabilis; identical to SEQ ID NO: 289875

SEQ ID NO: 298979 - DNA, 768 bp, Proteus mirabilis; identical to SEQ ID NO: 289876

SEQ ID NO: 298980 - DNA, 252 bp, Proteus mirabilis
atgaaaacaaaattattaattggcgcagtatctattctctttctatcggcatgtggtgaagaagtgaaatcagttcaatggtggcaagaacatgcagatgaagcacagaaaaaagtaacggaatgttcttccaacggaaatgatagtgaaaattgccgaaatgcaaaagatggattattccgtcataaacaattaacagcaaaatcaccatcttttatggatgcatataagaaaacacaaaacaaagaatag

SEQ ID NO: 298981 - DNA, 1035 bp, Proteus mirabilis
atggaaaacgcgacagctacatccgacttttttcaaacagcatatcaagttatttgggatatgctgaataaaacagtggcaaataaggtttctgaatactctcaaattgctgcggatttggcacagtacgggatttcaatttatattttatggtttgcattcagtacgctagctttaaaaaataaaacgcctgtgcctgattttatttggaacttggcgcgttttactatcatcttgatgtttattaaaaatagcgggggctggctgagtgccagcaccgatgctatttacggattgcgcgacactttggcaggtggtgatccttggaagtggatggatcaactgtgggttaaaacatctcaggttgctgcacatataatgtcaaaggatacatcaacgtatgtgaaagttgatgggggaattggctcatttcttacttattttggagggttggctgctttacttacttgctcattcgtattttttgctgctgaaattactttattactgctgacgacaacggctcctattttcattttgtgtctgatgtttggttttttacggcaaatgttcaataactggttacaactgattttcagttctttattcattgttatgtttggttcgttagcgttacgggcgggtatgtcgtttttgaatattgttttgagcgtttcggtggctcaagctgcggaagctaatctcatgcaattaggggcaactgtggcagcggctggattatttatggtatttgtaatgattttagctaaaaactttgcaactcaactagcaggggtaggtgtagacggtgcagttcagggtatggcaatgatgggagttgcaggagctgctgtaatggcatttaaaggtatcagaaaagcaggaaataccgcgtcaaatatgggtaaaagtaatcgagataggggctggaatggggcttcagcgagtgggaatagtggttcgtctgcgcctaactcggcaaaatcgcgtcggcaagcctcgattgataatgtgagaaaacgttatggaacataa

SEQ ID NO: 298982 - DNA, 138 bp, Proteus mirabilis; identical to SEQ ID NO: 289925

SEQ ID NO: 298983 - DNA, 243 bp, Proteus mirabilis; identical to SEQ ID NO: 289926

SEQ ID NO: 298984 - DNA, 720 bp, Proteus mirabilis
atgaaaaataaaaaagtgggaataccatttttaaaaaagaaagaaaaaattgaactagcaaaaaccttcgaagaaaaagacattaaaaaacaaaaaatcattaatacgttgtataagatttttgggctttctggtttggcgtttgcttttttaagtttacttggttggataatgatgctgccattaaaaaatacggaagtggaaatatggacagttgacaaaaatacagggcaaacagaaaaggtgtcacgtgtgaaagatgaaaacctgacaaaagatgaagcgttaggtcgctattttgtgacgcaatacattaaagcgcgtgaagggtataactattttcgtttacagcatgattatgacatggtgatgttatggagtgcggaaaatgtcgctaatgattataccgctatttttaaaacggatgctagaccaactattatgtataaaaaagcacaacgtaccgttgatatagaaattatctatcctgtttttattaatccatcgtctcagaaaggtgatcctgatttgttagctaccgttcgttttaaaaaaatcatcaaggatgtcacaacaaatcgcagtgttgaggaaacatgggtagcgagaatgacttaccgttttatgcctgacgttgagaaaaaagaaagtgaacgaaatgcaaatccattaggctttgttgtaaccagttgggtcgctgaaaaagaaattcgaggttaa

SEQ ID NO: 298985 - DNA, 918 bp, Proteus mirabilis; identical to SEQ ID NO: 289881

SEQ ID NO: 298986 - DNA, 1185 bp, Proteus mirabilis
atgagtgaagatactgaaaagccattaactgccgttgaaattgagcaaaaacttaaacaagaacgtcaattgcaaattgaccaatcttccgaaaataaagaatcaacgccagaaccaaaaaaagtttcacttgggattgataaattaaaaaaatccaaaaaaggaaccgtgttgcttattcttttttttgtcttatcgattggtgcattgtctttatattatttcccttcgttattgcgtgcgtttattagcagtgatgaagcggaagaagtgccacaagaaacgatttcaaccggtggccgtgacaagttaacagggctaaataatgatgttgacccatttggtcaagcagaattaaacaatgcaggtgagttaacgacggcaaataccaatgagccagctgaaagtacaccaccaccgccaaagcgcattgaattcagtcgtggaatggacagaggggtttcgacacgctcaagcagtactagcacacctagtagtagccaaaatgcacccgtagagactgtgagcgtaacaacgacgcagcctgaaacggttgttggcagtaaaaccaaaataacgcgcttaccctatgacccgaatttgtttattcctgaaaatacggcaattccgtgttcgttagatcgtcgatttgtctcagatttagcgggtaaattgacgtgtaccgtctatgaggacgtttacagtgcaaacggcaatgtaaagctaatagataaaggcacggtagcacatttggtttataagtcggcttatgtgcctaatcaggggcaagggcatgtctttttaatggcaactaagctacgaacccgtacacagccttttattgatattccattagtagattccgaagctgcgggcgcattaggtgaaacgggggttgatggttggattgatacgcatttttgggatcgcttcggtggggcaatgatgctaggcatgatccccgatgccatgcagggattaaataatgtggcaaaagataataaagataatcagaccgattataccgcgaatagtcgtcaagccttttccgagatagcaaaacaggcatttgcgaacagcgttaacattccgcctacgctgtataaaaatcaaggcgaaattatcaccttgattacgggaagtgatttagattttagttcaatttaccaattaaggatgaaatag

SEQ ID NO: 298987 - DNA, 1032 bp, Proteus mirabilis; identical to SEQ ID NO: 289879

SEQ ID NO: 298988 - DNA, 1833 bp, Proteus mirabilis
atggcgcgaaaatatcccgacaaacctcaaagtatttttattgctattgttatgttaggtatcacatattacgcaggaagtgtgattgtttattttttaaatggttatgattttttatatatttataagcattatcaatctgatttattgtggcaattgattagcgaaagccgaattaaagcatctatacgggtaacggctattcctgctttgctgattggcttcgtggcatcttttattttacctgtggcggtgatttatttattaaatcaagaaaaaatgtcacttcacggagatgcaaaatttgccagtgataatgatttaaaaaaatcaaaactattaaaatgggaaaaggaaaattcaaaaggtattttagttgggaaatataaagggaaatacctttggtataccgcgcctgattttgtgtcattaggggctggaacaagggcgggtaaaggagcagctattggcattcctaatttgcttgtgtggttgcattcgctgattattctcgatcctaaacaagagtgctggaaaattaccagtaaagtccgtgaaaaactgttagggcatcgggtttatctggttgacccgtttaatagcaaaacacacgggtttaatccctttttctatatcgaattagataaagaaagtggcgcaaaagatttattaaagttagtggaaattttatttccatcctatggctcaacaggggcagaggcacactttaataacttggcaggacaatattttacgggattaacaaagttattatatttctttattcatcatgcccctgaatatttgaaaacgtttgatgttaaacctgttttttctattggcagtgtcgtggatttatacgggcgtattgatagggaattagtccttaacaacaggcaagaaattgaagccaaagcccgtgatgaaaatacactttatcatttacaagatgggctaacaaaactacaggaataccatttaaccgaagatgaacagcgttcgagtgtcgatggttcatttcgaaaaaaaatgagtctgttttatttacccacagtacgtaaatgtacagataataacgattttgatttacgtcagttacgacgcgaaaaaatcacgatttatgttgggattaatgcggaggatttaggtattgcctatgattttttaaatctcttttttaattttgtggttgaagtgacattacgtgaaaaccctgattttgacccatcattaaaacattcatgcttgttgatgttagatgaatttccgtcaatcggttatatgccgatcattaaaaagggttctggctatatcgcaggatttaacttgaaattgttaaccatttatcaaaatgttagccagttaaatgagatttacggcatcgagggagcgaaaacattgttaagcgcccatccttgtagggttatttatgctgtcagtgaacaagatgatgctgaacaaatctcggcaaaacttggttatatcacgacaaaatcaaaaggagaaagcaaaagtcaaggtcgtggttcatctaaaagtaaatcggaaagcgaagcacgtcgtgctttagttttaccgcaggaattaggtacgctcgattttaaagaagagtttattttattaaaaggcgaaaaccctgttaaagcagaaaaagcgctttatttttctgataattattttatggacagattgttaaaggtcagtccgaaacttgaagatgaagtaaaaaaaattaataaaaaatcaacggttattggggtgaaaggattacgttatcccgataaagaaaaaatgctgtcattaggtgaattagaatctgaggtgtttttatga

SEQ ID NO: 298989 - DNA, 408 bp, Proteus mirabilis
atgaaaaaaggattatggcttagtgttgttttattaacggcatgttcatctccgccagaagccccgaaagtggattggggaaaaaaagaggttgcggtaaatgctaaaataatgacatggacaccaattcataccgtggtgagtagtgacgtcgttaatgatgaatggcaaaaacgaattaataattttattcctgaaaatcgtctttatgatgatgcggtttattttgccattgcacattcgaataaaattattgttgaagcaaataatggcactgaatttttgaaaacaaaagaatggttacaggctcacggtgcaaatggggtaatacaatatcaaaaaaaatcaaactggttaaataatccaataacagtttatcttattaaggaaaatcaaaatgaaaagtaa

SEQ ID NO: 298990 - DNA, 261 bp, Proteus mirabilis
atgaaaagtaaaatcgttgcgataagtttatttttcttacccgtattatcacaagcagatgtccccgtattcacaggggatgtcaagttagcttgtgaagcggtcttgtgtctttcatcaggtacgcgcccaagtgagtgcgctcctgcattatcacgttactttggtattaataaaaagttttggtctgatactgttaagcaagaaaaaatttcttacagctttgccctgcatcaagtgatgcaggaatgcctgagttag

SEQ ID NO: 298991 - DNA, 300 bp, Proteus mirabilis
atgcctgagttagttaatgccattgctaatggcgcagggcgttgtgatgctacttatcttaataaatttctgtatgaagaaaagagagagcaaaagtgccgcagtcggggaaaggaagaagattgttggtatgaaacgtactatcgcataaaaaatgaatttcctaactattgccgtgcttacgttaatcatgaatggactgatttagatagtagcctgcattatcagggaaaaatggaatgggttaagaaagaatctgtggcaggttggaataattcaggtggtcgatgggttgattag

SEQ ID NO: 298992 - DNA, 144 bp, Proteus mirabilis; identical to SEQ ID NO: 289928

SEQ ID NO: 298993 - DNA, 513 bp, Proteus mirabilis
atgaagaaactaaaaaaaataggatggagtgctgctaaggaaatttatagccttgctgtttttgttattaagctattactcattttagcaattactattccgattattattatatggctgtatatcattctaacttttgatggttctcagattgatgaaatttcattcagccaatttgttgcgagtggcaacgtacaatatttttcatttattatttctgtttgtgtgtatgcgatttatcgttttttggattttaataatagaaaaatcaaaaaggaaaatagagtttatttcaactataccgatgatgacgctgaaaaaatactgaaaagtaaaaatgccttttatcctgatgatgaattgttttcatggattgatgaaggtgaactcgtcgttgaacaatatatgtcaaaagaccaagttggacggttagtgaaacagtacatgatagaaaccaacggaatgccactgaaaattgtttttcctgaatatgacaaaggaagcgaccaatga

SEQ ID NO: 298994 - DNA, 123 bp, Proteus mirabilis; identical to SEQ ID NO: 289915

SEQ ID NO: 298995 - DNA, 195 bp, Proteus mirabilis
atgaatgaacaattgtctattcatacctattgcaaaaaaagacaaaatcattatttgcctgatgatattgatttacattacctcgttaatggaaatgtactttccaaagaagatgaagataagattattgaaaaagtatttaagtatcgaggtggggtttatgtttggaaaagcaatgcaaaaataaataaataa

SEQ ID NO: 298996 - DNA, 1680 bp, Proteus mirabilis
atgattaaacaaaataaaatattaacacttcatgagttatttaaattttgtgaagcgaacggtgtttttcgattagtcaaagtcgaagaaaacgactcatttgttaaaattattatctgtggcgtttatcaaattaggcttaataaaaaaacacaaaaagtcacattgcatacgtggttttttacaaacttagagtcaggcgagtggcgagttagaaaatcattacctaaccgaatcccttgtttttggaaaaatgaaaatatatataatatacaatattggttacaaagtgcagtaacccatgttattgactcaatagtgaaatcaaattactcgatcagtggtatatgttatatgtataaatcattttatggagggattgaaacgaaaatacttcttgaagatatacaaccagattttgatacgactagtgaaatgtttgaggaaaaaacctttttttatcctcattatttagcgggtatgagtatgagtaaaatgcgtcatgatatttgcataaaaattatgactagaataaatgcatttattaataatgaaacccaaaaatatgcaagcatgagtttatccaaaaatatatggaaagttattgataagggggtattttctttatacggaaaagcacattttaattccttcgtacgtaattcaatattagatgctaattttttggattattataaattctcaaaacagatacgcatcaatgataatgtcgattataaaggactttggttgatgataggttttttacggaagcaaaaaaaatctaattatcactatactttaacaggtaaaataaaagacctgtataaagagctacaactacctgaatcaatttcttacggggattttaaatatatgtatacattaaagccctcattaatcgcacagttaattgaatttataagtctacgtgacagatatcggtttggtataaatgataaaattaaaataatcatgaaattactcaggcagcctgaaattaaaaaataccctactaaggctatttttgattttttagagaccgtatggaatggtttacgcgttgaacatggttatacttcggtttaccgcattgcattaaaatggctcgattatcatcaagacctttataaaaatattggttataaatcggtaacaagacgctggaacacggaactaaatcgctttgcacatgctatagaatgggtgtttaacaccgatttttacatccaaaaaaatcagtctttagcttctatctatcgattatcagaagaatgggttgaagaactcaatcatgacgattatgactatgcagaaatttcccctcaatggaatggtattgatattgattggcaatcgtgcatttctgaaatgacggtaagtgaaattacgacactagaacaactaaaaaaagaaggtcaagaaatgcatcattgcgtttattcctacgctcatgattgcgccaatgaaacatatcgagttttcactatcataaataatgatgaaagagccactttagggatttcacaagtcgaaaaccataaaatattcaaatttgaccaagtaatgggagtatcaaactctgcggtttcaagtgaaataataaaaatgagtaaaaaagtattaaaccaagtcaacagcaaaataaataaagttaatttaattaatttaggagagtaa

SEQ ID NO: 298997 - DNA, 2319 bp, Proteus mirabilis
atgagagtctttattgcggaaaaaccatcattagcaaaagccatttttgagggattaggtggtaatccaaacacggaaaagaaaaaagggtattttcaacacggtgacgatgttgtgacgtggtgtgttggtcacatgctcgagttgagcgacccccaagattatgatgagaaatatgcaagctggcgttttggtgacttaccgattaaaacggttttcccaccaacctataaaataaaaaaagaaacggcagcacaaacaaaaatcattttgtcattaattgaccaagcaaaaaccattgttaatgctggcgacccagacgaggaaggctgtcttctggtcaatgaaattttagattacgcaaaaaataaaaagcccgtagagcgtattttagtatcggatttaaacttagcacctgttaaaaaagccttagccgatttacaaccgaatgaaaaatttcgcggtatgtcaaacagtgcgttatcccgttctctgctcgatcagagttttggctataaccttactcgtggctgtacattaaaagggcgtgaaaaaggctatcaaggtgttttaaacgtgggacgggtgcaaagtgcagttttggggcttgtgaatatgcgaacattggcgaaccaaaaccacaatgaaagtttctattatgatatttatgctttaattgagatgaacggacatcaagttaaggcgaaatatcaaacaaccgataacgatcagattgatgataagcgtcgcttaatctcagaagcccaagccaaacacattactgaaatcgtttcagggcaagcggtaaaagtgaccattgcagcaacgaaagcggaaaacacaaaaccacctttaccgttaaatttatctacactacagcaaatttgcgctaaacgatttggctatgccccacaagaaacgctggatattatgcaaagcctgtatgaaacgcataaattattgacctatccaagaacagacaatcgttatttgtctgacgagcactattaccaagcgaatgatatcgctcaagcagttatcggtacattgccagaattggcaagcacggttgagcacatggataaagttcaaaaacacaaagcctttaacgccagcaaaattgaagcgcatcatgctattgtgccaacaacgaaagacggctctaatattcaattgaatgagaaagagaaaaatgtgtatcgattagtttcactttactttattggcttattttatcccgatagcattcgagataaaacaaaagtgcattttgatatcaaaggcaacacctttaccgccacacaaagcgtattagtccagtcaggatgggaatcattaggtaaagacagcgacgaagaagaaacagaagagccagaaaaactcgactttgatttatcaacgttaaaatttaatgataatggggtgtgtgaaacagctaacgtggataaaaagcccactcttccacctaaatattttactgcttcaacactccttgccgctatgacacgtgcggcaaaatttattgatgatcctgaacttcgaaaaatacttgaagctaaagacgaggggagcactgatcaaggcagtattggcacagaagcgactcgcgcagggatattaaaaaaactctccgaaaatacgggattaatttcgattgaaaaagaaaaaggctattcagagcttgtttggaaaacaacaaagcaagggcaagagttttgcgctgctctgcctgatgaaattaccaagcccgatatttcggctcgatgggctgaaaaacaagccttaattaaaaaaggggaactgaccgttgctgactttattaaagaaacagacagctatattaaggagttgattgccgaactcgacgctaacggaataaatatcacagctaacggtacaccttgccctgtttgtcaaaaggggtttttaatcaaacgtaaggggcaaaatggtttcttttggggttgttcatgctatcctgaatgtaagacggcatttcccgataaaaatgggcaaccagttacagaaaaacaacctaatgagggcgcagtagcacgtttaaatgtcatgtgtccgtcatgcagtaacgaaataattattcgaccaaaaggatacttctgtacaggatgtgaatttaaaatatgggctgaattttgcagtaaaaaactcacacagaatcaagtggaaaaactcattaaagatggaaaaactgccgttattaaagggtttaaaaccaaagcagggaaaacatttgatactgaacttgttttagatgataagaaaacagggaagataggtttccctgaaaagaaaaagtaa

SEQ ID NO: 298998 - DNA, 516 bp, Proteus mirabilis; identical to SEQ ID NO: 289911

SEQ ID NO: 298999 - DNA, 606 bp, Proteus mirabilis
ttgaaaatcacccttcttcgttgggttaatctccctctcctgctgtctcttacattgcctgttatcgggcaatgtaagcccctttttattggtgattcactgacttatgaactcgccatgagttacaaaaaaattgcccctgttgatgctaaattccttgaaagcacagggttgcaatcaaaacagattttaagttggcaagattacacacagaatatcgatttttcgctttatgacacggtgtatattgttttaggtacaaacgatctcatttctaaggcagatatccccgaataccaacaaaaggctagtgtctttatccaaaccataaaaaagcaaaataggcagattgtttggttactcccccctaccctaaaaaataaagaaaaaaataatttattatcaaatacccgaattgcaatctgtgaagcagcaagaaaaaataagataaaaacgatggatactcgagtatctttagggtatcaatactcagagtttattaatggtgttaaagtaagaaccagtgatggtattcatataacagaaaatggggctgataatgtaataaggagcttaattaatgttgataaagaaaataacagatag

SEQ ID NO: 299000 - DNA, 963 bp, Proteus mirabilis
atgttgataaagaaaataacagatagcattattgcatttatatataagacaacggataattatgtcattgatcagttaaatgatgttaatttaggtaaagttgagctatataaacccacggcggattcaaatactattttgagatgggatgagctttttaagaattatatggttaggggttttcctacagaaattaaagatataattactaatttgtgccgtatcgagaaaactatagactatttttttgattttaataaaatacaatcattaacagcatctaaaagttttggtggcattcctgatggcgctataaacggtagctggttttatgatttgtatagttgggggcgcgcaatgtatcccgacgaaagaatgaaagcggaaaatgaagatgattggaaacgaaatattgcgcacattgaatctgaggggttcagaaagtgcagacctattaatgtcatatattacgaatggttaaataggtttgttgcccctaatacaggcggttctcatcatgccgcattggtagtgtatcaatcaatcagagataaaattaaatacacaagagaaactattttagaaaaggtttctcttaatagttattatatacgaatgctggataatgaatactattcattcatcattaataatgatagcaatcccaaatccctatcggaaagtgataaatttattaatgtaataacagagctaatcagtacgcatatttcaattctgaaacccgtacattattatcagaacttaatgattatctttattcctaaagaatcattaaaaatagattcagaattatttaataactggattaataaagcacatgaccagaaaaaaataatcaatctgccgaactattttagattaccaaatgaatatcatacaaaaccttatttgcatgaacttcgttatctgaaaatgccaaatccaaattctatttttcaatag

SEQ ID NO: 299001 - DNA, 147 bp, Proteus mirabilis; identical to SEQ ID NO: 286956

SEQ ID NO: 299002 - DNA, 1467 bp, Proteus mirabilis; identical to SEQ ID NO: 289932

SEQ ID NO: 299003 - DNA, 519 bp, Proteus mirabilis; identical to SEQ ID NO: 289933

SEQ ID NO: 299004 - DNA, 1032 bp, Proteus mirabilis
atgtcaataactaaacaacctaatggtcgctggcgtttagatttttatcccgaaggaaaaaaagacggaaagggtaagcgcatccgaaaaacatttaccaccaagggggaagcgatagcttatgaacgttacattttagataacgttgataaccaaccttggttaggtgataaagaagatagacgtaaactcagtgagttaatagatacctggtataattcccacggtgtaactatcgatgatggtaataccagaaaatcagctatgatttatgcatctgattgcatgggttcacctttagctactgagtttacagctaaattattttcgtcttatcgtgaaaaacgaatttctggaaaactaagacgtacagaacgtttagataaagtttccccgcgaacaatgaatctagagctagcttattttagagctatgtttaatgagttaaagcgactaggggagtggaaacatgaaaaccctgtcgaatctattagaccttttaaaaccgaagaagctgaaatggcttttttgaatcacgatgaaattaacttattacttgaggaatgtgcgaatagctcaaataagcacttattaaccgttgttaaaatttgcctatctacaggtgcgcgatggtcagaagcggaatctttaagaggttctaacattagtaaatttcgaatcacttatacaaatacgaaaggcaatagaaatagaaccgtcccaataagcgaagaactctataacctagttgtagagggaaaaacgagaggagctttatttacttcttgttattctgcattccgaacagccttaaaaaggacaaaaatagtattgcctgatggtcaaatgtcacatgtattacgtcatacgtttgcatcacattttatgatgaatggtggcaatatattagtgcttcaaagaatactggggcatactgacatcaaaatgacaatgcgttatgcacattttgcacctgaccatttagacgaagcagtaaaactgaacccgctagcattcggtgagaacaaatag

SEQ ID NO: 299005 - DNA, 312 bp, Proteus mirabilis; identical to SEQ ID NO: 298212

SEQ ID NO: 299006 - DNA, 1017 bp, Proteus mirabilis
gtgaccaatgacgaatctattgaaattgaagtaagaaatgtagttgttcattttcttgataaagaacagcatggtgacgcaacacaaatccttagtccaacaatgaatactgtaacccatgcgtctcagagattgattgatgcaatctgtgaacgttattctggaaggactggtaaaggttatggtcattttgagggggatacagataattatccaatggaacggattgttgctgattatttaaatgctcctgattcattttatgacatttcagttcgtatgatgaatcatctcgttgatcgttcacagcaagagaccatggcaacaggaggatatgttctgttttctcatattattattgggtcgcatgaacatatacttatcgctatggtaaatgctacaacaggttcagcaattaatgataattttattattgaagacagtgtatatttagacatagcaaagctgcgggttgctggacgaattgatataactgcttggcaaaatggtgctgaacgttatataagttttcttaaaggtcagagttctgtttcaaattattttaaacgttttttagggtgtaatgacgttttgattgcaaagcaggaatctgaaaaactaaaaaatgctcttcaggaatttgttactgaacaaaggcttgaaggagaagaaaaagaaagctttctcagcagagcttttgagcatttaagagacctgagcaagtctacaacacctttaaatttagatacatttgttaattcagtatggccacatgatcctgatattttatctgctaaactagcatcagaagagcttgaattatcagatggcttcatccctgatggtcgtgtaattcgtggtttggttagttttaaagggaaatcacaatattgggaattgaaatttgaccgagcgggtataaatgatggttcagtagagtacaatgaggaaaataatgaaattatcctcagaaatatttcagatgagcttcggcagatatttttagatgaggtgtga

SEQ ID NO: 299007 - DNA, 1212 bp, Proteus mirabilis
gtgagcggttttatttcatttgagcaacttatagaactatatagaagaattgagtttactgatgactcaatgactggttcttttttgcttaaagaccaaaccgattgcgattttatcgaccaattgcttaaggatgagcaaaaatttggaattatacttgattcaggaaatttagttgtaggggaaacaattagtttaaccgttgagttgccaagaacatcatttggaagtgttttccgtaatgtaagagggatgctacaagctcccaaaaatctgtgtacggagctggataactattttatttttgatattcaattttcaaaaaaggacatggaagttccgcaagatattaaaaattacagaatggtaattaattttttatctcttcttgaagaagattcggcatattttgataaaactacatatcagtatatttttctaggtactgaggttttcaaactttctccacgctactcctatgaaactataagggaactagataatacatctttagaaaacttaatctcatgctttaaagaagacacgcatagagaacaaaagttagatattttagttaatagtattcaagtgatcacagaagatattgatgataaagagaagtttgaatatatgttgaataaccttcaaaaacttaaggaacagtttttaaaggggtataagatttttgcgtcaggattttcatacgataagatcatggatcaacttcgtactgctaaagtagaagaaatggggaagatacataaagcattttcagatattcaaaatcacatacttggtattccagttgcatcaattatagttgctactcagtttaaaaaagcatcaacatggcaagggcaaggaataaccaatacttttatattattaggatgttttatatttatttgtttggtttttttggttttatgtaatcaaaaacaaactcttaaggttataagtgaagaattagtacataagaaaaagcaaataaacaaagagtattcctttatcaaggatgatattgatggtgtttttaaatcaatagagagtcgactaaccatacagcgttgggcatttagaattgttggagttatattgtttgtgggactaatctcaacagtatttgcttacattctagtcactgagccggtgttactgtatgttactactcattgcagttggtttgcatcatttgtagatctaattaattaa

SEQ ID NO: 299008 - DNA, 270 bp, Proteus mirabilis
atgcgcatggacaaattaaccaatgctacctacggaacggctggcttaactgccttttttgcaagtctctcactttatgaatgggtctttgtaatagggatgggatttagcatgcttcttggattagcaacttatctgatgacacggcgagaacagcgaaaacgaacagcattatttgctgaattggttcatcgaaattgttctagtgatccgcgagaaatcgaaaaaatagtcggtgagatgctgactaaagctaaaaaggacatctaa

SEQ ID NO: 299009 - DNA, 471 bp, Proteus mirabilis
atgaacctaaaacaaaaagtgacagctgttgcgagtgctggcgctgtaagtattgcactaacagtgattggttattttgagggcgtgcgttatgaaccttaccgcgatgttgctggagttctgacggtttgttatggccatactggaaacgacattattcaaggtaagacctatacacaacaagagtgtgatgaattactacagaaagactttatcagaactcaacaacaagttgatgtcctggttaaagtgccggttgatgataaaacaaaagcgtctctatattcctttgcctttaatgtgggtaccacagcttttgcacgttctacattgctaaagaaattaaatgcgggtgatcagtatggtgcttgtgaagaaatgaaacgatgggtttatgctggtggcaaagtgtggcgagggttagtcagtcgtagagatgcggagtcagcactatgtcatggaaacctttaa

SEQ ID NO: 299010 - DNA, 159 bp, Proteus mirabilis
atgtcatggaaacctttaattatcattatcagctttatcctcgtgttactcatcacagtcgctggtggtgtttatctctcaattgatcattcatgtattaacgataaagcaagcttagacaaacgctgtcagatagctctctcacatcatcggtactaa

SEQ ID NO: 299011 - DNA, 462 bp, Proteus mirabilis
atgaagcattggaaactttacattgtcattgtgatggtggggattgttgctggtggttgcgtgctgattaatgcacaagcgaaaagaattaacacgctgacagaaaacaacaaagaactgactactgcactcgaagagcagaaggatatcaatactgactatcaagtacgcatagagcgactaagtcaactggatacaagacacacacaggagcttgttaatgcaaagaatgaaatcaacactcttcgtgatgctgttagctctggttctaagcgggtgtacatcaaagccgagtgtccagcagtcaccaagaataccaccgaaagcggaagcaatgaaaccaccgcacgacttaacaaagcagttgaacaagattatctacgtctcagagaaatgatagtcgagaacgaaaagcaaactttgtatttgcagaattacattagaacggagtgtttacagtga

SEQ ID NO: 299012 - DNA, 1440 bp, Proteus mirabilis
atgacaactatttttaaaaccccctttgcaacacaaggggataaggcttctatacccgtagaaatccaatcagacggctcagtgtcttatacacaaggttatggttacgactatgagcgtgaccaagtcacagatcctgctgcgaaagatattgaacgtgaaaaaatgaacgggatatttcacgatatcacggaagcgattggcgaaattcaatcttttggttttcccaaatgggctgaagccggtcagccgtatgcgatacgcgctattgtgtaccataaaaataaagtctggcagtctaaagttgagaataacaatattgagccggttgccggtaatgcatgggcagagttaaaagcggatgccacagcaagtgatgtgggcgcatattcaaaaggggaatccgataaacgctttcaaccgttaggtaattacacaccatccggttatagctactcaaaggcagaaaccgacaccaaatatcagccaaagggtaattatgccccagcagggaactacgcaaacaaaggggatagttacactaaaacggaaagtgacggcagatatcaagcgaaagggagttaccagccattaggtgattatgcgactaactcagcgctcaatagtggactgaataataaatttgataaaggtaatgtagctcaaagtacgggaacgtcaacggttcatgtgatgagccagaaagcttctacggatgcttttcaacctaagggaaattatcagcctaaaggtaattatgcgttagtaggtgcatcatatacgaagactgagtcggatggccgatatcaagctaaaggaagttatgcaacagctggaagtagctacacaaaagcggaaagcgattcaaggtatcaaaataaaagtggtgttattaatacaatatatccagtcggtattgtcgcgtggtttgcccaaaacaaaaatccaaacacattattccctggtacaaaatggaactatgttggtgaaaataaaacggtaagattagccagtcaaaatgggaataacatcttaagtagtggtggaagtgataatattaaattaacgagtgcacaattacctgcacacaaccactcatttagtggtacaacaaatagcacgggcgcacacactcataccagaggctcaatgaacattactgcaacatggaatagtggagcagaaaactcagatataaaatctacaggagcagttagcaaaggggggcaagattatttttggggaccatcatcaggatggacagatattcatccatatggacttaattttgatgcatccaagtcttggactggtgctacatcttcaagtggggcacataatcacactattagtggaaataccagttcaacgggatctggtagtgctattaacataactaactcatacataatgctaatggcatggtatcgagtttcttaa

SEQ ID NO: 299013 - DNA, 471 bp, Proteus mirabilis
  misc_feature (4)..(13): n is a, c, g, or t
gtgnnnnnnnnnntttttactagactacctgaattattaaataatgatgaaactgttttatgtgttaatagcggactcgtaaaatctaatgtttggttgatcattcctacaaataaacgagttatttttctacataaaaagagtggtctctttcataaaaaaattgattcatcttcagtaaattatgatgctattacttcaattgactcatcttctggattagctggaggtaaaataaaaataaatactcctggtactatttatgaagttggcactctacaaaaaaattcagtacaaccactagttgatattatcctgtctacaaaaaataactcattacaacaaccttctaataatagtggcagtgatgatctgttatctaaattagaaaaattaggtaaattaaaagaaagtggtgtactgacagaagaagagttccaagaacaaaaaagtaaattacttaatttttaa

SEQ ID NO: 299014 - DNA, 276 bp, Proteus mirabilis
atgattaagcttgaaatcaataatgcggaatatattgctcagttagaagaggctcgtttatctgtagacaacccttatggttatctgtttatggatattgttttttctgatccaaagtttgatgagaatacgtttgaaatgaaggatgttaaacgagaaccgatgagaacatatatgacagaggatgtggcgagggatttatttgagaagttggaaaaatatttcaatcataaaaatatggtactaacgtcaaaaaatacaaaaaaacttatgtag

SEQ ID NO: 299015 - DNA, 246 bp, Proteus mirabilis
atgcctcgtattgaaattctctttgataaagaatctagcaacaaaccctcagaaaaagtacgcgatgcccttcgtgagagaatcattcaaaaagtcggaaacaaatatggttctttaaacgtcagagtggccttaagttcatcaacatcactaatagtaagcggtaccaaaaatgatgatgatgctaaagaaataaaccaaatcattgaagaaatttggctcgatgattcatgggttcctgcataa

SEQ ID NO: 299016 - DNA, 1119 bp, Proteus mirabilis
ttgaattatcaatttatcacgacaaacacagcactagaagatgtctgtaaagcagcgtctgaggtatcacaaattgcattagatacagagtttgtccgtatacgcacctattacccacatttggggcttatccaaatgtacgatgggaaacagatctctcttattgatcccctgaccattactgagtggactccttttgttgaattattaactaatcccgcagttcttaaatatttgcatgctggaagtgaagatcttgaagtgttttctcatcaatttggttgtgttccgacacccatgatagacacccaagtcgtggccgcttttctgggctatcccatttcttgtggttttgccaccttagttgagaaatatgaacatattgctctcgataaaagtgaatcacgaacagattggctggcgcgcccattaaccgaaaaacagtgccaatatgcgagtggtgatgtgttttatttgttacctctagcgaagaaattaatcgcgcaggcacaagaagctggttatatggacgcgattgttgatgagtgtgaaatgatagccgagcgtcgccaagagaccgtatcaccagagcttgcctatcgcgatattggtaatgcatggcaattacgaggtcaacaattagcatgcttaaaaatgttggcagaatggcgtttaaatcaagctagagcccgtgatatggcattaaactttgttgtaagggaagagcatttatggtcagtagcacgctatttaccgacctctcttgctgaattagatgcgctttctctatcggggcaagaaattcgttgtcatggccgccgcttgttggattttgttgctaaagccaaacagatcaaagatgaagattgtcctgagcctattggcaatttaattgaacaacctaactataaaaaagcctttaaagcaataaaaacggtgatccaagaggtaagtgaaggacagcgttataaccccgagttattagcctcaagaagacaaataaaccaattgcttaatattcactggaaaattaaaacaggggagcctgaattgctttcacgctggcgtaaagcattattagcagaaaaaattactgcaattttggcgcaatatccttaa

SEQ ID NO: 299017 - DNA, 327 bp, Proteus mirabilis; identical to SEQ ID NO: 16555

SEQ ID NO: 299018 - DNA, 738 bp, Proteus mirabilis; identical to SEQ ID NO: 296768

SEQ ID NO: 299019 - DNA, 678 bp, Proteus mirabilis; identical to SEQ ID NO: 296767

SEQ ID NO: 299020 - DNA, 921 bp, Proteus mirabilis; identical to SEQ ID NO: 296766

SEQ ID NO: 299021 - DNA, 432 bp, Proteus mirabilis
atgaatatattaatcgttgatgatgagccgcttgctcgtgaaaatttacgttgtttactcgaagaagaaaaagatattcatattattggtgaatgcagtaatgctattgaggcgataggggaaatacatcgtaaaaaacctgatgtggtttttcttgatattcaaatgccacgtattactggcttagaaatggtctcaatgcttgatcctgaacatcgcccttatattgtctttttaacggcatttgaagaatatgctattcaagcattcgaagagcacgcttttgattatttgcttaatccattagagcaagagcgtttagccaaaacattaagtcgtttacgccaaggcaataaacaaaatattgatttattatcgccaccagaagaacgcttaaagtgcattccttgtactaggtatagccgtatttag

SEQ ID NO: 299022 - DNA, 2856 bp, Proteus mirabilis
atgaatggcatcgtcttaactgtcgataccctatcgttattaaccaatagtaaggagcaaaatagtcagctacttgctgatttacaaatgcgtattgaagaaatacgcatgacatttaatagtcgcttgcctttatatatcgtcttaaccaagctagatctattacgtggttttgactcaatgtatcaatcattagatgttcaacaacgtaatgaagtattaggtgtttctttcaaccaaaaagcaaaaagtaattggaaaaaggaattaaatcatttttggtcacaatgggtaggccaaatgaacagcgcattaccagaaatgatgctacaaagagcagaaggtaaccagcgtagtgatctatttagtttcgtgcgccaaattgaagggttacaacattctgtatgcacattaattgatgcattgctcatcaataatgagcaacataatatctgtttaagaggggtttatttaacttctgcattgcaaatcggtcaaatcgatgatgtgtttagccaaacagcatccgaacaatatcatttaccgacagcacctcttactacatggccaattaatgatagccacccttattttactacccaattatttagtcaagtgctatttagtgagcctaatattgcagcagaaaaccattattgggttaaaaaacatcggactcgcctattagtcaccactgctgttagctttgtcggcttaatcgcaatttggaatggttggagccactattacgacaaaaactatcgtgctggagaaaacgttcttaatgaggtaaaagcattccgtgctattgagaacaatgctcagaaagatactgatggtagcctacaattaccggtgctcaatccattacgtgaagcaaccttagcttatggtaatcatcgtgataaaaatgtgctcttttctgatatgggtctttaccaaggtcaaaaagtaggcccacaagttgaacaagtctatttacaactactcaccgatcgctttttacctgcggttatgtctgggttgttaaatgaacttaacagtgccgataaaggaagtgaagataagttagagatattgcgtattatgcgcatgttagaagataaaagtggccgtaataatggcatggtagaagattttatggctgattattggagccaactgttcactggtcaacgtgaaaaacaactgcaactaaaagcccatttgcgctatgcccttgagcacacagattggaaacaagagcgtgaaaaagggtttgtttcagccactaaagcctttatgccttttgctggacctataaaaaatgcacaagcagagttaagtgtattgtcactttatcagcgtgtatatcaagccttacgcttaaaggctaatcaagagctttcagcgcctttaaatttacaacatcaaattggcccaagttttaatacggtctttacggctattgatgatgataaattagaaattccacaattcttaacgcgctcagggttattaaactattttatccgccaaaatgataaattggtcgagctaacattacttgatgcttgggttcttaatctaaccaccaacacacaatatagtgaaagtgatcgtaaagaaattcagcgtcaaatcagtgaacaatatcttagtgactatacggctcaatggcgtaatgccatgagcaatttagaaattcgtcaatttgattcaatacaagatgaaattaccgctcttgagcaaattattagtggtgaacaaccattacgccgagcgttacaagttctacgtgataacacggttattccaactattgatgaaaatttaccacttgatgaacaaaaaacactgatggctgagccatcttaccgtttattaacccgcttagatcgcgaatttactcctcaaactgagatattagtcagtaaccaaggggaaaatttacagaatctgaatcaaaaactaaatgacttacatcgttacctattggggatccaaaactctccagtgccggggaaagcggcgcttaaagcagtttcgatgcgcttaaacgataataatcgcgatgctatttttgagctatcacaaatggcgaaaacattaccagagccgcttaaccgctgggtcgatgagttatccgtacaagcatggaatgtggtccaaaaagaagctattcgttatatggaagttgaatggaatgaaaatgttgtcaaacaatacaatacttatattgccggtcgctatccatttaacccagcagctaaacaagatgttcctttaagtgaatttgaacgtttcttcaaaccaaatggaacattagatagcttctatcaacaaaatctgcgtttattcgttgagaataacttagtcaacgatagtgatagccaatcattgatccgcgctgatgtattagcacaaattgaaatagccaatcgtattagagaaaccttctttaatgcccaaggtaatttagaagcacaatatgctattgagccactgtcattaagtggtaataagcgtcgtagcatcttaaatcttgatggacaattgattgattacgctcatagtcgcagccatgtgacacacttggtatggccaaactcaatgcgttccaatattgaaagtaaactgactttagtgcctctttccggtgataaatcgccacgttcaatcagtttctctgggccatgggcacaaatgcgattagttgataatgcaaaactcatcaatatcaaatctaactcattcgatattcgcttcacaatcgacggtggtgatatgacttatcgagttatagttgatgaatctaataatcctttcttcggtggattattcacaaaattccgtttacctgaaacgctttattaa

SEQ ID NO: 299023 - DNA, 363 bp, Proteus mirabilis
  misc_feature (349)..(358): n is a, c, g, or t
atgttgagtgcgatgaaatcagaaagtttagtgattaaaattgggggatctccacttgatacccctgaatttattgccctgaaaaccgaatttaataaattgagccaccctgctcgaccagaaataagttggacacttattgagtcactttgcttatccctatttaaaaatcatggtatcgacctacaaagcggtgcttactataccattgcaagattacaacagcatggtttaagcggttttactgaaggatgtgagttattagcaaatgttattgtgacttattgggatagcctgtggccggaaaagccaaatcaacgtacagaggtattaaactggtttaataccnnnnnnnnnnaataa

SEQ ID NO: 299024 - DNA, 324 bp, Proteus mirabilis
gtgccatcgcctaataaaaatacgggtaacactgcaacgggtaatgaagcaggaaaaccacaacaaagcagaacgggagcagctctgaaagccgtcgctcaatccgttggtgagggaatactcaataaagcggcaggaggcagaggctccacggcggcaaacattacccgtgcagcgttaaataatgttgcacaaagtcaacagtccacagaaagcccacgtaaacctattgccagtccgtatgcaaaaagcaccggaaataatagtagcggaaccagtaaaacgcctaacaagggaaataatgatacaggggaaaatcaatga

SEQ ID NO: 299025 - DNA, 645 bp, Proteus mirabilis
atgagtgatgataaattcaaaaaatcgtccggctggaacagttttttaggtaaaactaaagaacaagttacgttctaccgatggacgactatcctttgcgctgtcgcggctattatctctatttctggctgtatttatttctcttctcaggtgaaatatgtaccttttgttgttgaagtcaacaaagagtacgcgccgttgcaggttcatcagctagagtctttagggcaaagcaaagatgcggttacacgttcgcaactggcaacgattatcaaaaatatgcgggtagtctatgccggagataaagaagctcaattagatgctattaaatcagtctattatttcatcaaaaccaactcgcaaccttacaaatatgttcaggatatgttctctgttgatgatccgatgaatcagaaatttttaaatcaggtggaaataaaagccattcttcctttaagtaaagatacatggcgggctgaatgggtagaaaagaaagctatgcctgatggtaaaaatgttctgtcacgaaactattcagcggttattcaggttgagtatgcagatactatttctgctgaaatgattatcaataaccctatcgggttatatcttaaaaatatgcaaatcacagaagaatataaatag

SEQ ID NO: 299026 - DNA, 915 bp, Proteus mirabilis
atgaaaaaaacaattttatttacctcattgctgatttcaggcgttgcattagctgatcctgttgtgccttctgtcagtaatatagaaaggattaatacaggtgcaacctctcaaccaacaacgccacagcaggctatgccatcttcaatgctcttaggtggtaaagacttacctttaagccgaaaagagcaacaggcgattaaaacagcaaatcaatgggttaacgggaaacagtatatttccaatggcggtcaggaggtagtgtacacatacggagcaggtcaggcggccattattgccacaccgctaaaactcagtgtttttgagcttgaatccggcgaacgtattgttaatgagggtattcagttaggtgattctgttcgttggcacgctacccccgtaaaacaggggaatcagacgaatgttattataaaaccaactgacacaggactatcaacggatttagttgtcgtcacagaccgccgtacttatcacattaagttaatttcaaacagtaaaaactatactccattagtcaaattcagttatccggaagatgaaaaccaaaaagcgtggaatgcgtactatcaaaattcaggtgcagataatagcagtatctcacttgccggaaataaaacgggacttgcccctataaattttgattataccattaaaggcgataataaaatgaaaccgttgcgggtttacgacaatggtgctcaggtgtttattcaaatggatggaaaactacaggaaactcccgcattatttgttattaatggctcaggaaaacagcaattagttaattatcgttatgtggataatacctttgttgttgaccgcttgtttaataaagctgttctgacacttgatgttggcggcgatcaggaaaaagttaccatcacaaaggggtaa

SEQ ID NO: 299027 - DNA, 450 bp, Proteus mirabilis
atgatgaaatacaaattattctttgcctttgtatgtatggtattagcagggtgtgttagtaagcctaatatctcatcgtatgatggtacacagggaacaatagggaaaaacagcattcaaaaaatgatatatggcgttgatgttattttttctaaacttcactcaagaaatactattttttatattgaggattcacactcggatatagcaaatgcttttattgaaaatataaagcgaaaaggttttattgttattgttacaaataaagaagataaaataaactataaaaaaataaatatggggataatttctaagagaataacgccagagatttattctctatctattattacggataaatacagaattaatcaaccatacgatttgcaattaaataaaataggtgaagtttccattcaaaataaaaacgaggtagttaatcatggctaa

SEQ ID NO: 299028 - DNA, 1215 bp, Proteus mirabilis
atggctaacccctcacaaaataagaaactcactaaaaagcaaaagctaataatgacaatagggttctttattgttgtcattcttttggctgtttttctttccattatgggcttaggtaataataatgatgcccaaacgcaaaattatgaagaggcaaaagataaatcaggtgatcctgctgacccatcctatgaggctaatctgtatcgttcccgattcagagataatactgacttacaaacaccccctgcaacaccagataaagccccatcgacaacaggaacaacacaaacagcaaatgtgagtcagccacaatctaataacacacagactcaatcacaggaacgtgatcaatttgcggaaaatgttttaaggatgaagcaacaagcctatatggaggcactaaacagcaaaacaacggtgcgggttgatgcgctcagtgataataacagtccggcgcgtggtagttcagccccagactatgcctcaattgcagagcaactcgccgccgcctcgaaagaggaaaacggagaattgtatgcaaacatgcagcaaaacaaagaaaaatttgtgaatacagaacgtacctttggctactcaactcaaacaagagaagccgcgttgtctcggactgaaatcaaggccggaatgattttaccggcggtacttgttacagaaatcaattctgatttaccaggattaattaccgcacagataaccgaagatgtgcgcgacagtttaacaggcagaaaaatactgatcccaagaggttcaaaactcatcggctcttatgattcacaagtagctatggggcaagagcgcgtgttagtcgtctggaacagagtccagttcccagacacttcaacacttgcccttggtaatatggggggaacagatggcatggggcaatccggctttaacgatgaggttaacaatcattatttacgcatctttggtaatgcgacgttacttgcgattattggtgcagggttccagctttctcaaccagacaataatagtaataacggtaacaatggtatgacggcaagagagcagatgattgctgaaataggtagacagtggtctaccgttggtacagaagtcgtgcgccgaaatctgaatattcagccaacgttacacatccgagcagggtataaatttaatgtcttggtaaataaagacatcatattgcctgaataccagccaaatcattaa

SEQ ID NO: 299029 - DNA, 489 bp, Proteus mirabilis
atggctagcagaggcgtaaataaagtcattcttattggtaatttagggcaagatcctgaaatccgctatatgcccaatggtggtgcggtagcgaatctatcccttgcaacgtctgaaacgtggcgggacaagcaaactaacgagatgcgggaaaaaaccgaatggcatcgagtggtgattttcggcaaactagccgagattgccggagaatacctgaaaaaagggtcacaagtgtatattgagggttctttgcaaacccgtaaatggcaagatcaaagcggtcaagaccgttattcaacagagattgttgttaatatcggcgggtcaatgcaaatgttaggggggcgaaatggggatgctccagcaacagatcaaagtggacatggacaagctcaagaatccccaaaattcagcggtggcggtgctcctgcgccagctaaacagaccaatgaacccccacttgatttttctgatgatatcccgttctga

SEQ ID NO: 299030 - DNA, 348 bp, Proteus mirabilis
atgaacataattaacagatttcttagttcagcgctaaacgatttatacattatcatttctagtttattagaagggttttacaaaggaaccttattttatgcggcttcactgtttattctgtttgtttcatttgtagccgataacccgactgaatttttttcttatttaactcacaatacagattcggataaacttttatttggtggaacacttgaaataataaaatactattcattttgtattattgctttcagtggtattttttttttaaagaatactttaaacagaggtaaacacgttaataaaaattctttttcacatggtgcaggagcgagtcataaaaattaa

SEQ ID NO: 299031 - DNA, 237 bp, Proteus mirabilis; identical to SEQ ID NO: 290904

SEQ ID NO: 299032 - DNA, 315 bp, Proteus mirabilis; identical to SEQ ID NO: 290903

SEQ ID NO: 299033 - DNA, 927 bp, Proteus mirabilis
atgtgctctttctgcgcaatatatgcgcagaatacagtgaccgatagtcataataacgcacaagaacagcgttcacgcggtattgagtggcgtaatagttatgtcacaaatgctaatcctgtgtactccgcgcctaaagaatgtgccagtccgccacgtatcatcaccgctttacgtaaggcggctttgacgtccaacccagccagacaccctatatggcgtacagcggatcgctttcatgccattaatcatcaacggttgcctaaagagcgtgcaatgaatgagcaccgcgcccgtgcggtaaatgccatttgtgcgtgtattgctgaccgtctcaatatcgttaccggcaaagtgtacatgacgctggcgcaaatttctgatagctgcggtctgactacctacaacaaagataaaaccccttgttacagtcgcgccagtcgcgccattaacgaacatcttgaagctatcggcgcaatccattgtgatcgcgtatgggacgagacaaccggttcatggattcctaacctgatatgggtatcagaactgtttttcacgttgataggctacgagtacgggaaatatgaggcggcacaacagcaacaactggcatgggaaaacaagggactgaaagaaaaaggggaaccggctatttcattaaccgaagcccgcagacgggcaaaggttaagcacattcagaccgcatttgaagtccgagccaaaaaacgcgtatttaaaacacagttacgacaggccagaaaactggccgctatggaaaaacagaaagcgcaggctaaaatccttaacgatctcgtcaaactctactcacaggacgaactggccgctatggggcacgttgaactgaaaagacaggttgaacatcgctatgcggccatgagaaaactggctaccgccccgccacattaa

SEQ ID NO: 299034 - DNA, 459 bp, Proteus mirabilis
atgcttgaacataaattcaaaacagtcagagaacttaaagatgcgcttaatgaatgccctgatgatgccgaaattgatataagtgagctacctaataacatatcaagacacggtttaaccacggtttttgatggtaaaaaagtcttaatttgtgaatatcacgattatgaaattattaacaaatatcgtaatatattcagtgagttatcaaaaacagaacaatctcgttgcgggtgtgtctatgaaatgtaccaacgcaacttgagcacagcaattgatggttatttaagtgaattaactcaagaggataaaataaaagtaatccaattggcaagagctgaatttgattatatatcaccagaggaaataaccgaagctattcgacaaaatcaagaagatggttattgttcacacggtttagatcctaattgctgccctttaggttgtggtgatatttaa

SEQ ID NO: 299035 - DNA, 279 bp, Proteus mirabilis
atggatataaataaattaaaaaaacacgcgccaataattgaacagtcagaaagcaagacggttaatgattttatcgcccaaggggataaaaagccgacaaaaaaaacagaatctatcatggtaggttttcgtatggatgaagatactttagaacgtttagaccggctgactaacggactagggaagaaacgtattaacattttacgggcttcgctgcttgcctttgaatcactatcacctagcgataaggctaagtttttaatagagataatgaggtaa

SEQ ID NO: 299036 - DNA, 663 bp, Proteus mirabilis
atgattatagtttttggctcagataaaggtggagtaggaaaaaccacaattacggctaactcagcagtaatgttgcaacaaaaaacggcgtctgtagcattagtgcgaacagacaaaaacgaagatttgaacacatggcaaagtttacgacgagaacagcctgttcctgatatcccaattatgacttgttacggaagcaatacacataaagaaataaacaaattgcacggcgttacggatgtgatattggtagacactgccggacatgatagcgtcgagcttcgtagtgcattacttgttgcagatgtatttatagctcctgtaagcccaacatctatgttagaagttgtcacattgaataaattatcatccattgtgaacgaagctaaaaaggaaaatacaaagctaaaagcctttgctttacttaatcgctgccctacttcaccatttaataatgatgcagtaaaaatcacacaatatcttaatgatgatcccctgcttctatccccattcaaaacccgtatatcaaacttaaaggcttttgaaaaagccataaatgaggggttgggagtacatgagcttaaaggtaaaaatgtaggatcagccaaagcacaattagagcttttattcgctgaactcattgattctgttcaggatagctaa

SEQ ID NO: 299037 - DNA, 348 bp, Proteus mirabilis
atgaaagaatcaaaagattttattcaggttgatggggtgaaaatctctattggtgatatttttcatacctgttggggttacgaacagacaaacgtggagttttaccaggtaattggacttcgcggaacaaaaacagttgagctacgcgagattgcaaggcgtatcgttgaagaaaccagttggtgcagtgctgatgtgtgtgcagtgaaagattcgtttatagatgatgaaattttcaagcgtcgcgtcagagttcacggtagccatgtagcggtacgattcaatgatgtaaccgatgcttatcgtgcagaaccggataaacgtttacattgctcatggggatactga

SEQ ID NO: 299038 - DNA, 147 bp, Proteus mirabilis
atgaccaagtatgcgctaatcgcgctgattgccgtctgtgtgacggtgctgtgtttatcgttgatcactcgcgaccggctgtgttcggtcagtatgaaaaacggcaatacagtagttacggcgaccttagattacgaagttaagtag

SEQ ID NO: 299039 - DNA, 354 bp, Proteus mirabilis
atgactatgtatcaggatcttccctctgtactgaatctgattaactgtgaatcaccatttccatgtaatcaggcttcttgtgctcagggtatcgcggacaaaaactcgtttgtcgaatttattgttacgcataaatcagcaggacatttgcatgaatggaatctgtcttacgttgacagattcaatcgtttgattaaggttttttaccacgatcatatgatattacatgcacgtattaacatgaaaacaggtattgtcaatctcattgcctatactgtgtttactgacaagatagattcgcttgaagctgaatatcttgtcgaacaaatacgccaacacttagatcagttctaa

SEQ ID NO: 299040 - DNA, 582 bp, Proteus mirabilis
atggaacggacaacaattaatttcaggattaatgatgatgcgttactagcgcaatttaatcacgcaatggctaaagaacagaaaaaatataaattcgccactgacggaattagaaccataaaagatctggagattatttttactgcctcaaaaataaaaaatttcagagataacgaacattacctcatagcgtcattagcacaaaaacaatcaccattaatactaaatgtgttgaatgaactaaaagataaatttgaaaagatttatcaggaagaaagaaacattacaggacaaataatatttttcaaaaagatattagaacaagttgaatatcacgataaaacacaagatattgatgtattaatttcacctcatgttatgttatttattaatattacagcgttggctgacaatatcattaaacaattaagagtccagtatttgaatggctctatagatgaaaccaccttactgataaaaagaaataaaatactgaaacaatacgccgctttacgtgaaaaattgtatgaaatgaagcaggaaaggaaaaaattgtttaaaaaagtgaaagataacttataa

SEQ ID NO: 299041 - DNA, 453 bp, Proteus mirabilis
atgttcagattagccacaccagaggattacgaatatttaccggatatcggattatatgaactgacgtttgataaacgtccggtgcagggcgttcgatgtgaagatccaaaacagggagccgcagattacaataatttcagaaaaaaattcaaggcagttattcacaaagaaaaacaacgccggaaaaatttttatcagatcactgagatttcttggaatgccgtttttgattgggcgattgagcggggaacacaggaagaatgtcgtttattacaggaaatgtatcatgccgaaaataacaaaaaatatcagcaactactccttgaattaagcaaacactacgggttcatcaaagaatcaaatttactcattccattgggtttgatactttgcaaccaacggatcgcagatacagaaaaattaatcgctaacagcattaaggcaggtgtctga

SEQ ID NO: 299042 - DNA, 567 bp, Proteus mirabilis
atgaagatattgatttttttagctttgataataatgtcaaacacatcattatcaaaatcactttttatcggtgattctctgacttacagtctggcatcaagtttttcaaaaattgaacctgtagatgcgaaatttttagaaagtacaggacttaaatctgataacattcttagctggactgactacatagaaacaatggatttaagcaactatgacagaatatatattgtgttaggtatcaacgatatgataaacgaaaatgataaaatattttatcaagaccgtgtgaatacctttataatgtcactattaaataaaaataaaaatattatctggttacttcctccggtacttaaaaacgtaaagcatgagtctatgttgctttacacaaggacaatcatcaaagctgcatgtattgagcacagtgtagatttttttgatatgcgtgatgtactgggttataactttatgcagacagtgaatgacagaaacatcagaacagatgatggcattcacattaccccgtatggtgcagacagggtgatcactaacttgctattgaggtga

SEQ ID NO: 299043 - DNA, 231 bp, Proteus mirabilis
atggaaaatgtgaacaaaccaaataatgatattgaagttaagatagtaaacttaagaagtaaactcactaaattagacgaacaaagagaaaggttaatcaccagaattgataaacttgagttgcagatgaacgctgaaaaagcaaaaaaaattctcgatgataagcgacaggaacttgagaatttactcggaaaggaaaatttagatctgctttttggcagtaaaaagtag

SEQ ID NO: 299044 - DNA, 2115 bp, Proteus mirabilis
atggatcaggggctttatggattcaggcagtttggttatgtgattgataacttttcatctgtatttttgtatcatcactggatagtgctttttgtcatttgggctttctttgttttgatggttagtatcattttcagaagtttaaatcatgttattttcatcggaatgtctgatgatgacagagaagattcaaggaatatagaggttaatggtaagcgtcaaaaacgtggcgtgtttgcatctatgcaatatgacaaaccttacttttcgttattgcttttaaggcaggcgggtttttttattaaaatactgctgatttttattatagcttttatgactgcattttttattgttactctgatttctgctttttttgatattgattatgtgattacaccttacaaagcacaatattatcttttaactaaaactaatatgtatggattgtcaattattttagttggttcgcttgttggttatattgttagtgcattcttataccattcatttattaaaccgtttttcggagagatagatttaatttttaatgaagaagcgatttcacggcgagaatcttcaaaaatgagagatgataaactcaccgatattcgaaattttaattttaaagacagtattaattataatcctgttgattacttttatgaggctaaaagtaaaaaaagtattttcttggggatcgacgaaaacaataagccaatattaatccctaagttaaaatgggatgaaacaaatattcaggtgattggtaaaatggggagtggtaagggggttctttctaccgttgcgcttgttcagtgtgtggagttatataacgatattaatattatttttgaccctaaaaatgatgagtgggcataccatgtatttaagcatttctttaaagatgatttactctatattgatttaaatcgggggcagttgccacaggttaatccatttaaaggggctaattctgatgaaattaacgaattgttagttgccagttttggattgggtgaaaaaggaacggatgccgatttctacaagactggtgacagaaaggtatgccgtgatttatcacagaattttacgcaaggtacagatttgcgcggactgttaagcatcgctttaaatgaaaatttccgaaaatcatatgaccggactggcgaaaacttttttaatcttcttgaagaattgggacaattagattctatcagtgctcatgatggcattgatttagtcgatatactgaataaccaaaataaaaagattatctatatcacaggttcactgcgtgatgaggttgttgttaaggcacaaaaaatgctctttttacggatggtgcaaatccttgaaaaaagaaacagaaataaagatgttacccacgtaaatattatgcttgatgaaattaagtatcttatttccaaaagtgctcttgaagcaatggggacgctcagagataagaaggccaatattctttttacccatcaatccagaggtgatttagaggtttccaccaaagaaattgacgggcaaactgcaaggaaagtgattgaagatagtgcagggctacgctggatttaccggacagataattatgagagtgcaaaatgggcgagtgattttacagcgggtggtctggtagatgtagagcgtcgtaatctttctgttaatcagtctaatgttgaaatggcttcaaaagaagcgacaatatttaagcagaaagctaattatattgatatttcagttattcaaaatcttccgtcacgttgcgggttaatagtgggggacggacaactggctaggctggcgtacagcagtccgatccttgtcgaaaaaagtgataaatgcgttacttcatttgaaacacaagcgatttcttcccgtgagtttttagccagtatcagagaaacaaatgataaaccgaaaactgcaagcgataaaaaagtgaaaaataacagaaatacaaaacctgttgataatccgcaatccggcacgatggttaaccgtgaacgagtaaacagtgctgtagatgcggacagggtagattctgttatggctgaattaaccatgccagatgataatcacggagataattatcatgagcatagctga

SEQ ID NO: 299045 - DNA, 1005 bp, Proteus mirabilis
atgagcatagctgattacggttcattgagtaatcaaaagcgactggaacaacgccaatttaatcaacataagatattaagttttttggcgcaggaacgcagcgttactattgacagtctgagccgtttgtttgatttttccgcaaaccaaaaaatctatttgttacttaaaaacctgataaataatgaattagttacctatttcgaggatggatttcttggcagaaccaaacggttttatcatctgacagcgcaaggtcaggcttttgctgaacaagaacttggtattacaccacggttcaacggattaagtcgccgtgctcatgccccgtcagccctgctgcatacactggaaatgcagaactacacggcgttgctgatgaaagcaggggcgaaagtccgctatctgcatctgccggataaaattatggattactggtacggtggcactgcggcagaagtcgaacgcacgtttaaaagccaaaaacgttaccgtgatatttttcggaactactgtctgcggatgcgccgtaatgaccccattattaataccgtgatgtatatcctgcctgattcagctatgcgggataaagcggcagccctgttttacagttttgatgaactgatgattgaaggcattctgactgatgtcagaacgtatacagggcgttttctgtttgccacccgagccgaatatgaagcctatctgacggcgtttccgcaatccggtgtcagagtcgagatgaagctgccaaatgaggtgtggcaacgctggcagcgacacgcagcacaggctcaactgacaccggaagcgtggttaaccggtattctgaacagggaagtgccagttgtgatcaatgagccgatgccgtattcaggtgacggggtgctgattaacctgactccgacaaaggatgattacaaattctggctggcgaatgctgatgcctgtcataccagcctttcagcatggtgtgcagggaagcctgttcacttaaatttatag

SEQ ID NO: 299046 - DNA, 246 bp, Proteus mirabilis
atgatccccgaaagactaaaaacagccagaaaaaaaagacattacacacaggagctgctggccataaaagcaggcatagatgaaagcacagcgagttcacgaatcagccagtatgaaaacggctacagtgtcccctcttatcagctaatgcaaaaaatagcgtctatattacagatcccaacctgttacttttattgcgacgatgaagaattggctgattacctgattaactattatcgccggtaa

SEQ ID NO: 299047 - DNA, 321 bp, Proteus mirabilis
atgaaaaaaaaattttttgagtacatagaagaaacaaaaaagctaaccatttgtgatagttaccgaaaaatagcccaatatctggacgctccaccgataaaaatttcacaatggaaacagggaaaaggctatgtctctcccgcagaatgcgcacacctcgcaagattactggggatcacaacagaagaaattgcctatgtaatcaaggcagaaagagaagaaatccctgaaaaaaaagaatactggtacaaagaggctgagattttttcacgcccgataaacccccctgaatcattaaaactgaaaaacaagaaatcttaa

SEQ ID NO: 299048 - DNA, 579 bp, Proteus mirabilis
atgttaaccctatactacttttcacgcagcttatgggtacggattgtgatcacaaacaatacactgaaacgtaagtttttaaatacccttctctttttcggcgttttgtccggttgcgttatgctttatcagcattatttcgttgtcaattttactaaaagtatgccgttaggagtgtacttcaaaagttatccagcatcttatacaaaaaatgatacggttttggtttgtctcgatgatgagatagcaagatggtctgttgatcatcacatcattgctgatggtttaggttgccggcattcagcaccgttactcaaaaaaatcgtagcaactgagggtgacagggtaactgtgacccataaaggcattgttgttaatgatattttagtcccgaataccgcgccaattgccaggaaaattaagcagtggaacattattgatagggaaatgctattaaaatcaacggagtatatcgttgtcgccaatcaaaataatctgtcttttgacagtcgttattttggtgtagtaacagaccggaatattaccgcaaaaatcagacctttttatttatttgactga

SEQ ID NO: 299049 - DNA, 549 bp, Proteus mirabilis
ttgattgatatgccgagtgtgtctgcatgtgcgccggagatagccgcagatacgttacagaaaattattatggttgaaagtggcggtaatccttttgccgttaatgtcaataagctgtccgccggaagccagcctaaaccgaaaaacgtggctgatgccgttgcagcgacacaatactggatagcaaaaggctattctgttgatgtgggtttaatgcaggtaaatagccgcaattttaaaatattgggtattactgatactgaattaagctctgtttttgaaccctgcaataatgtgaagtacggagccacaattttactttctgcatggaacatgacttcatccaaagaacaccagaacgaccggctgatgaaatcattgagtatttacaatacgggtaatgacgttaacggatttaaaaatggttacgtcagtaagtatgtgggaagaaacatttccggttcactggcaaaaacggttgtcactccttataacgcagattccagtgtagggtttaatgcagactctttttacggggatgatttatga

SEQ ID NO: 299050 - DNA, 945 bp, Proteus mirabilis
atgaatacgggtgatgataaaaaaatcagtgaccttgccaaaatgctttggcgggagttcgatattattgcgccttatctcagggatgaaaccactattgaaatcatgctcaatcctgacggtaatatatgggttgaacagatcggtaagccaatgttcagtattggcgaaatgtcgttatataacgctcaatcattatttgccaccattgcacacagcatggggaaaacaatagataatcgccacccttgccttgagggaacgttgcttattaatgatgcgcgttttgaggggttctatccccccgtttcaagtgcgcccacctttgctatccgtaaaaaacctaaaaaaatattctctcttgatgattttaaattaaccgaaaatcagaaatcgacgatggttacatgggtgaaagaacgtaaaaatattttagtcgtcggcggaaccagtagcggtaaaacatctttttctaatgcctttattgacctgatggcacaatttacacctgatgatcgtatcgtcattcttgaaacgctggacgaaatccagtgccgcgcaaaaaattattcaaaactgattgaaacaatggatgtgacgatgaatcagttactgcgcggtgtgatgcgttaccgccctgaccgtattattgttggtgaagttgttgatgcagcggcgttatctatgctgaaagcatggaatacagggcatgacggagggttatgtaccattcatgccgacagtgcccttgaggggtttgaccgcctttacgatctgattgaagaaagcgggattaatatgtcagaaagggtgaaccggctgattggacgggcgattgacggagttgttttcctgaaacgggaacaaggtgttcgggtagtcaaagaagtcgcaaatgtgacagaatttaacggcagtgaatttgtgcttgattatgttaattaa

SEQ ID NO: 299051 - DNA, 360 bp, Proteus mirabilis
atgttagagaaatattactatagccagtcgagactgacccagcaactgatagtgttaggtgcattgctactggtctgtatgctgttaagcagtcatgcaatggcaggtcagacgcaaggtttaccttgggaaagtccgctggagaaaatcaaaaacagcataaccggccccgtagcgggagcgatttcctttctcgggatttgcgttgcgggaatgatgctgatttggggcggtgaaatgtctgatttcaccaagcgtatcgtttatgtggttctggttatctctataattttaggggcaagtgtggttatcaacatgtggcagggtaacggtgcattgatccctctgtctatggtgtaa

SEQ ID NO: 299052 - DNA, 321 bp, Proteus mirabilis
atgaaaacacaagagccgctggttagttttattattcaccgctcgttaaatcgtcctgatttagtctttgggtgtgaacgtaaaccgttatattgcttgggcttaattgctgccgttatgattttttcttcttataacctctatattgcgggggcgggtcttgttgttttctgcgtgggggtttacctgttgcgacgtatggcgaaagccgatcctttcatgtcgctgatttttcagcgggctatccgatatcgttattattaccctgcaaggagcacaccgtttgcaactggtgcaaaattcagaaggaaaaaacaatga

SEQ ID NO: 299053 - DNA, 759 bp, Proteus mirabilis; identical to SEQ ID NO: 290907

SEQ ID NO: 299054 - DNA, 243 bp, Proteus mirabilis
atgttatctacattatcgtcaaagttagctgtagtgttctttttaacaactttagtgtctggtttttatattgttaaatttcattatgaattgacagaaatatattcattgcataatgaacaagaaaagactctaaaccaatgtttagaaataacaaagaaaataaattcaacacctacggtgaatttgccagaaaaaaacacttcagcaatagatatgcttaaacgagccagagaacaataa

SEQ ID NO: 299055 - DNA, 1104 bp, Proteus mirabilis
atgaataatactatccatacagcaacagagtttattgagcaattattacgtcacagccttgctcaacgtgtttctgatcttcatttagagccacaacaaaatagcctgagaattcgcgcgagaattgataatcatctagtgttgttttctccccctgacaatcaattagctaacgagatcctgacacgtttaaaaatcctcgcgaatattaatattgccgaaaaacgcctaccacaagatggtcaatttaattggtcttaccagaaaaacaattattcaatacgtgttgcgacacttcctactttatatggagaaaaaatagttttacggctcatgaataatctgcaacagccacaattagcacagttaggttttcaaacaattcacctaacactattaaaaaaatatcttactcaacctcagggaatgattttagtcaccggccccacagggagtggtaaaactttaacactctatagttgtttacaatatttaaataaagataatcgtaatattaatagtattgaagatcctattgagttacctctccatggcattaatcaaacacaaataacagaaaaagctggtattacttttgcaacaatattacgggcgctattacgccaagatcccgatgttattatgataggtgaaatacgtgatcaacaaacagcagaaatagcaataaaagcggcacaaacaggccacctagttttatcaacactgcatactaactctacccaagcaacactcgcccgtttggctaatttaggcatcgcaaaagatttaatcgactcttgtgtaaaattaattatttctcaacgtttagttcgatgcttatgtagcaactgtaaatacccatcacctgaacagaaaaatttcattattaataatcaacaaattatattacccaattggcaagcaacaggttgtcaattttgttattccggctacaaaggcagaacagctatttatgattgttttgaacttgccaagcaatcactcccctcaccttacgcactatttaactcaggtattgaactgataaaaaaggggatcacgtctttagatgaagtttatcaagtagtcggagatattgaatga

SEQ ID NO: 299056 - DNA, 303 bp, Proteus mirabilis
  misc_feature (8)..(17): n is a, c, g, or t
ttgatttnnnnnnnnnntgatttacctgaacacttggtcatcgattttagccatggtaattgtgaaaaaattcatcgtcgccaacttgaagttgcacgcaatgtcgctcaacaaattacggatggttcacaagctattgttggtgttatggcagaaagctttttacaagagggatcacagaaagtcacagcagataaggggctgacctatggacaatctatcactgatccttgtctcagttgggaagataccgaacaattactggaattattagctcaagcggttgaaagtcgatttaaataa

SEQ ID NO: 299057 - DNA, 177 bp, Proteus mirabilis
atggcatcgattttttcattaatggcttctaatgaacgtgtacccgtaatagtttcaacaggtacacctgctttttcgatacgacgtaatgcaaaagaagggcgagctaattcgctagcaataatcagcgtcggtttaaccgaaagaataccttcaggattgagcatgcgcatataa

SEQ ID NO: 299058 - DNA, 708 bp, Proteus mirabilis
gtgaccacaatcacttttacgttttgtttgttaacggataaactgccaaacttactcgatttccaaagtaagcttattcaaaaaagcgaaacgctggccgattggcaaacagaaacggatgcaatttcactgttagaagtggttaaaaatgctaagccaaccattctgattggcgtttctggtcaagcaggacttttcactgaagagattattcgtgaaatgcataagcattgtgaacgtcctaccgtgatgcctctttcgaacccaacgtctcgtgttgaagcgcgtcctgaagatattatcaattggactgatggacaagctcttgttgctacaggaagtccatttgccccagtcacctataaagagaaagtgtatcctattgcacaatgcaataactcatacatcttcccaggtattggccttggcgttattgcaagtggtgcaaagcgtgttactgatgccatgttaatggttgcaagccgtgcgttagccgattgctcgcctatggcaaaagaaggcgatggcccactattacctttattagccgatattcaacaagtttcacgttatattgctaaacaagttgccaaagaagcacaggtgcaaggtgttgcaacggtcacgtctgattctgctttagaagaagcgattgaacgtaactattgggagcctgaataccgtatttacaagagaacgtcattctaa

SEQ ID NO: 299059 - DNA, 1170 bp, Proteus mirabilis
atgaatacctcaacccacccaagccattcagcacaagcctttcatatcgcttttagtggtttccttgctttagttgttgctatggggatagggcgttttacttttacgcctcaagtaccgctaatgattgcggacacacaactgacattaaccagtgccagtattgttgctgcatttaattatctaggatatttagctggttcatatgatgcgatgaaagcaactaaaggtgtgggctatcggctttgggggggattatggggagcggtgatcattacactgcttagtgcggtacttaatgatgctttaactcatagtattgcccgtttttttattggttgggcaagcggttggacattagtgctcgttgcttcgtgggcaaatgaagtattagcccgtttaaatcgcccggcattaagtgtggcagtctatgcaggaacaggggcggggatctttattagtggccttcttgcggtattcattctcaagtggcagatgagtgcgacaacaggttggttgatttacggtgtgttggcatttatttgtgcaatttatgtgagctatcatttacccaaaccttggtcaattaatcgtgagcaagtcaaagtagagccacttatcttaacgccggcgatgaaaaaattgatttggggttatacctttgcgggctttggttatattttacctgcgacctttttatctcaaatggcgacagaacgttttcccggtagcttagttgctcaatttgtctggcctatttttggtgcttccgcagctttatgtattgggatcgcgatactgacacgtaatgtccttaatacacaattacgattggcgataacactatggttgcaagcactggggatcatcattgccgaatggctacccacaattacaggtcttgctattggcgcatttttagtggggggagggttaatgtgtgcggtgcaattggcatttttacgtggtaaagagttggcacctgatcatgctcgttatatggcaggattattaacaacattttatgctattggacagctagttgggcctctggtttccttcctttcaacggcgttaacgggaagactagagccggcattatatgtcgcctttgtgatattgatcatcggcggtattttggtttgtatgaaagaaaacaataaagggtaa

SEQ ID NO: 299060 - DNA, 1179 bp, Proteus mirabilis; identical to SEQ ID NO: 296744

SEQ ID NO: 299061 - DNA, 1557 bp, Proteus mirabilis
atggatgtgattggcagacaacacttacggcaaatgtgggatgatttagctgaagtttatgataaaaaaacagcgctaatttttgaatctgcacaagggaaagtcagacaatttagctacagtgaattaaatgaagagatcaacagagccgcaaatctttttcatgcctgtggtataaaaaaaggcgaccatgttgccttacatcttgataactgcccagaatttttcttttgctggtttggactggcaaaaattggcgctattatggtgcccattaatgcccgctttatgtatgaagagagtgcttggatcattaaccattgccaagcacactttgtggtaacaagtgataatttctctccaatttaccaaccgatgttgcacgataagcactctcctttaacgcaactgtttttaataacagaaaacagcctccctactgaacaaggagttgttgattttttaagtgaaaaagccaagcaacccgttacgcttaatcatcacaccccattaagtgtggatgacacggctgaaatcctttttacctcaggtactacttcacaacccaaaggggtggttattacacattataatttacgttttgctggctactactcctcatggcagaacgccttacgggaagatgatatctatcttacagttatgcctgcttttcatatcgattgtcagtgtaccgcatcacttcctgctttttctgtcggtgccacatttgtactactggaaaaatacagtgcgagagccttctggaagcaaattctcaaataccaagcaacggtaacagaatgcatacctatgatgatgcgcaccttaatggcacaaccagtctcaccagatgaaaagcaacataaactgcgcgaagtgatgttttacctcaatcttgcagatgaagagaaagatgcctttattgaacgctttaatgtgcgattactcacctcttacggcatgacagaaaccattgttggcttaatcggtgacagacctggcgataaacgccgctggccatctattggtagaccgggattttgttatcaagcgcaaattcgcgacaaacaaaatcagcaagttcctaacggtgtagtcggtgagatctgcgtcaaaggtgaaccgggaaaaaccttatttaaagagtattacaatcgccccgatgcaacagaaaaagcgctagagcctgatggttggttacacacaggtgactatggttatcgagatgacgaaggctttttctattttgttgatcgcagttgcaacatgatcaaacgcggtggtgaaaacgtctcttgtattgaaattgaaaatatcatcgcatcacatcctaaaatccaagatgtagcagtaattggtgtacctgatgatattcgcgatgaagccattaaagcttttgtggtactggttgacggtgaaacgttaagtgaagaagcctttttcgccttttgtgaacagaatatggcgaaatttaaagtgccttccgccgttgagtttaaacaggggttaccacgtaattgctcaggcaaagtgatcaaaaagcatttgaaatag

SEQ ID NO: 299062 - DNA, 1377 bp, Proteus mirabilis
gtgcgggaagagggggaggatgaaggtaacaaaggctcgctggcgattgtgcgcatcgagaacgccctctacggggcttttgtggtgatcctcttttgctgtgtgccgttgatggaggtgagtgtcagcacgctgcaatttgataccagccgggccaaaacctgcggcagctggacaccggtgaagccggaggagtccggttacagcggtgtggtgtcatcactggataatcagacagccaaaatcccgctgtggtggatgctggtgcataagctgtcaaaaggggtgacacaggcggcggtggccagcattccgtgccggccggatttgcggcaggtgcgttttgaggtgcagcacagcaatatccgaaatccggcactggccgccgcactccaggattttacggatgactgttactcacgtgcgctgtatgactggaaagcgaaagatcagggaaaaacgcaggatgagaaaacgttgcaggatattacttggattgggtcggtgacgtttatgaaaggggaatatcatcagatccagtcccggacaccacgggcgggcttttcctgggatgccggccgggatgacgggtatgcgaatgtcaacggtaacggttacccgacctgctatcagtggtggaatgatgcaagtgcagggttactgaagctcgtcaaagagcaggcggatgaagggatgtggttacgtgcccgagctgcgatgaagctgattaataaagactcgaaagagtttgaggaggccatcgtccgccggctggtgagtccggctaacctggatgtctccggtggtcaggtataccggggctacggggggaatgcggatatgacggtgatgaatgatctggcccggatgggcggtgtagtcggtacttcagtggcttcactgggggcattccctgcctttgatacgatgcgccagtccttaccgatggtgcaggggctgatgttaatggcggtgtatattatgatcccgatggtgctgatgttttcggcgtatgaatttaagacggcgataacggtgacgtttgtgatatttgcgctgaattttctgacgttctggtgggagctggcacgctggatagacagctggatgatggaggcactgtataattccgatacgcacagccagtggaatatgaacgggatccagaacacgtctgatgatgtcattatgaacctggtgatgggaacgatgtttttggtgttgccggcgttgtggatggctggattgggttgggctggttcaaaagctggggtaggtatatcgagtatgatcaatttaggtgggcaatctgcatatgattctggaggtaagggagggaaaatggttgagcaagcagtaaccaaaaaaattacataa

SEQ ID NO: 299063 - DNA, 399 bp, Proteus mirabilis; identical to SEQ ID NO: 27145

SEQ ID NO: 299064 - DNA, 255 bp, Proteus mirabilis; identical to SEQ ID NO: 28990

SEQ ID NO: 299065 - DNA, 1746 bp, Proteus mirabilis; identical to SEQ ID NO: 27199

SEQ ID NO: 299066 - DNA, 10323 bp, Proteus mirabilis; identical to SEQ ID NO: 27198

SEQ ID NO: 299067 - DNA, 381 bp, Proteus mirabilis; identical to SEQ ID NO: 27197

SEQ ID NO: 299068 - DNA, 561 bp, Proteus mirabilis; identical to SEQ ID NO: 27196

SEQ ID NO: 299069 - DNA, 405 bp, Proteus mirabilis; identical to SEQ ID NO: 28994

SEQ ID NO: 299070 - DNA, 474 bp, Proteus mirabilis; identical to SEQ ID NO: 27210

SEQ ID NO: 299071 - DNA, 882 bp, Proteus mirabilis; identical to SEQ ID NO: 27211

SEQ ID NO: 299072 - DNA, 273 bp, Proteus mirabilis; identical to SEQ ID NO: 27212

SEQ ID NO: 299073 - DNA, 396 bp, Proteus mirabilis; identical to SEQ ID NO: 84814

SEQ ID NO: 299074 - DNA, 336 bp, Proteus mirabilis; identical to SEQ ID NO: 277230

SEQ ID NO: 299075 - DNA, 489 bp, Proteus mirabilis; identical to SEQ ID NO: 84816

SEQ ID NO: 299076 - DNA, 333 bp, Proteus mirabilis
ttgtttctaataaatcatgagcccaaagataacatcaatacacatttttctgcctggaataatgtaattgaggttaatacagacagcattcaggatatgatttctgcaacaagttgtatggatcttgttgtttcggctgacagtgctccgattcatttaagttctgcattaaacatacccgttgttgctttatttgaaaatagaccagagaagtatcttcgttggtacccgataggtgttagatataaacgactaaaaagcacaaaaattgttaatgacattgtgcctgagaaagtagctgaagcgagaaattatttgttggttgatggttaa

SEQ ID NO: 299077 - DNA, 618 bp, Proteus mirabilis; identical to SEQ ID NO: 297148

SEQ ID NO: 299078 - DNA, 2445 bp, Proteus mirabilis; identical to SEQ ID NO: 297149

SEQ ID NO: 299079 - DNA, 1245 bp, Proteus mirabilis; identical to SEQ ID NO: 297150

SEQ ID NO: 299080 - DNA, 213 bp, Proteus mirabilis
ttgtgtaatcaaaaacaagtgaagttatccaagctatttcgtggcggtcgcttcgttggtcatgcattaagtgttgatggtgagttgttaagtaatcaaaagttagttgttcttccatccgctgatggattatgtaaacaagttgatatcacagtcacactgacatgcactaatgacatgatcatgaatgcacccgatatccatttgaaataa

SEQ ID NO: 299081 - DNA, 306 bp, Proteus mirabilis
atgaatacattgaattacatcatcagtaaaaaaataaaacaaaaaagaaaagaattaggggtgacaggcattgaaatagcccattcattggaaataagtcaacagcactattcacgtatagagaatggacataccaaaataacagtagaacatttattctctatcgcgtttattttaggtgtcaaacctaaagaactattgcctaattataaattttcaaatgaaaaagaaatgattaaagcaaaacaatcattatcagcagaaagcattatgccaataaagaaaagcgacatgtatcccacataa

SEQ ID NO: 299082 - DNA, 1095 bp, Proteus mirabilis
atggttacttggcgaaaatcgttgcttttggggatattagcgcttgccttaacaggctgccatcgtccaacagatcaggggcaacagtataaagatggtaagcttaaacaagatcttattgaagttaactcgccaaatacgcaaggcaagcccattaatggctcagattaccttgaacaaattaaccaaataaatcaaacatcttcacgtctatacaatagtaatcaagatacttatcaagcagtggaaaattggttacgctcaggggcagatacgcgtcaattacgtcaatttaatatcgcagcctttcaaatggaaggggaagataattatgggaatgtaaaatttaccggatattatacccctgttttagaagcacgtttaacgccacaaggtgactttaaatatccgctctaccgcatgccagccaaagtgcgtggtaaattgccttcacgagcggctatctataacggtgctttaagtcccactttaattgctgcttatagtaactccatcatggataactttatgatggaagtgcaaggcagtggctatgtcgattatggtgatggtaaacctttaaccttctttggttatgctgggaaaaatggtcatccctaccgcagtattggtaaagtgctgattgataatggtgaagttgaaaaagaagcgatgtcaatgttggcaattagagagtgggctgataagcatagtgaacaagaagtcagaaaattattagaacagaacccctctttcgttttctttaaacctgaaccttttacgccagtaagaggggcaagtgctattccgctgattgctaaagcgtcagtggcttctgatagaagtattatccccgcaggaaccgtattattagcggaaatccctattttagataataccggtaagtttactggacaataccaaatgcgtttaatggttgctttggatgtggggggagccattaaaggacatcatttcgatatttatcatggtattggtaaagaagccggacaaatggcgggtttttataatcattatggacgtgtatgggtattaaaaaaatcgcaacccaccttactgaaccccatacagtaa

SEQ ID NO: 299083 - DNA, 3072 bp, Proteus mirabilis
  misc_feature (17)..(26): n is a, c, g, or t
atgatgttgcctatgcnnnnnnnnnngtatgaaattcaaccctatttacaaggtgaatgccccgaaattcaaggtattgatttcgacgctaaaaaagagactgttgaacagcgtcatcaagcagtcattgaggctattgataaagttaaaacactatggcgtcatcattgcaatgaaattgcagattggataacttcatctggtgttgataaacgcagttacagtagtcgtttcttacctaaatggatcgatgaaattaccgcatgggccactccactcgaaaccaaaagttatcagttacctgactgtttaagtcgtttttcgcaagcaaccctacatgaaaaaactacaaaaggtgctgcgcctgagcacgctttatttgcggaaatcgaactactttgccaacaaagtttaacgttacgtgatgtgatcattgctaatgccatccctgaaatacgccaagggatagaaaatgaaaaaatgcgtcgtggtgagttgggatttgatgatctgttaacgcgtctcgataaggcattgcaacgagaaggtggcgaagcattagcagatgctattcgccaacgttatcctgttgcgatgattgacgaatttcaggataccgatcctcagcagtatcgtatttttgatactatctatggtgagcatacagagagtggtttgctatttattggtgatcccaaacaagccatttacgcatttcgtggtgcagatatctttacctatattcgggcaaggcaacaaaccgatcaccactatacattgaatactaactggcgctcggctccgggtatggtaagtgcagttaataaactgtttttacgttctaaaaccccttttttgtttgatcatattccttttattgaggtcaattcggctgaaaaaaatcagcatatgaagtttatttaccagcaaaaaacggttgccccattaaatttttggttagctgaaggtgaaagcctttcaactggtaattatgaacaattaatggcctcgcaatgtgcgatgcaaattcgtgactggttatcagccggtgacaatcaacaagcttggttaatcgaacaagataataaaagcgctgttacatctgccgatattgtggtgctagtgcgtagtcgccgagaagcattattgatcagagatgcattagatctgttatctatccaatcagtatttttatccaatagagaaagtgtgtttgaaaccaatgaagccaaagatctactttggttactacaagcagtggtaacccctgaaaaagaacgggtgttaagagcttctcttgccagtgcactgtttggatttaacgcacaacaaattgacgaacttaatcaagatgaacagcgttggaaccgctatgtggagcaattcgctgattattttgtcttgtggcaaaaacgtggtgtgttacctatgctacgtaaagtcatgatagaaaaccaaatcgctgagaacttactcgcaagcccagcaggagaacgacgtttaaccgatatcatgcatattggcgagttgctacaagaaacatcattacagcttgatagcgagcacgcccttattcgttggttagcccagcaaatttctcgaccagatgcacaagcggaaagtcagcaaatgcgtttggaaagtgataaaaatctagtgcaaatttgtaccattcacaaatctaaaggattggaatatcccattgtttgtctaccttttgcctgtaattatcaagaacaaaagggcgcgctttatcatgatagagatgaattttacgcaaaattagatatttttaatcaacctgatagcgtgcgtcttgctgatgaagagcgattggcagaggatttacgcttgttgtatgtggcattaactcgggcgaaattttgttgttatgttggtgttgcgcctttggttaaaggaaataaacgtaagtcaggattaactgatttgcataaaaatgcgctgggatatctgttgcagcatggggaagagggtaatagtgagctattacatcaatccattaatcaattgcttgatgacaatataaaagtgatcacgttaggtgatacctcaacgcatcgatatcaatctccacatacaacggatattgctttagatgccgccatatttaagcgaaaaattaatgataattggcgtatcaccagttattcgggattaacggcacaacactctgctcgtggatatctatttgatagtgctgatttggatgccttggtacaatctatcgcaccgggcttagataccgatgctaaaggtgagaaaacggcgcaacacagcgatgaactctctattcatcacttccctcgtggtgcagtcgcggggacatttttacatagtttgcttgaagagcttgatttttcacagcctattgatgaaagttggatgcaagagcaacttattgcccaaggttttgaggaaaaatggacgccattgttggtggcttggatggaaaccctttttcacaccccattaaatgcgcaaggcttatgtttagctgatattcctaaggagcatcaactcgatgagctacaattctatctgcctattgaaaaggagatgtcggcggcacagttaacagcattaacccgtcaatacgatcctttatctgcgcaatgtccagccctcaattttcagcaagtgcaaggcatgctaaaaggttttattgacttagtattttgttgggagggtaagtattatgtggttgactataaatctaactggcttggtgaatcgagtgaggattacacgcaagaggcgatgagcaatgcaatgcgcgatcatcgttatgatttacagtatcaactctatactttagcgctacatcgatttttacaacaacgcttacctgattatgattatcaacgtcattttggtgggatctgctatctcttcttacgtggtattgatgctgactacccgggcaatggcgtctatacctatctacctgaagaaaagtttgtagaagcattagatgcgctatttaaaggggaagcgcttgaggttaacggcagtaaagtgaacgcgctgggtgagaacaattcaaatgattaa

SEQ ID NO: 299084 - DNA, 1728 bp, Proteus mirabilis
ttgtctgttaaagaaatagccaatgtgcttgacctctcatttcgctatggctctattgtcagagatatgaactatattgaagatatctccgatatgatgctgcgttatccgattaaaaatattcttaatgcagattttattgccgatgattatcaaccttctgcgatcctttctcgcctaggatcgcttacaccagaaaatgcgcgtatttgggtgattagccctaatgagccttcaaataagcaagcctattttgttcatgcaccttatcaagtggataaaattactgcgaagcaattagcttcatggcaggaattagccagcgacatctcattgtcattaccgacactaaacccttatattcctgataatctgtcacttattgatgctgatagtaacatcactaagcctcaattattatggcaagacagtcatgctcggttattctatatgccatcgcactatttttctgatgagccgaaagccagtgtgacgttaagtttagtgaacaaaaatgcagatcgcacagttaaacagcaagtcatacaaacattgaccaattaccttgctgatctaacgtctagtgaactggcttatcaagcttctgttgctggtatgaatatctcctcttcttctgggcgtggagtcgatttctcagtcaatggttatactcaacatttaccagagctagtgaatgccacactaaaaagctatataacgtttgaagctactcagcaagagcttgatcaagctaaatcttggtatcgtgaacaactggaagtgacgcataaccttaaagcgtatgatgctgcaatgttacctgcccgtcgcctaaatacgatcccttattatgaagaagccgataaacttaaggcgttagagtcgataacgttacaagatattaaagataatcgtcgtgatgtcattgaaaatgcagcgcttcaagcattaattatcggtaatttaacgccagagcagagccgtgagatagttaaatcggcacaagcattattaggcaataaaggaacagaatattggattggcgacacattagtttttgataaattaaatcaagttacattccaaaataaatctaaaagcaccgataatgcgctaggtgaattgtttatccctgttggctatgagcgtctacaaggaaaagcaattacatcagtattatcctctatcgtgcatccttggttctttgaacaactcagaacagaagagcaattaggttatgcggtctttgctttccaagcttcaatgggtgagcagtccggtttaggctttttactgcaaagtaatgctaaaccacctgtttatctcaatgagcgctatcatgcattttatcaacaagcttatgatcgcttgaaaaagctaagtgaagctgaatttaatcaatataaaaaagccattattgatgaagtaaaacaaccaccgcaaacattttatgaagaggtttctctttatcgtaatgatttctatcgtaataacttaaaatatgatggtcgtgagaagtttttagcccaactgaataatgtaacgctaaaacaagcaatcgaattttatgaaaaagcgataattaaaccgacaggactcgtgtttgtttcacaaataatcgggaaagagggtaacaacgctgattatgcgcaaaataaacagtggaaaatctattcaaccgtgagtgaattacaaaaaacattacctgttgaggaaattaaagagtga

SEQ ID NO: 299085 - DNA, 1419 bp, Proteus mirabilis; identical to SEQ ID NO: 297537

SEQ ID NO: 299086 - DNA, 747 bp, Proteus mirabilis
atgggcgcggcttggcgtaatccacatgagcgtgatatgccttatcttgagcagatggtcaaagaagtgaaagcgctaggtatggaaacctgtatgacattgggtaagcttgatgattcacaagcctcacgcttagcacaagccggactggatttttataaccataatcttgatacatcacctgagttttacggcagcattattaccacccggacatatcaagaccgtttagataccttagataaagtacgtaatgctggcattaaagtgtgctctggaggcattttaggtttaggggaagaggtcaaagatagagccgctatgttagtgcaattagctaacttaccgcaaccgccggaaagtgtacctatcaatatgttagccaaaattaaaggtacgccactggctgataatgaagatgtcgatccctttgattttattcggactattgctgttgctcgtattatgatgcctcgctcttatgtgcgactttcagcagggcgtgaacaaatgagtgaacaaacgcaagcattctgttttatggctggcgcaaactccattttttatggttgcaaattattaacgaccacgaatcccactgaagataaagatcaccaattattccgtaagcttggtttaaatcctgaaagattatctgtctcaatgggcgatcagcaacaagaagacgtgttgctacaagctgttgctgaaaaagacaccgaacaattttataacgcggcactgtaa

SEQ ID NO: 299087 - DNA, 990 bp, Proteus mirabilis
atgaaacaggtagtctacgtagcaagtccagagagtcatcaaatccatgcgtatacattaaataacgcgggagagatgcatctactacaggttgttgaagttgcaggacaagttcaacctatggtggctagtgcagatggaaaacatctttatgttggcattcgtcctcattttagtgtggtgacctttgaaatcgcacctgatggccagttagaacaaaaagcaataacggcaattccaagtgcaccagttcatctgtgcttggataaaacagaacgttttttgtttgttccttcttatcaccaaggtaacttagcggtattgccgattaatcaacaaggtattgctcaagcaccaatacaacttattgaaggattaaataaaccacactcttctaatattgattggcataacaagcagcttattgttccctgtttaggtgaagatcatattcgtctatttaatctttcagaagagggacatttaagtgaagcgcgtagcgaagagttaaccacagcaataaatgcagggccgcgtcatttagcgttcaatcctaatggcgaagtgttttattgccttaatgaattagatgcaacaatcaatgtttatcgtcgtatgggtgatctttatcgtttaatgcaaaccatcgatattgtgccagaaactttcaatagcacacgttgggccgctgatatccatattaccccagacggtcgtttcctctatgccagtgaacgttcggaaagcttgatgagtgtaatggcagtttcagaagcaggggatcatctacaacctgtaggtcattatacaacacagacacaaccacgcggttttaatcttgataatacaggaaattatctcatttcttgcggtcagaaatctgattttgtctctgtttctcgtattgataggcaaaccggcgcattaacggaattagcttgttacccagtcggaaaaggggcgatgtgggtcactgtagtcaccaaataa

SEQ ID NO: 299088 - DNA, 822 bp, Proteus mirabilis
atgtcgtaccgcgttattgcactggatcttgatggcacattgcttgatgaccaaaaacgtatcctaccgggatctttaactgctcttaatcttgccagaaaagcgggcgttaaagtactcattgtaacaggtcgtcaccatgttgctattcatccattctatcaagcgctagatcttgatacacccgctatctgttgtaatggtacttatctttacgactacctcggtaaaaaagtgcttgaatctgatcctttaacccccgaagaaacacgcgcggtactcgacttggttaaacaaaccgatgtgcatcatttagtctatgcagatgatgcaatgatgtatgatcaacttaccgctgccgtacaacgtacacttaattgggctgatactcttcctctggcacaacgccctaatttagtcaaagtagatgatttttaccaagcaatgcatcatgttgattctatctggaaaatagcgaccacaacccccaatcacgatgagttacgtgctttaatcgaacaagtagaacaacaagtcggcttagagtgtgaatggtcttgggtcgatcaagttgatatcgccaagaaaggtaatagcaaaggtcgccgtttacagcgttgggttgaagctaatggcatgaagatgagtgatgttatggcgtttggtgataacttcaatgacttaagtatgttagagcacgttggtttaggtgttgctatgggtaacgcatcagatgaggtcaaagcacgcgctaaactggtgactaaaaataataatcagcccggtattgcagagactattcataaatatattttgtcttaa

SEQ ID NO: 299089 - DNA, 513 bp, Proteus mirabilis
gtgtctatatcaaagaaaaataacttaagagcaagtgtctattttaataatgattattatattataacaaccctttcaaaaagcggtatttatttgattgattttgaaaaaggttataaggttttatccaaagatccatttaatgcagatttgggtttctttacaagaaatgcattaatccaaagcgaaatattagatgctaattcatctgaatatcatgaaatgcgtaataacgaaggattatattctgaatgggtaaaaaaaataattaaagaatgtaattataaaaataaaacgacactattcaaaaatatgaacttatgtaatgtgaatgtgactgatggtatcatatctattattccttatgatcacttacgattggatcattggattggtaaaagtatgcctaacaatgcaattattacattaaaagccaattgtagtgatgaggttttaggtgcttcaataaaaaaagcttttacacgttgtatcagtcgaaaaaccatcacttaa

SEQ ID NO: 299090 - DNA, 1341 bp, Proteus mirabilis
atgcaacatatcattaaatcaatgactaatgcgtatattgaaaaaggctatattacttcacaagcttttattgccgatcaagatctctcaaatcatcagttaaccattaacgtaattgaaggaaagataaaatcaatctttattgataatatgacttcccccatggttgatattctatttccttcatatcaagataaacgacttaatttacgtgagttagagcatgggcttgaacaacttaatcgattaacaacatcactatatagattagatattcaacctagtgacaggataggatactcgactatttttatttataaggaaaacgaaacgcatcctttcagaaatcaacttactattgataattcaggttcaaaagcaacaggtgaaatgttactgacgaataccacagcaatagattcgttatttggatttggagagcagtgggagctctccttaaatagtaatacagatttattacattcacattattatagaggctatacagcgagtataaacattccctatggctattggttttatcaatatcagttatcttataaccgttcttctcattttattaaaagttatagtaatcaatatatctataaaagtataaatactaatcagcaagttgatattagtcgtttactttatcgggatagtaagaagaagataatattaaaaggcatattaaagcataaaaaagtaagaacggaattagccaaacagccgatattaatcaatagcccaacattaacatcactatcattagcgcctcaatatcattttaatctgacatcaggttatttatctattaatccatcagcagaaattgggttgtctttttttggggcatcacctgattatattgctgaaaactcaccccgaagccactatagaaaattgagtctaaatatacattatcaatatttatttccttactctgtctcctatattacgtctttttatggtcaatatacatctgataatctttatagtgtggaaaaaataaccatagatggattaaatgcggttcgtggtactaaacaaaataagcttagtgccaatagaggactttattggcgtaatgaaattaatacaccatggataaattcatttttaggtcaatggcgttttattacggctgttgattatggcgttatctattctgatcaatatgaaacaaagcagcagtctttattagctggcgctatggggctttcattttatcgttcccctttttcttcacaactattgataaacaaaccattcatttatccaaagtggtcaaatgctaaccaatggtctttatcttggtcaatttcttttgctctttaa

SEQ ID NO: 299091 - DNA, 987 bp, Proteus mirabilis; identical to SEQ ID NO: 294020

SEQ ID NO: 299092 - DNA, 225 bp, Proteus mirabilis
ttgccttttggggagacaactccacctcattatctgacattacccgatgtttacgcaggctattctttaaaacaattagcagaatttcagctttggcctactaaacagatggcaaatttacccgtccctaaaacttattggaaagaagcggattttgctgatttagcagaaaaagctcgccaaatcgatcaaaaaactcgaccaaaaacaacaaaaaatgactaa

SEQ ID NO: 299093 - DNA, 1419 bp, Proteus mirabilis
atgaattttttttcattcgagtttctcggagcctttacgagcttttttattatctattggctcttccaaaaacaggttaagatccaaaatatcttactcatcatagtaagttatgcttttctattctatgtcgactaccgtcctgctgttatcttattaagctatacgcttttgatttactcattagccaatatactcacccgctatacatcaacgaaagtgatttattggttacttgggctgttagttgccctctattttactgcctttaaatattactcatttttccaagaatcattgacacaactattctcacagtggggattaagtgttgaattaccaattattgaactactggcaccattagggttatcgttttatatcttccactctgttagctatgtcgtttcagtgtgtcgcaaagagatccctaaagccccttttcttgatgtcgtgctctacttatgctttttcccaagcattgtggcgggaccgattaatcgtgccaaacaatttttaccacaaattcaagcaccaacccgtaaaattatcgactataaaggggctatcatgctgattgtattagcaatcgctaagctcttttggttaagtggttggttgtcgacaaattatgtcgatcctatttttaatgcccctgatttagccactagcggacaagtactggtggcgacctatgcttatgcatggcatatctattttaacttctcgggttataccaatttagtgacaggtattgcgctattactgggttttgttgtccctcgtaactttaatgcaccttatttagccatcaatcttgctgatttttggcgccgttggcatataagtttatcaacgtttattcgcgattatgtttatatccctttggggggaaatcgtaagggcgttattcgacaaaatgtgaatgcctttgccgcgatggttatctctggtttatggcatggcgcagctatgacgtttattatctggggagccattcatggtattggtgtggtgatattaaatatcaaacaccgccttttccccgccgccaaacatgacgccaatagcatgctagcatcattaaaaatgttgttatcttggataattaccttccattttgtgtgctttgcgtggatcttttttcgcagccaaaccgtcaatgatgcttggatattaattcaacaactctttagtgcaggtgcttggcagtcgctacaagccgaagggctaaccctgtttatgttctggggactgttcttactgtatccttgttttgtcactttaagggcaattattgcgcgacttgagaaaaaagtgccttggtatgtttatccactaccattagcgttgatccttacaattatatttatgttgtctcctgatggggttccgggatttatttatgccagcttttga

SEQ ID NO: 299094 - DNA, 927 bp, Proteus mirabilis
atgggtgattataattcactgtttaaacagcatacggagtgtaatattcatactattacacttattcgtgattccattttggcatctagtcagaaattacaagaaaagctagcattgctggaagaaatggaacatctctttaatgacatgcttatcaatgcagaatcattagtggtcttttttaatgaaattgatgagcattttactcatagtaatgaagaaattgagaattttgctaaatggctaaataaaataaaagatagcgctaataatattgataaactgtcaaatcaagccaatatattatcaattaattcagcaatagaggcaggacatataggtcatgcaggtgcaggattttctgtattagcacaagagatgaaaagcctttcacaaaagatccaaaatcaggcctcagaaatagcgtctatcaacaataatgtaagtgcccgctttacaccaataaaacaaaatactcagaaaaatcaagaacaactgaagcaaataaaaaatcttgttacggaaggtcatgctaatttatctgcgcttgctcaacaagccaatgatttaaaaaatatctttcagtttatgtcgatacaacaattttttaatactgtgaaaatagatcatgttttatggaaagaagcgatttatattcacttattaaataatgatgatgaaaattgtgttaatcagcacactgaatgtcgtttaggaaaatggtactaccaaggtgaaggacgcaaatttgccggtagtgaagcttttcgtcgtttagaagagcctcataaattggttcatcaaagtgggcgtcttgcattggcggcgaatatggccggtgatcaggatgcggtagtgaagtatattcagcaaatggaacaagcgagtgttgatgtcattaaatatattgatgctttacataattaa

SEQ ID NO: 299095 - DNA, 1032 bp, Proteus mirabilis; identical to SEQ ID NO: 294009

SEQ ID NO: 299096 - DNA, 2022 bp, Proteus mirabilis; identical to SEQ ID NO: 297156

SEQ ID NO: 299097 - DNA, 6105 bp, Proteus mirabilis; identical to SEQ ID NO: 293497

SEQ ID NO: 299098 - DNA, 630 bp, Proteus mirabilis; identical to SEQ ID NO: 295764

SEQ ID NO: 299099 - DNA, 2370 bp, Proteus mirabilis
atgattttattagtcaagataaaatatatttatagaaataaaatagcgttaataaaatggcattatctatatgctaaatatattgcaatgctagggctaaaacctcttaatatagattatcttgccgttatcattatattaagttgcttacctttacttattcaacgtgaaacactgagtttatccctgagttatacactgattatcgtagggatattgttatatttaattcctttttcatacttacgttttttgttgctattactctgtttttggtgctatgcaaacagtactgcctcctctttaatggtcaaaacctctcaacttgctgacaccattgccacaatagaaagcgcaattctagaatatcgtcgcttgccggatagcaatataatgattaaagttgctattcctaaacagcatctcttttctgctaaactctatgccaatatatattggcgtcatccgcctaaaaatgtcgtagtcgggcaaacatggctgtttaaaattcactttcgtgcagtacatggttatttaaatgagggaggatttgacagccaaaaatatgccgtttcagtaagagaaacattgtcaggaaaaatattatcagccacattaacgaattctcaccttcctatttatactcaatttattcactatctttcatcttattggcaagccacaaaaaatagtggtgaaatcacagcattagtgttaggtgataaacgaggtatttctgccgaaaataaaatactttatatgaaaacaggtatttcgcaccttattgtgatttcagggctgcatattggccttgctgctctgtttggttggctgatggcgagaggagtacaatatcttttcccaacgcaatggattaacccacaatttcctttggttattagtttaggttgtggtgttttttatgcggctttatcaggatgggggatccccgcaaccagagcgataataggcctaactatttgggttttactccattggcgtagtggactttttttaccttggcagtgggcgatttggagtgcggcagtgattttattgcttgatccgctcgccatattatccgctagtttttggttatccttttctgcggtatttgccatcattgtttggtattggctctatccattaaataaaagatttagccagcaaaaacgttggtttgttattagactcattcatttgcaactagggctattgatcatcttattaccttttcaatactacttatttggtggtggtaatctttttagtttgcttgttaatttatgggctgtgcctattatttcgtttattaccgtaccacttattatgtgtgggctatttactgcctttttacctgttctacaacctattatttggtcatgggttgatcagtctatcaattgggcatttttctgtgtgccttattttcttgcgtattggcaaccctgtggcgctgtcccctggttatttgcattaagcggtattatgactcttttagttatcaaaatgagctggtggcgtcatcatgtgattattttgatcactattgctacttttttatattgtgaactgtctttctctaaacgttatgattggcgaataaccatgttagatattggacatggtttagctattattattgaaaaagagggagaagcggttatctatgacacagggatacgctggaaaagtggtggcactattgctaaaaatgtcattattccctatctaacgcatcatcgattacagcctgttgccatgataattagccatgatcaccttgatcataccggtggtattgacgacttattacgtgcttatcccaagttaactatccgtagtagctttgacaatccccaacatttaccgtgcttacaagggggagtatggcaatggaaagaccttactttcaacgcgctctggccgctgacattatctcgctcacctaaaaataatgattcttgtgtaatttcattaacggatggtaacagtgttattttattaaccggcgatctggaaaaagagggggaagcgcaactactgagaaggaaaaaagcctatttaaaagcggatattttacaagttcctcatcatggtagccaaacatcatccacattggcgtttattcaagcaatatcaccaaaatatgcactagtttctgctgcacgttatagcccttggcgtttaccttctgataaagtacataaccgttataaaaaagaggccattgattggctaacaacatcgataaatgggcaaatttctatcgagtttaaacacggaaagattgatgtagtcacctatagacgagatattttacctcgttggtatcatcagtggtttggtgttttgacgtttcccgagtag

SEQ ID NO: 299100 - DNA, 429 bp, Proteus mirabilis
atgcagcgcttactcagtgatttgggcaatgtctcactgacggctatccgcagtgcgtctctggaagaaaatgactgggagtgtcttggtggtgccatgtcacagattgccgaatggggggagcgtctggtgattgatgataccagtaatatgacaccttccctgttacgtgcccgggcacggcgttaccgccgtaaagtgggtacgccgggactgattattgtggattaccttcaactgatgcgcagtcctgaacaggaaaaccggacgcaggaaatcagtgaaatttcccgtagtctgaaagcactggcgaaagaactcgggtgtccggtggtggccctttcccagctaaacctaactgaaccaactctgttaatagtttacgggcaatatgtaagcctttttccatctcaaaactgccatccataa

SEQ ID NO: 299101 - DNA, 399 bp, Proteus mirabilis
atggcttacaacggtaatttagtcagtctagatatgcgttcaggacagatcatctggaaacgtgatttaggttcagttaatgacatggtacttttgggtgacaatctataccttgttgaccaaaatgaccgagttttagctgtgcgcaaatctgatggtgtgacattatggacacaagaagacctactgcaccgtaatttaaccgccccggctatcgttgatggttatttagtggtgggagatgcagaaggctatctccattggattgataccagtacaggcaaatttattgctcaaaataaagtaaatagctcaggtttattaagccgtccacaggctgttcaagataaactgatgatccaagcacgtgacggtaaactttatctatatcgtcggtaa

SEQ ID NO: 299102 - DNA, 1056 bp, Proteus mirabilis
ttgccatcatatgaaataaagcaggttgattttgcttggcaaggtggtgaaccaacgctggcaggattagccttctttgagaaagtggtcaaataccaaaagcaatttgctaacggcaagacaattaccaatagtgtacaaaccaatgcgattgccattaatcgtcaatgggcacaattctttgctgataaccactttctattaggcgtttcaattgatggcattgaagccgttcacgataaatatcgtatttcagtcaatggtagcccaacatttgaacgcgtaaaacgcgccatcaatttactaaatgagtatggtgttgaatttaatacattaaccgttgtaaatgatcaaaactggaataaaggaaaagagacttatcaagctttaaaaaatttaggttcaactttttttcaatttattcccatagtcgaagtggatagacgtttcccacacactcatggcggacattatgctcccggtcctaacgcacaattagcggctttctctgttcccgctgaaggttacggaaaatttatgaccgatatattcaatgaatggatacgccaaggtgatgtaggaaaaatatacattcgcttatttgatagcttattagggacatggatgggatatcctgcatcaacatgtattcaatctaaaacttgtggtcaagcattaattattgaagccaatggtgatgtttactcttgtgatcactatgtttatccagctaataatttaggcaacatacaactaacaagtcttgcacagctcgcaacatcaaaaacacagcaacgctttggtcaaaataaatacgataaacaaaccaacctttgcaaacagtgtgaagtgcaaagcttatgttatggcggttgtcctaaacatcgcattattgctatagaaggcgaaaaatatcgccacaattatctatgtcactcttataaaaaaatatttcatcacacggcaatcggcatgcaattaatgcgtcaagcgatagctcgtggaggccttgccagtgatgcacttggggcgatgcaaaaaaactatctcaagtga

SEQ ID NO: 299103 - DNA, 663 bp, Proteus mirabilis; identical to SEQ ID NO: 84803

SEQ ID NO: 299104 - DNA, 960 bp, Proteus mirabilis; identical to SEQ ID NO: 277192

SEQ ID NO: 299105 - DNA, 468 bp, Proteus mirabilis; identical to SEQ ID NO: 277191

SEQ ID NO: 299106 - DNA, 2055 bp, Proteus mirabilis
atgaaactatttttatgcgaaaaaccgtctcaggccaaagatattgcccgggtagtcggtgcgcatcagcgcctggataatttttttcagggaaatggcgttcaggtcgcctgggcaagaggtcatctgctggagcaggctgaaccggaggcttatggtgagcagtttgccgcgccctggcgacaaagtgccttacccgttattcctgagcagtggaaaatggtggttaaaaaagatgcggtttcgttgtttcggactataaagcagttgctcagtcaggcgacggaagtggtgattgccacggatgcggacagagaaggggaggtgattgcccgtgaattactggaggcctgtcattacagaaaaaaggtgcaacgtttatggttgtctgcactggatgaggcgagtatcaggaaggccttaaataacctgttacccggcgagaaaacggccttcttatattcagcgggattgggacgtgccagagcggactggcttatcggcatgaacatgacgcgtctgtttaccctcaaagcccgggaactgggttttggcgggatattgtcggtcggacgtgtccagactcccacactggccctgattgttcagcgggaaagagaaattacgcactttgtttccaaaccgttctggcgggtaaccgcgtctttacagcatcaggggattgtttttcaggcgcactggcgacctgctatgcaatattgtgatgatgagcatcgttgtattcatgttcaggcggctcaggcggtggcgcagctgtgccggcaggcaggcaaggcgacggtgtgtacggtaaatgaaacgaaaggaaaagcattgccgccgttgccgtttgatctcgggacacttcagcaggctgcctcaaaacgttgggggtattccgctgataaagtgcttgaaatcgctcagagtctgtatgaaaaacataaagccaccacgtatccccggacggactgcgggtatctgccggtgtcgatgcgtgccgatataccggttgttttaaacgcattatcacaaagtgatccggccttacagaatgtgctggcacaattgcagccggcgcgtatttcccgggtctggaatgatgcaaaaattacggctcaccatgcgattattccgacccggcatacaccggatttaaatgccatgaatgaggctgaactgactgtctacaaacttatccgtacgcattatcttgcgcagtttttgccggatcaggaatgggacgcgacagaggtgtttttagatatcggcggacaacaatttgttgccaaaggaaaagtggaaagggtgaagggctggtctgtattatttgtgaaacatgaagacgatccgtcagtaaaagaagaggcagaaaccggacaggaagccggaacggaaacattgccgtctcttcatgaaggcgaattcttcgtggtacaggaggcaaaggttctgcaactggcgaccacaccgccgaaaccctatacggatggtacattgattgcggccatgaaaaatgcgtcatcttttattgccgatccgacattaaaaaaagtgctgaaagaaaatgcggggctgggaacagaagcgacccgggcggggatcatcaccacgctggaaaacagaaagttgatagtcaggcagaaaaaaacgctccgggcgacagacactggctgtcagctgattgatgccctgccggcagtctgtacggatccgggaatgacagcgttatgggaacaatcactcgaacaggtggcacagggaaacttgtctctggatgtgtttatgcaaaagcaaatcagctggctggtccatctcattaagaaagggtcggaaatgccgctggcactggatctgccgccgatgccatcctgcccagtgtgtcagaataagatggtattacgggaaagcagtaaaggacgtttctggagttgtcagcattatccggattgtaaagggagtgtaccattaccagaaaaaatgcagggcgtcacacgggtggttaaaaaaagaaagaaggcagtgaagaagagcataacaggactctttacctga

SEQ ID NO: 299107 - DNA, 528 bp, Proteus mirabilis; identical to SEQ ID NO: 27132

SEQ ID NO: 299108 - DNA, 714 bp, Proteus mirabilis; identical to SEQ ID NO: 27131

SEQ ID NO: 299109 - DNA, 1266 bp, Proteus mirabilis; identical to SEQ ID NO: 27130

SEQ ID NO: 299110 - DNA, 282 bp, Proteus mirabilis; identical to SEQ ID NO: 27129

SEQ ID NO: 299111 - DNA, 591 bp, Proteus mirabilis; identical to SEQ ID NO: 27128

SEQ ID NO: 299112 - DNA, 621 bp, Proteus mirabilis; identical to SEQ ID NO: 27127

SEQ ID NO: 299113 - DNA, 1650 bp, Proteus mirabilis; identical to SEQ ID NO: 27126

SEQ ID NO: 299114 - DNA, 606 bp, Proteus mirabilis
atgcagcgcttactcagtgatttgggaaatgtcccactgacagctatccgcagtgcatctcttgaagaaaatgactgggaatatcttgggggcgccatgtcgcagattgccgaatggggtgagcgtctggtgattgatgataccagtaatatgacgccttccctgttacgtgcccgtgcacggcgttaccgccgtaaagtgggtacgccggggctgattattgtggattaccttcagctgatgcgcagtcctgaacaggaaaaccggacacaggaaatcagtgaaatctcccgcaatctgaaagcactggccaaagagctggggtgtccggtggtggctctttcccagttaaacaggcaactggagcaacgtgcggataagcgcccgacaaacggggatttacgggattccggctcactggagcaggatgcggatttgattttatttttgtaccgcgatgaggtgtatcacgaacactcaccggatgaaggtgtggcagaaattatcatcggtaagcaacgacagggtccactagggacggtgaaagtgcagtttaacgggacgtatacacgtttcagtgatttttctcagggatattatttttaa

SEQ ID NO: 299115 - DNA, 159 bp, Proteus mirabilis
atgagtaccatgacgatcgccatacctaaggcagaacgtaatagcattaatttgcgtccttttctatctgacaattttccccaaaaaggtgccgctatggcagaaaagagaaaagtaatactaaaagcgacaccagtccataggtttaaggactcatga

SEQ ID NO: 299116 - DNA, 390 bp, Proteus mirabilis
atgtctaaatcggcaaaaggtacgacagaacggcatggacggaacgtaaaagctaaatctggtttaaaccgctcaatactggagcagggctggtatgaaatgcgccgtcagcttgagtacaagcagctctggcgaggtggtcaggtactggcaataccaccggcctacaccagtcagaagtgcgcttgctgtggtcatacagcaaaggaaaaccgccagtcacaaagtcaattcgagtgccttgaatgtggatatacagcgaatgctgatatcaacggggcacgtaacattttagcggcaggacatgccgtgcttgcctgtggagggagggtgcagtcaggccgcccgtcgaagcaggaacccgccgaggtgattcagacatcagtctga

SEQ ID NO: 299117 - DNA, 2061 bp, Proteus mirabilis
atgaacaaacttttaaatgtggcttttgctatcggattagcgttaacaggcacttctgctgtcatggctgataaaccagccacgccagccatggtgactattaatcaattaccgacattaaagcaagagccacaacattccacagtgagtgaacgtgtcaccgctcgttttgaacgttcccactatcgtcaattctcgttagacgcgagtttttccgaaaagatttttaatcgttatcttaatttattggattatagccataacgtattattagcgtcagatattgcccagtttgataaagataaaactaaagtgggtgaatatttaaaaacaggtgaattaggtcctttatatgatctgtttaaccttgcgcaaaaaagacgttttgagcgctttcaatatgctttaaatcgattaaatcaacctatcgatctcactggacaagataaatttcagttagatagaaccaaagcgccatggccgaaaacgcaagctgaattagataagctttgggatgaaaaagtaaaatacgactggctaacacttaaactctctgacaaaacagacagtgaaatcaaagaaacactgacaaaacgttataaagctgcattacgtcgccaaacacaaagccaaagtgaagacgtattccaaattatcatgacggcttttgcgcgtgaaattgatccccataccagttatttatcaccaagaaatacggaagcctttgattcagaaatgagcctttcattagaagggattggtgccgtattacaaatggatgatgattatccaatgattaattccatggtaacgggcggaccggctgctaaaagtaaagcgctaaaagtaggtgataaaattatcgctgtcggtcaacataataaacccatggttgatgtggttggttggcgcttagatgacgttgtcgcgctaatcaaaggccctaaaggtagccaagttaaactagaagttatctctgatgaaaaaggggcgaagccaagaactatcactttaacaagagaacagatccgcctagaagatagagcggtcaagttaaccgaaaaagtgattaatggtgataaaatcgctattttagatattcctagtttctatgtcggcttaactaatgatgtgaaaacccaactacaaaaagtggctaaagacaatgtatctgctttagttattgatttacgtggaaatgggggcggtgcattaacggaagctattgcattatcgggtttatttattccaagtggtcccgtcgttcaagtccgtgataataatggtcgagtacgccaagattatgatcgtgatgatgttgtctattataaagggccactagtggttatcgttaaccgctttagtgcttctgcttctgaaatttttgctgctgcaatgcaagattatgggcgcgcattaattgttggtgagcaaacctttggtaaaggaacggtgcaacaatatcgttcattgacacgagtttatgatcagatgttaagtcctgattggcctagtttaggttcagttcagtacactatccaaaaattctatcgtattaatggtggaagtacccaattaaaaggggtgacaccagacttgttattaccaagctttgataattcagaaatgggggaaagcaatgaagataatgctttaccttgggacagtattccaccggctaattataagctgtctgagtattcagagaaaataaaacaagcactacctacattggcggatcaacatgctaaacgtatcgcgaatgatagagagttttcatatatctttgacgacatcaagcgctacaatgaagctaaagccaaaggtgaagataagtttattattcttaattttgcagagcgcgaaaaagagaataaagagctagaagccataaaattacagcgtattaaccaacgtcttaagttagagggtaagccaccactaaaatcacttgatgatttgccgaaggattatgaaggccctgatccttacttagatgaaacggctaatattgcggatgatcttgcaaaggtattaaaacctaagaagttattaaattaa

SEQ ID NO: 299118 - DNA, 1683 bp, Proteus mirabilis
atgcgtattgagttgtctattttaatctattgtattttatggtgttgtgcttttttttctgtagcgaatgaaagtcatatcgatccccctgtaccagtagatttaccgacagaaacacaacttagagatcaattactacaacaaaatgacaatgtctctttagtgaacttagcaccacaaaataaaagggaatttatcacaccttctgtacattgtttttcaatcaaacaggtaaaactccatcatctcgatgagttttcttcctcatcactgcaacgccaagtggcaaaatggcaagctgaattagttgggcattgtcagtcacaggcattgttagaacaagatatcaatattctgaatgcgctgctttatgatgcaggttatgtgaccagtgaggtgggtaaagttgatctttatgccgatgacgaggtattggatatcacattaaatgtcgggagagtgcaagacattgtttccgaagccccgacagataaacgctatttgatttcacaggcagtgcctgtcaaaaaaggtgatgttttaaacgttaaagatattgaacagggggctgacaatttaagatcccgtcctaatagtaatgtcaaaattcagatagaaccctcgtcaaaagaacatgagtcaattatttctctttctcaagtgggaaaaaggacaatggcaggctcggtatcgattgataataaggagcagaaaatttacggagatctatttggtactacaaggctaagctttggtaatctagcgcaacttaatgatactttaatggttattctttcaagtcaactcgataccttaaaatcaagaggcatcaaaaagcagatctttttatggcaagtaccttatcattattggcgtgcgacattatttggttatgatattggttcaaaaatgagagtctctgaagtgacaaaagagttacaaaaaacgcgtcaacagcttctttcttttgagatccagcgccaatttagaccttcaacacagcgtacggtgactttaagtggtggaatacaatattacacttatcgcaatgaagtgtcaggctatcgcttatcagtccatgagcgtcgcagtccttatattaatgcgggtattgagcaaaattatcgctttatgagagggggtttccttaatgctaaacttcattataagcagagtgtttttattcctggcgcaagactatcaccgatagattcccttaatggtgtacccatttttaatcttaattttgatgcattaattccttttaaaatcacttcacagcaatttttttatcaaccagaaatgatatttcaactgactcgctcagatattgatggattacttgataaagcaaccattggtggtctgtatagcgtgtatggttttgagtccggcaaaggttattctgatgccaatcagtttgtttcccggcataaggttacttggcttacacccttgaataaccaaatgctattttccgccatagattatggttccgtttcagaagatagaaaaaatattttttataataaaaataaatatttagttggtgtggcaataggattagaaggtagctttaagaaactaagttatcagttagtatggagcataccgttatcagccccttctagtcgagaagcaacaggatcgcagtttaattttaatacccaatttaacttctga

SEQ ID NO: 299119 - DNA, 552 bp, Proteus mirabilis
atgaaatttaccgaaggtgcctttaaagattggggttacgaattagcccgtgaagaatttggtggtgagctgttagatggtggtccttgggttaaaattaagaaccctaaatcaggcaaagatattattgttaaagatgttatcgcagatgcattcttacaacaaatcctgttacgcccagccgagtatgatgttatcgcttgtatgaacctaaatggcgactatatttctgatgcattagcagcacaagttggcggtattgggattgctcctggcgctaatattggtgatgagtgtgcattatttgaagcgactcacggaacagcaccaaaatatgccggacaagataaagttaatccaggctctattattctctccgcggagatgatgctacgccacatgggttggacagaagccgctgacttaatcattaaaggtatggaaggcgcaatcgaagcgaagaccgttacttatgattttgaacgtctaatggacggtgctaaactgctgaaatgtagcgagtttggtgacgcgattatcaaacatatgtaa

SEQ ID NO: 299120 - DNA, 1092 bp, Proteus mirabilis; identical to SEQ ID NO: 297312

SEQ ID NO: 299121 - DNA, 3891 bp, Proteus mirabilis
atggaaatcctgcgtggctcccccgctttatccgcttttcgtattaataaactattaactttatgtcaggaaaaccaacttcctgtccgtggtatttatgcggagtttatccattttgtaaaagtggatggacagctatctgaagatgaacaagctaaattaagcaagttactgcactatggcccttcattaacagagcatgagcttgttggagagatgcgtattgttgtaccacgaccgggaaccatttcgccatggtcgactaaagcgacagatattgcccataattgtggtttagcacaagtggttagaattgaacgtggtattgcttattatatagatagcgatacgatggacgaagaacagtggcagttgttatacggttttatttatgatcgtatgatggaaacaatttttaccgattatcaacaagttaatgcgctatttgctgaacagacacccaccccattaaaaacaattgatgttcttgctcacggtaaagatgcgctagttgctgccaatattgaaatggggttagcgctagctgatgatgaagttgattatctagtagatgcttttaaacgtttgcaacgcaatccaactgatgtagaactttatatgttcgctcaagcaaactcagagcattgccgtcataaaatttttaatgcagattggataatcgacggtaaagcgcaagacaaatcattatttaaaatgattaaaaatacttttgagcaaactcctgattatgtcttgtcggcttataaagataatgctgctgtaatggaaggctccgttgctgggcgtttttatcccgatacggaaaaagggcattaccgttatcatcaagagcctgtccatatcttaatgaaagtggaaacgcacaatcacccaacggcaatttccccgtggcctggtgcagcaaccggctctggcggtgaaattcgtgatgaaggggcgacaggccgtggggcaaaacctaaagcgggtttagtcggtttttccgtttctaacttacgtattccggggtttgaacaaccttgggaagaagattttggcagaccagaacgtattgtcagtgcactggacattatgacagaaggccctttaggtggagccgcatttaataatgaatttggtcgtcccgccttattaggttatttcagaacctatgaagagcaggttaatagccataatggtgttgaaattcgaggctaccataaacctattatgttggctggtggtattggtaatattcgcgaagatcacgtgcaaaaaggtgagatctccgtgggtgctaagttaattgtacttggtggcccatcgatgaatatcggcctaggaggtggtgcggcttcttctatgacttccggccagtcagatgctgatttagattttgcctctgtgcaacgagataacccagaaatggagcgtcgttgccaagaggttatcgatcgctgttggcaattaggtgatgataacccgattttatttattcatgatgtcggagcgggggggctttctaatgccatgcctgagcttgtcaatgatggcgggcgtggaggtcgttttgagttacgtaacgttttaaatgatgaaccgggtatgagtcctctagagatctggtgtaatgagtcgcaagagcgttatgtattagcggtatctccagaaaaaatgccactatttgatgcgctatgccaacgagaaagagccccttacgctgtcattggcgaggcaacacaagagcgtgaattagtgttaaatgatacacattttgataataaaccaatagatatgcctttagatatcttgttgggtaaagcgccgaaaatgttgcgtgatgtcacatcacatcaaacagcaggtgaatatctcgatcgtaaagatatcgatttaaaagaagcggtttatcgcgtacttcatttacccgccgttgctgagaagacgttcttaattactattggtgatcgtagtgttacgggaatggttgcgcgtgaccaaatggttggaccttggcaaattccggtggctaactgtgcggtaacaacggccacattagatagttattacggcgaggcgatgtcaataggggaaagagcccctattgcactattagattttgctgcatcagcgcgaatggcggtaggtgaagccttaaccaatatggcgggttgcgatgtacagtcacttaatcgtataaaactttccgcaaactggatggctgcggcgggtcaccctggtgaagatgcgggattatatgatgcagtaaaagccattggtgaagagctatgcccacaattaggtattactattccggtgggtaaggactcaatgtccatgaaaacgcgttggcaagatgaacaaggaaaaacgaaagaagttatttcccctctctctttagttatcaccgcattttcccgtgttgaagatgtacgtaaaactgtcacccctgagctttctacccaagaaggaaaccgtttatatctaatcgatttaggtaatggtcataatgcattaggggcaacagcattagctcaagtttatcgtcagctaggacaaaaagcggctgatttacgtgatgtagagcagttaaaacagttttttaatgtcattcaacaattggtgagcgacggtaaattactggcttatcatgaccgctctgatggtggcttatttgtgactttggccgaaatggcgtttgcgggacattgtggccttaatgttgatatcagtgcttatgacgaagatattttagccggtctatttaatgaagagctaggtgcggtgttccaaattaaaggggagcatcaagaaagcgttgaaacactgtttactgaacatggtttagcagattgtttacattacttagggcaagcaacagcaagtgatgacattattattcaaagccgtgaaacggaagtttaccacgaaaaacgtagtacattacgtgtctggtgggctgaaacgacatggcaaatgcaacgtttacgtgataatcctgaatgtgcagatgaagaacatcgtgccaaacaagatagtcacgatccgggattaaatgttcacttaacctttgatcccgcagaggatattgcggcgccttatattgctacaggcagtcgtcctcgtattgcggtattaagagagcaaggtgttaactctcatgtggaaatggcagcagcttttgatcgcgctggatttgatgctattgatgttcatatgagcgatttacatacggcacaacgctcattaagtgattttgatgtattggttgcttgtggtggtttctcttatggtgatgtactcggtgcgggtgagggatgggctaaatctattttatttaatcatcgtttacgtgatgagtttgcccaattctttgcacgtcaagatacgttatcacttggggtttgtaatggttgccaaatgatgtcaacgttggccgagcttattccgggggcagatttatggccacgctttgtacgcaatcgctcagagcgttttgaagcccgctttagcttagtaaaagtaactgatagcccgtcgctattattacaaggtatggcggggtcacagatgccaattgcggtatctcatggtgaaggttttgctgaatttcgtgacgctgcacaattagcgcagttagaagcacaaaatttagtaggactgcgttttgttgatcactatggtcaaccaacagagcaatacccattaaaccctaacggatcagtaaaagggatcaccgctgttaccacaacagatggccgctcaacaatcatgatgcctcaccctgagcgcgtttttagaacagtgagccattcttggcatccagaaaattggggagaagatagcccttggatgcgcttattccgtaatgccagaaagcaatttgactaa

SEQ ID NO: 299122 - DNA, 1449 bp, Proteus mirabilis
atgatttcattgaaaaagtggcgtatttttccccgatctttaagacaattggttatcatggcattttggatggtgctgttaccgcttctcgtccttgcctatcaggcttatcaaagtttggatcagcttagtaaccaagccgctattaccaataaaaatgcgttagcggataccgagcgtagcgaggtgatgcgtaatttagctattgaaatggaaggaaattatcgacgatattgtgtattgcgtgataaaactgatgaagaaatgtatcaacagcgttatcaacaatacagcaaaatgttctctaccttgcagcagaccatcatccctctttctgagtctaaagaagcacaagccttgaatacttctttgaaaacgctcaaatcaattcaatgcaaaaatagtgaacccacttctcaaatgcaacaagcattagagcaattttcttatgccaataaccgcattgtcgtgttaactaaagagattatttttagtcgtggcgagcaactacaaatggctattgctgaaaaagggcgttattttggttggcaaagtttaattgtttttgtttttagcctgattttaattgccttatttacccgtatgatcatcggtccggttaaaggtatagaaaaaatgattaaccgattgggggaagggcgtacattaaataataacttgaattcgtttcaggggccacgtgaattacgctctttagctcaacgtattatttggttaagtgaacgtcttgcatggctagaatcgcaacgccatgagtttttacgtcatatttctcatgagttaaaaacaccgttagccagtatgcgcgaaggaacagaattattagcggatgaagtagcagggcctttaaccttagatcaaaaagaagtcgtagctattcttgataatagtagtaaacaacttcaattattaattgagcaactacttgattataatcgtaaactttccgaagtacctcagcaaattgaggaagttgatttaaccacattagtgaatgatgtggtgttagcgcatagtttacccgcccgagcgaaaggcattaagacgataatttcacttgatctgaaaaaatgtcgagcagaaacgacgttattatcaagagttattgataatctctactcgaatgcggtgcactatggcgctgaatcgggtaatatctggatctctagttatcaaattgaacagaaaatagttattgatatagccaataaaggcacgccgatccctgaatcagagcaaaaaatgatttttgagcccttttttcaaggttctctattacgtaaaggggctgtcaaagggagtggtttggggttaagtattgctcatgactgtatcaaaagaatggatggcgagttaaatattgttcattctgactatgctgatgtctgttttcgtattgaactaccgctactttctgagaataaataa

SEQ ID NO: 299123 - DNA, 1011 bp, Proteus mirabilis
atgcatatcaggtcacaaaaacaggtgtcttttcatcagtataaaaaattaaagcgaaagacactggctaatgagcaattatctatggcccctgcatcaattaagaggatcgcttcacactggaaacagtatctgtgttggataatgttgcctatgtttcttgctggatgtgcacaaaaatcgctgaccgaaactgctaatattgagcctgaaacccccgttgttaaacaaaaaactatcgattatcgttgggcagaatgtaaaactttagctgctttttatcatgaagggctcaataatccgctattttggttacgtaccattgagtgcacacagcgtattatgtctacagaagcacaacgtcaagccagtagtgttatcgttgccggatgggatggcgccttttataaaagtattttattagagcgagccggaatgacggttgctgaacgtcgttcacagttggttttattagaaagctatcaattgcaatttccaagctctatgcgtgttctattatctacttggattgagaatcaaacgcttacgcttgctctcgctgatgagaaaaatcgtaatcgccgttttgttacagaaacggaaaataaaatggatttgctgaaaaaacaaaataatgcattagagcatgagttaaataccacacgtaaaaaactcgaaagtctcacacaaattgaacgtcaattatcgagccgaaaacaaggggcttctgtggatgctatttctcaagaagaagcactatctgatgttcaatcttcagatgcgagtaatgcagaaaaaccagccgataaaccgacagcggagcaatccaataagtcaacggcaagcgagcaatcgataaccaaagaaaataatgaggtttcacaaccttcggtatcagcagttaaacctgaaccaccaaaagcagagcaagtaaaacctgatgcgaaaaatacctcgacagaaaaagagaatagcgcaacggttaaacctactgaaacaggatctaaataa

SEQ ID NO: 299124 - DNA, 1338 bp, Proteus mirabilis
atggctggccataaatcagcgaatcttttacttgtcgatgatgatccgggattattaaagctactgggtatgcgattaacaagtgaagggtttcatatcgttaccgctgaaagtgggcaagaagcacttaaactattattaaaagaaaaaatcgatctggtgatcagcgatttacgtatggatgaaatggatggtatggcgctatttgcagaaatacagcgccaacaacccggtatgcctgtgattattttaactgcacatggctccattcctgatgctgtcgcggcaactcaacagggggtgtttagtttcttgactaaacctgttgatagagatgcgctttataaagctatcgatgaagcattagaattagtgacgacggtatctgatgaagagtggtcaaaagatatcgtgacccgtagcccccaaatgttacgtttattagagcaagccaagttagttgcacaatccgatgttagcgtactgattaatgggcaaagcggtacgggtaaagaagtccttgctcaagcaatccaccgcgccagcccacgagctaaaaaaccctttattgctattaactgcggtgctttacctgaacaattattagaatctgaactatttggacatgctaaaggtgcttttactggcgcggtaagtagtcgtgaaggacttttccaagcggcagaaggaggcactctatttttggatgaaattggtgatatgccaatggcattgcaagtgaaattactgcgtgtattacaagagcgtaaagtgcggccattaggcagtaatcgtgatattgatattgatgtgcgtattctttctgcaacccatcgtgacttgccaaaagcgatggagcgtaatgaatttcgagaagatttatactatcgtttaaatgtggtgaatttacgtatccccacgttgagcgaaagagccgaggatatccctgttcttgctaaccatttattgcgcgaatcagcaaaacggcataaaccttttgtgcgtagcttctcaacggatgcgatgaaatgtctaatgacagcaagttggccgggaaatgtgcgtcagttagttaacgtcatcgagcaatgtgtcgctttaacgactgcacctgtgattagcgaagcccttgtcacacaagcattgcaaggggaaaataccgcattacctacttttgctgaagcaagaggccattttgagatgacctatttaaggaagttattgcagatgacaaagggcaatgtcactcaagctgcaaggatggcagggcgaaatcgaacagaattttataaattgttgtcacgtcatggacttgatgccaatgatttcaaagaatga

SEQ ID NO: 299125 - DNA, 123 bp, Proteus mirabilis
atggaatcgacatcttttaatgagataaccgctttctcgggaacattacaaaacagtgcaattttggcgcgttcattagctggaataacgcgatctgagcgacaaattaatgcatctggttga

SEQ ID NO: 299126 - DNA, 1011 bp, Proteus mirabilis
gtggtgaccgggcaggtaaacggtgataatgatttacagcgtgtgctgaatgaggcactggctgcgtttgaagttgatactttgcctgatatttcgggttcaacaataaagaaagtgtttcccggggaaacaacagcggccacacagctcaaagagaatatacaggatatttcttcttcgggtttgatgagttcaacatctttgcatgatgacaaggtattttcgtcctcgttatcggtgccggctgcggtagatagctatgcttctgagtcttttaattcggatacagacaatcagagttgtgtgcaatcagccgtgcctgttgtacagcctgatactttagttaaaccggatgacgatcttcagtatgcgctggctttatccgggattctgtcttcagaaaataatgacagtgcagataataaggatgaagtgaatatggttgagaacactgcgctatcagaagttgcaaattgtgaaaacaagcatgatccccagatacaaagagatatcattcagaatcccattgagtcagttacagaaatcacagaaaagaaaactgtacccgggaatatcgtgaataccggtaaggttaataaagaggaagtagttgctgataatgtgtcgccggctattttagccgaagattttattacctggcttcatcattctttgtcggaaaagacattaccggtaaatattcccgggggattggttcattccattgcagggtatttatttttacgttcgccacagatttttaccttatatctgagtcggagtccgtataaatttgagcgatatactccggttcagcgtgcattcgagtctttacgtctgcacaggagaaacggaaaacaatcaggtggactggttcattgttgggttcagagtactgcatcatcagaggaaaaaacgagttggaaaaaaactgccggttatttggtaaaaagtcagaagttgttaccgggtgaggatcgggacgacagtttgtatattaagtttgaataa

SEQ ID NO: 299127 - DNA, 1050 bp, Proteus mirabilis; identical to SEQ ID NO: 27112

SEQ ID NO: 299128 - DNA, 3102 bp, Proteus mirabilis; identical to SEQ ID NO: 296781

SEQ ID NO: 299129 - DNA, 171 bp, Proteus mirabilis
atgtgcaaagaaatgcaaataaagtttatgaaggaacttcaaaagctttatgctgatttaatagcatctcatgcaacattatatcagccaacgaggattcaaatttctagacaaactattttgtttaaaaaccttgaaaaaatcaccaattggctagataaaaaactttaa

SEQ ID NO: 299130 - DNA, 240 bp, Proteus mirabilis
atggttgcaacgctgatgctgactttagtgggatatgcagggtataaatacctgattgttgcctctgcagtcagtatctggtggttgggcatggcattatctggttataaagcaaccaatgataaagtgtgggcaagaaaattatttatattttctatcattgccattacatcattaagtgtaatgatgtctgttgatcccaccagttcaacagaaacggttctcgcttatctgagataa

SEQ ID NO: 299131 - DNA, 771 bp, Proteus mirabilis; identical to SEQ ID NO: 295504

SEQ ID NO: 299132 - DNA, 684 bp, Proteus mirabilis
atgagaaaaaatcctgatcaagatggaatacaatctgtacctgttgcttgtgtcaccgatctggacgttatgccaaactgtgctccctatattactaaggtcatccaagacgatagtgattggacaatattaggggacggagagaacagaaagtggcgtgctaagcgggattttacattgacgaaattaaatgaacataaggaaaagattaaatccaaggcccatgggcaaaatgttaagtcatttgtagcagatgagtggacactagaatatgacttagcatttgcaaacaacaacgctttggctgaagagctctatattgctgctcaattggctatatgggatgagggtaataattactctgaaaaaacagctaaggaaaaatttgagaaggcccaatccaaatatacaaccttaaaggaagaagctgacaaacttgcagcagataagggttggaacaagaatgaagttttagccagtaaagtctatgcaatgtatgtcacaggctctaaagcttcaaaatccatcgcggcacagtatttgtgtggaattatcatggacaagataacccttgaaaaaacatatgatttaagaaccaagctcccgggctatattgttgatgcaatagactatgttacatcgaatcttcgtattgtttcagggagtaagattaatgaaagttga

SEQ ID NO: 299133 - DNA, 156 bp, Proteus mirabilis
atgaccaaacaagaaaaagactggctagatactctccatcgtcaattacagcaatcacttgaatacttacactgtggcagagttgatgaagggcggatagttgctgaaatcgtcgagcgagagttaggaaaactgctcagtaaaccgaagaaatga

SEQ ID NO: 299134 - DNA, 270 bp, Proteus mirabilis
gtgctttatacatacgatgacatattgaacatcaaaaaagacatgctgtgggttattaatgaaattcgcactaaccctaagctacgtggcaatgctgaatgtcaatttggctctaacgggctagaaaaagagctgtgggcctatgatgacctattagaaaaagttggacctaatggggttgttgattctgttaaggatgattgcaactacttagatgttacttcagatctaattaggaaaatcaaagctagcatttctggtattagctaa

SEQ ID NO: 299135 - DNA, 567 bp, Proteus mirabilis
atggcactcaacgataaacaggaaatgttttgtcgcgagtacctcatcgatttaaacgctacacaagcggctattcgtgcggggtacagcgagaaaactgctaacgcacaagcgagccgattgttagtaaatgttaacatccaaaatagaattaaagaacttaaatcaaataggaatgagcgtgttgaagtagacgctgattatgtgctcaagcgtttagttgaaatagaccaaatggacgtattggacatactcaacgagagtggcgatttaaagcctgtaagggattggcctaaagcttggcgtacaacattaagcggtttagatgtcatgtcaatttctacaggtgaggacggagccgatgctttactcaaaaaaataaaatggcctgacaaagttaagaaccttgagcttcttggtaaacacgtcaaagtgcaagcattcaaagagcaaattgagcaaaaagtcgaagctacacacaacattatgcctgttccatcttgtgacaatgtggatgactgggaaaaggctgcgcaacagcaacaaggtgaggtattaggtggatga

SEQ ID NO: 299136 - DNA, 1575 bp, Proteus mirabilis
atgaattacaacgtagtatggaaacctttgcctggctctcagtctttatcactaagttgtccatgtaacgaaatattgtatgaaggaacacgtggccccggtaaaacagcggctcaattggcgcgttttaggcgcaatgttggagtgggttatggcacattttggcgtggtgttatatttgatacagaatataaaaaccttgcggatatcattactcaatcgaagcgtatgtatcgcctatttaaagatggtgctcgctttcttgcttctgcttctgagttacgctgggtgtggccgacaggtgaagagctgttattccgatttggtaaagaagcagatgattactgggattaccatggtcaagagttcccctttattggctttaacgaattaaccaagcaaaaatcagctgatttttatgaagcgatgttctcttgccgtcgttcgtcattccgtcccgaagactatccacttgaaaatggttcgctgttaaagcctatccctttagaaacattcagtactacgaatccattcggtattgggcacacatgggtaaagaaaagatttatagaaccagctcctcgtgggacggttattcgtgaaacgcaaaaagtctttaacccacaaactgaacgtgatgaggaaattacattaactcgcgtcgctattcatggttcattcaaggaaaacccttatttagatcctcagtacattgcaacattgatgggcatcaaagacccaaatcgtcgcaaagcgtgggtagagggttcttgggatgtgacgagcggtgggcgttttgaccacctttggaatgcaacgcatcacgttattaaaccgtttcagatccccgacagttggattgttgaccgctcccatgactggggggagtcaaaaccattttctaacctgtggtgggctcaatcagatggcacggaagccacattacctgatgggaggaaattctgccctcctgctggcactttaattttgataggtgaatggtacggctgtcctcctgatgagctgaataaagggttaaacatgtcatcaaccaatgttgctaaaggcattaagtggattgatgagcgtttaatcggagttgattccgttatgccgagtgaaattagtaaggacggaaagactcaagggcaattaaacatcatgccgggtatttgtaaaaaggtaattaaaggcccggctgataactccatttacacgccaaatgacgacgaagactctattgctcaaaaaatggaggctcaaggcgttgagtggatgaaagcaaacaagaatcccggttcccgtatcaacggcgcctcacttttcgttgacatgcttgaggcggtgattgaggggaaaaaaacagagtcaggcatgccagaaaaacccgctttctatgtatttgattattgccgagggtggattagccgtgtacctgttttagttagagactctaaaaaccctgatgaagtggatactgagcaagaggatcatgattgggatgctactcgctatcgtgtattgcataaacctatccgcccagcattcgaaattaacctaggaacaaccttctga

SEQ ID NO: 299137 - DNA, 891 bp, Proteus mirabilis
atgcgtattacattgcgacaactggaagtatttactgaagtacttaaaagtggttctacaacacaggcttcacaacagttggcattatctcaatccgctgtgagtgcttctttaactgatctagaaaatcagttaggagtacaacttttcgatagagtggggaagcgcttagtgactaatgaacacgggcgattattatatccaagggcactctctttacttgagcgtgctactgaagtagagcagttatttcaagccggaaatggtgctttacgtattgctgcaagcaccactattggtaattatattttgccacaaatgttgggtaattttcatcgtaactaccccgatattccacttgaaatgagtattggcaatacggaagaagtcgtcaaatcagtcagtgagttccgtgttgatttaggccttattgaaggtgcttgccaaagctctgaattgatcagccaaaaatggctactggatgaaatggtcatattttgttcccctgaacatcctttagctaaggcgaaaacagtgacattagccgatcttcaatccgcgccgtggatcctacgtgaaaacggttctgggacgcgagatgtactcaatcatctgctgtttgcttcattacccggatatcgaatcgaaatggaattaggtaattcagaagcgataaaacatgctgtaatgtatgaaatggggattagttgtttatctcgccgagtgatccaagatcaaatagataatggctctttaaaagagataaaggtcgaaggtctaaaattacaacgtactttgtatttggtctatcaccgccaaaaacatgtctctgatgccctcaaaaaattactttcatattgtaatgctgaacatttaatcgacaacgcttga

SEQ ID NO: 299138 - DNA, 846 bp, Proteus mirabilis
atgaaatttgttggcgcacatgtcagtgctgcaggtggtgttgatcaggctgtattacgagctcatgagatcaaagcaacggcatttgctctttttactaaaaatcagcgccaatggaaagcagccccgttatcaactgaatcgattgataaatttaaaaaaaattgtggaatctatggctatggtccagaacaaattttaccacacgacagctatctgattaatttagggcatccagaagaagaagcccttgaaaaatcaagagccgcttttctcgatgagatgcaacgctgtgagcaattaggcattgaattacttaattttcacccaggtagccatttaaaaaaaatcgatgttgataaatgtctgcaacgcatcgctgaatcaattaatatcaccttagataaaacccaaaatgtgaccgcagtgattgaaaataccgctggacaaggcactaacttaggctatcgttttgaacatctcgccgccattatcgatggtgtagaagataaatctcgagtgggcgtttgtattgatacttgtcacacttttgctgcaggttatgatctacgtactgttgaagactgcgaaaagacctttgctgaatttgataatattgtcggctttcaatatttaaaagccatgcacttaaatgatgctaaaagcgaattggctagtcgtgtcgatcgccatcatagtttagggcaaggcaatattggcaaagtaccctttacttatattatgcaagatacccgttttgatgggatcccacttatcttagaaacaattaatcctgatatttggccagaagaaatagcttggttaaaatcacaacaaactcaataa

SEQ ID NO: 299139 - DNA, 417 bp, Proteus mirabilis
atgtctgtagtcgttggtgttggagtgatcatcgtcaatgaaaaaggtgaagtattattaggtaaacgctgtggtaaacacgccccttattggtcaatttttggtggccatgtcgatccgggggaaacctttgagcaatgtgctattcgtgaaattgaagaagagattggcattaccatccctactcctgaagtgattgggatcagcaacaatctacaaacttatcaattagaaggtaaacatactgtatctatctgtatgctagcacaatatcaaggtggcgagcctaagttaatggagccagataaatgttctgaactacgctggtgctcacctgatgatttacctgaacctcattttgaagcgagccgtaattctattgctttatggaaaagtaaacgtttctatcaaccttaa

SEQ ID NO: 299140 - DNA, 1641 bp, Proteus mirabilis
atgaaaaagaaagttatgttaaaaatgatgtttcctgtcagcattatatcacttgcgctgacctcttttctttctcatgcggtaatacctccagaaggtactcttcttgcgaaacaacaagatattgttattaataatggcactgaagtttcctcccttgatccacataaagtggaaggggtaccagaaagtaatattattttaaatttattagaagggctcacttatatggggcctaatggcgaaagtatgccgggggttgccgctaaatgggagagctcagaagacaataaaacatggactttctatttacgcgatgatgcgaaatggagtgatggtacaccggttactgcagatgattttgtttatagttggcgtcgattaactgatccccaaactggctcgccttatgccagttatcttgaatatgcctatgtggaaaatgttgcagatattctgacaggcaagaaatccccagagagtctaggggtaaaagcaattgatccacatactttgcaagttacgctcacacaaccggttccctatctggtggatatgctaaaccacacctcattaaaaccagttaaaaaagagattgttgaaaaatatggtgtcaattggactcgcccggaaaactttgtcggtaatggggcgtatttaattgataattgggtggttaatgaaaaaatcactttaaaacgtaatccgctttattgggataataaaaacaccattattgaacgagcgacttttttacctattagctcagaaaccagtgatattaatcgctaccgtagcggtgaagttcaaatcaccaatagcgctattcctcctacgctttatcgaaagatgaaacaagagcaaccagagaatctacatgttacgccttacctatgtactttcttttatgagcttaataataaacgtccaccttttgatgatccccgtgtgcgtgaagcggtaaaattaagtttagatagagaaattatcgcggaaaagatcatggggcaagggcaaataccggcttactcttttactccaccttttattaataatggtaagtttaaaccccctaaatgggcaggttggacgcaacaacagcgtcatgaaagagcgcgtgagttattaaaagaagccggttatgacagccaaaacccattatcttttacattgttgtacaacacatccgatcagaataagcaacaagctattgctgccgcttctatgtggaaaaagaatattggtgctaatgtcactttacaaaatcaagagtggaaaacgacgttagaaaatcgtaaccaaggtaattaccaagtagcaagggcaacatggtgtgccgattacaatgaaccaacatcatttttaaactctttcctctccactagcagtctaaatactattttatatgaaaatagtgattatgatgccgcattaaagaatgcattactggccactgataatgaagcgcgtcaccaactgtatcaacgtgctgaagccttgttagacaaggactctgctattgtaccaatctattatcgtgtgagtgtcagaatggtcagtcctaaagtgggcggatttaccggtaaagacccctttgattatacggacttaaagcgctattttataaaggcagataaataa

SEQ ID NO: 299141 - DNA, 714 bp, Proteus mirabilis
atgagtcaacatgaagatggctttcctcaaagactattatcagaaaggtctaggcagaacctaacccagcaagaacttgcaaatatggttggtatatctcaacgtcaaatagctgcttatgaagctggagagtctaaaccaaggataggaactctaatgaagttagcaaatgctcttgacgttagttttatatggcttgctagccactcaatagatattggtgatattaaagttattggaatgaaggataaacctgctgatagagatgctatttccatacctttaatagatattgataaagtcataccttggcttagaaatgaaatgtatagagaaagtattcaagagtacatttccataggggggaatgttaatcctggttcatttgctgttattcaaaaagattctgcaatgagtcatattagcaaggaagggttttcattccccattggatcaatagttattttcgatcgccagaaaagccccgctaaagatggtgacttcgtcctagttataattaatcacaaatggtctgtatttaggcaaatatttattggcagtaatgagtgtaatctcattcctttagataatcggcatccagtagaaaaaatatctacggaaagtatagaaaaatgcaaaaatctagttatacccgctgtaaaagttattttcgatttaccagcgttacatagagataacgataccagtaaataa

SEQ ID NO: 299142 - DNA, 795 bp, Proteus mirabilis
atgaacgaattaactttagcatcacatgaaacaaatgtcactatgtcaagtcgtgagattgcagaattaacaggaaaggctcaccatcacgtagttcgtgacattgagaaaatgtttatggaactagattttaattatccaaaaacggatgattatgtttctaaagagttttttgttaagcgtaaaaattacaagggtcgtactgttattgatgaaataggattagaccaagatcttacaatgacgttaatgaccggatacagtgttccattgcgccataaagtatcaaaacgctggagagagcttgagtcaggaaaggcaacaccaattgttgcacttaatgaccctgaattcttgcgttctgctttattaaattacactgaaaaagtattagctcttgaatcatcaaataaagaactaacaaataaagttgagtgtatgtctaacttattcaaagaaggtatgactccaactcagttttgcaaaatgcttaacggcgtaaacactcaacaagttcaaatgtggttagctgaaagaaactggctatataacgaaagtaagtcaggtaaaaatattcgctggcgtgtcgcttcatatgctcgtgataagtacatgacagaaaaccagagtgaaattaatccacatggtcacgagccttttattaagtatcaaccagttttattaaagaaaggtgctaaacgtctttatgatctctatcttgctggtgaactaccaatgaaaaagaactgggatggtttatttactcatgataaggaattcaaagaagtagcttaa

SEQ ID NO: 299143 - DNA, 810 bp, Proteus mirabilis
atgactgatgtgattgaaaacgaaagtatggttgaatgccctgaatgtgggaactcgcatggaaatactgagttatgtgagtgtggatatgaccctgagctaattaataataaaaacagagcggaatattcaccgaagcatgcattgacgtcaacattagatttggttcctagcaataatgggccagtgtttgcgagtaaaactggtttggagtgggagttagattctgatgatgtggtgcaattcattgggcaggcagataaaaaatttatgcggaaaaggaaaagtcatggagtgataaaaaaagatcttatgccgcttaataccccaaatgtctttttagattacttagcaggaaagcttaattttacctcgtttgttaattcagtaatgaagttaatgcaaagagaggcaaatgaagatagggcaaaattagttggcggtaatttcgtatttatacactatcaggtagatcaagataaggaaagtgatggcagacttttgattctaatggtagataaaaaatcagcatttaattttgatagcaaccttattccagaaaaaattccatcaattaacatagatgcgttacggcaggctgtattgattgatttgactttgtttaaagcttcttacccaaataacgatggcgaaccttatttgcatttcatttcagggaaatcaaaaagtgaatttttcaaacgtgctttagggtgcgaccctaaagttgacaataatagaagtattcagaatgtcagtattgcgtttgatgatttttctgaaaaaatgaaaaataaaagcattggataa

SEQ ID NO: 299144 - DNA, 771 bp, Proteus mirabilis
atgaacgaacatacaatcagtaatgaatctcttattttttctctattactggtcttagtcgctatatttattagccgaaaagagaaactttcattagagaaagatattatttggagtaccgcccgagcgataattcaactctttattgttggctacgtattaacttatattttcgacgtcgaccatattatccttacatttctaatggtcttatttatctgttataatgctgcctataatgctaaaaaacgcagtaaatacgttaaagatatttttattatctcatttgtcgctattaccacgggggcattgctcaccttaagtattttactttttactcatgccattgcctttacccctatccaaattattcctattaccggtatgatcgcggggaatgcaatgattgcgaccggactttgttataatcagcttgggcaacgttttgaaaatcatcaacaacagatccaagaaatgttaagtttaggggcaacccctaaaattgcttcaatggctattattcgagatagtattaaatcgtcgttaattccgaccgttgacgcagccaagaccgtgggaattgtaagcttacctggaatgatgtctggattaatttttgccggtgttgatccactacaagcggttaaataccaaattatggtcacttttatgttgatggcaaccgccagtatttcaacaattattgcttgctatttaacctataagaaattctttaatcaacgccatcagttaatgacgtttaatcaataa

SEQ ID NO: 299145 - DNA, 657 bp, Proteus mirabilis
atgtatcaacatagagattgggaaggttcgttgcttgattttcctgttaataaagtgatttgtgtgggcagtaattatgcaaaccacataaaagagatgggctcggtgcgctctgaagagccggttatctttattaaaccagaaacggcgatgtgtgatattcgccaacctattgcgatccccaaagagatgggggcggtgcatcatgaaatagagttagcggtattaattggtcagccactgaaacaagccaatgaagatagggttgatcgtgctattgctggttttggtgttggtttagatctcactttacgtgatttacaaagtcaattaaaaaaagcgggacaaccttgggagaaaagtaaagcgtttgatggttcagcgcctttgtcgggatttattccggtgaactcttttggtgatccccaaaatgttgacttaatgttgaaagttaatggtgaaattcgtcagcaaggcaacagtcgtgatatgctaacgcctgttttaccccttatcagttatatgtcgcgcttttttacccttcgcccaggtgatgttattttaacgggaacaccagaaggtgtcggtcccttagcatcgggtgatatgttggtattaagtgtcaatgaacatcagctgaccacacgggttatttaa

SEQ ID NO: 299146 - DNA, 1137 bp, Proteus mirabilis
atgagctgtaatttcaaatattcgttcatcgcggtgattgtttctactgttttgctatctgcttgtgcagatagccatcagaagagtgcagaaaaaaaacctgtaacaagtgaaattgccaatattgcgacatcggcaccggctcgctggaaacagattgatgttgcctcacttgaacaggcgtttccaaaacagtcacggacacctgcacaatttcctgcttatgtagatgctttaaaacaaaaagcggctgaattgggttataaacctgaaactatcaattttgccttttcggaaattcactttattgacagagtggtgaagtcagaccgtaatcagccagaaaagaaaattactttagatgtgtatttacctcgagtggtgacgaaaggacgtatcgcagaaggggcgaaactttatcaagctaaccaacaaaccctagcgcagatcagcaatcaatatggtgtgcctgcaaattatattgttgccttatggggattagaaagtggttttggtcgagtacaaggaaaagaagatgttatctcagcactggccacattagcttttgaaggtcgccgtgaggccttgtttagtcgccaattaatggccgcacttgagataatcgaaaatggacatttacctgtaggccagcgtttaaaaggctcttgggcaggcgcaatggggcagacacagtttatgccatcttcatttttgacttacgctgctgatggcaatggtgatggcaatattgatatatggaatagccgtgaagatgcgtttgcttcagccgctaattatttagcaaccgagggatggcaacgcgatctcccttggggggaacaagtcagtttacctgctaattttaatcaacagttggaaggtataaaaacagagcaacaaaaaacggtcgcacaatggaaggcgctaggggtgcaattacccgctaatagccaattaagtgatgatatgaaggtatggctgataattcctgatgatgatttgcatagaagttatttagtcacccaaaatttccgtactatcatgcattggaatagctcttacttttttgctttgagcattgtgacgatggctgatggcgttgccaataaaataaatacactgccaactcaacactaa

SEQ ID NO: 299147 - DNA, 972 bp, Proteus mirabilis; identical to SEQ ID NO: 297153

SEQ ID NO: 299148 - DNA, 996 bp, Proteus mirabilis
atgaaaaagatattaaataaaccagaaaattatgttgatgaaacattagctggcttatgccttgcacataatgatatttatcgtcaaccacaaccacgtttaattacgcgagctaacagctcagataaagctaaagtgggaattgttactggcggaggatcagggcaccttcccgttttcaccggatatgtaggtgaaggtttattagatgccgccgcagtcggtgatgtatttgcctcaccgtcagcagatctaatggctgatgcgatacgcgctgcggataatgggcagggggtattactgctctatggtaattatggtggcgatattatgaattttgatatggcctctgaaacggtagattttgaagataatattcgatgtacaacggtgttagcgacagatgatattgcttctgcaacaccagaagaagcgcataaacgtcgtggtgtggctggaatgatttatggttttaaaatggcaggggccaaagctcaagaaggggcatctcttgatgaggtgacccgcattgctcaaaaaaccatggaaaacacgcgaacaataggctgtgccttaacatcttgcaccttacccgctgttggacatcctacctttgaaatcgctgacgatgaaatggaaatgggaatggggatccacggtgaaccaggaatttggcgcgataaattacgtagtgcagatgatattgctgaagaaatgtttcaacgtttacaagccgaattatcactaaaaaagggtgataaagtctcagtattagtcaactcgttaggtgcaacgcctttagaagaactctatattttatataataaagttgttcaacttattgataatacaggggcgactatcattcacccattagtcggccgttatgcaacatcaatggaaatgaccggtgctagcttaactttttgtaaacttgatgatgagcttgaagctttattgaatgcacctgcacactgtgcattttggagagtgtga

SEQ ID NO: 299149 - DNA, 1488 bp, Proteus mirabilis
atggatatatttattagcgcattagcttatattgattacacgacaatacttgttgtcatcggcgcttgcttatttggtttatttgttggagcaattccggggttaacatcaaccatggcaattgctttaatggtgccttttactttctttcttgatccaattcctgcattagcactgatgatctccgtaggtgcatcctcgatatttgccggcgatattccaggggcattattaaatattcccggaacacccgcctctgcagcttatactaacgatgcccatacattggttaaagaaggtaaaactaatcgtgtattagggatgtcattaacaagctccgttattggtggggtgatcggcacaattattttagcgtcaaccgctccgttgttagccgagtttgcacttaaatttagctcttacgaatatatgtggcttactttaattggattaagctgcgccactattgtttctggcgctcaaattagaaaaagtttgctagcactgtttttcggtattgctttagccactattggctacgatgaatttacaggacaagcccgttttacctttggtgaagtctctttaatgcaaggtgttagttttattcccgccatgatagggctatttgctatctctggtgcgattaaatattacgtcgatcgctggaaagaaaagcaaattaaattagcagttaatacagataatagctcatataatatttttaaaggggtgggaaaggttgtttgccaacgtaaagggggcattttccgtagtggtattattggtacattgataggtgctttacccggtgctggtgccgatatcgctgcgtggatctcttatgcggtatctaaaaaattatcaaaaaaaccgcaaaagtatgggcaaggctcagaagaaggtattgttgatgcatcagcaagtaataatgctagtttagcaggaagttggataccttcattggtttttggtattcccggtgattctgcggcagctattatcattggtgtattgtatatgaaagatatgcaacctggaccaactctctttttatttaatccagataaactgtacgccgtttttatcattttctttattgcgaatttaatcttattacctatagcttttattgttgttaattttttaaagaaaattgttgctattgataatgcaattctttatccagcaattattttatttagtattgtcggttcatttgctattactaatacgatgtcatccattgtggttatgatggtgatgggagttatcggctattttcttcaacagcgtaactttccaatctcaccgattatattagggatgattttaggaccgatgctagagaagaatttactttcttcgttgatgaaatcggacggagagctaattaattttgttaatagacctatttcaattgtattagccagtgttttcctattaattgtcgctatgcaaattaggagcgcatttaaaaccaaataa

SEQ ID NO: 299150 - DNA, 2037 bp, Proteus mirabilis
atggctggattggtagataaattaccagggatttcttcatctggctcgccaagacctggtgggcaaactttaaatatttggggaatgggcaatccggaagatgtgaaaatcactcttgatggtacaccgaagacgtttgaaaaatatcgtcaaggttccatatttatcgatcctgaattaattaaacgccttgatgtcgataaaggaccacataatatcacccaaggaaatggaggatttggtggctccgtacggattgaaacgaaagatccggatgacttactgttacctgatcagcatattggtatgtttttaaaatatggacatcataccaatgataggcaaaatcgttatagtggtgcgatatatggcaagctaatggatggaacggctgacggtctattttattttaatcgtcgtaaaagcgatgatttacgtcgtcctgatggcactaaatttggttattcacaatcagatcaagattcgtttttaattaaaaccaatgtctatttaacagacgcacaaacattaactttatcagcatcaagatctgtcagtgatggctggacgccttgggctgcgaagcgagatgaactggcaaaaccgagccaatatgatgttgataaatatggttttgatggagcgatgaaacgtaagttagtttatcgtgaccaaaaagatgacactgtgagtgtgaaatggaatattcagccaattgattctgacctgattaatttcacattgacttacggttattcaaataccaaacagaatgataaacgccctgataatgcgagttcttatctaagtagtagtatgggtaaccaaagttgggtcaactataaaaatcatcaaattgaagtgaaaaatgaaagtaccgtgatgcaaggagctactgaacatgtgattttagtgggagcgcgttggcaccgtaatgatcgtaatgtgttaatgtttacgcgggataaagcgaaaaatccaaattataattatggctattatgcaccaccttatatgccagaagggacgcaaacaaccacgagtttttatcttcaagattcaattagttatcgaacactaaccctcacgcctggtgtgcgttatgatatagtgaaaaatcaaggagtagggagtcgagcgaaggtttatcaagatcctaatccctattacggtcatgattatagtgatgtaacttatcgtggcattacacctcatttgggtattttatggaaagcgagccccaatattagattttttggtgatataactcatacatggcgtgcgccgttaattgatgaacaatatgaagtgcaagccagtatctctagtttgacaggcacgagtcgccatttagataaagagaccgttaccgcaacacggattggcgccattgttgattttgaaaatgttttccaacaagaagatcagcttcaacttcgaagcacattttttgatactcgtgggaaagatgagatattccgtcgtcgcggtgtctattgtgaaagtggaaaagtaaccggaaacaatggaagttgtcctccttcccttggaaattatcgcaatttacctggctaccatattcaaggtatggaaatagaggcattttatgacagtgctaatctctttggtcgcttagcgtattcgacaatgaaaggtaaacgcgatcaatctcctcgtgatccgtggtttggacaaaaaacatggattgcagaaattcaaccggatgcattacatgccacccttggaatgaaaatcccacaaataaatatggttgctgggtggacaggggactttattggcgctcaacgtcgttcaccgatggatgctgatccggctgctacttattggtcattaccaaaaagtaaaggctatgccattcatggactattcgctaattggaaacctgcttttatcgataataccgagatacgttttactgtcgccaatttatttaaccgtgattattacccttatttaggtgagtcggtatctggtactgggcgagattatcgctttactgtggttaaaagtttttaa

SEQ ID NO: 299151 - DNA, 1002 bp, Proteus mirabilis
atggctaatgttaatccgaatactgcagtgcctttattaaaagcggttaatcttgccaaatattacagcgttaaaggtggactttttgcgaaggaaaaaaccgttaaggcactagatggcgtctcttttgagctcgagcgaggaaaaacgttagccgtggttggggagtctggctgtggtaagtcaaccttagggcgattattaacgatgattgaagtaccaacctcaggagagctttcatatcaagggcaaaatttattagttaaagataaatcagcggaaaaattacggcgccaaaagatccaaattgtctttcaaaatccttatggatcattaaatccacgtaagaaagtggggcaaatattagaagagcctctattaattaataccacgttaagtgcacaagatcgtaaagaaaaagtactttctatgatggcgaaagtaggtttaaaggctgagcactatagtcgttacccgcatatgttttcaggaggacaacgccaacgtattgctatcgcccgtggtttaatgcttgaacctgatattgtggttgctgatgagcctgtatctgccctagacgtttctgtgcgagctcaggtgcttaatttaatgatggatctccagcaagagatgggactttcttatgtttttatttcccatgatctttccgttgttgaacatattgcagatgaagtggtggtgatgtatttagggcgctgtgttgaaaagggcactaaaacacagatatttgaaaacccacaacatccttacacccaagcgttattatcagcaacaccaagattaacaccgacattaaggcgagagagaattaaattaacgggtgaattacctagtccgttaaatccaccaccaggatgtgcttttgctgctcgttgtcggcgcgcatttggaatgtgtacacaattacaaccgactttaaaagagtatcatgggcagttgattgcttgttttgccgtagagcaagatcacggcgagttttaa

SEQ ID NO: 299152 - DNA, 1020 bp, Proteus mirabilis
atgctgcaatttatccttcagcgtttggggctcgtgatcccaacgtttatcggaattacgttattaacctttatttttgtccatcttattccgggtgatccggtcatgattatggcgggagagcgtggattatcaccagagcgtcacgcttatttaatggcggaattaggactagataaaccgctatggcaacaatatttaaattaccttaacggcattatgcacggtgatttaggtatttcactaaaaagtcgtattcctgtctgggatgaatttttgccacgatttaaagcaaccttagagctaggtatttgtgccatgatttttgctgtttcagtgggcattcccgttggggtgcttgcggcagtaaaacgaggttctatttttgatcatacggcaatcagtgtgtcacttgcaggatattctatgcctatcttctggtgggggatcatgctgattatgctcgtttcagtgaagcttgatctaacacctgtatcaggccgattggcggatagtgtctttctagatgatagctatccactaacgggatttatgttgattgatacgctcttttggggggaagaaggtgattttcttgatgcgctacaccatattattttaccggccattgtgcttgggactattccattagcggttattgtgcgcatgacgcgttcggcaatgttggaagtattgggagaagattatattcgcactgccagagcaaaaggattaagtcgtgcacgagtgattttgatccatgcattacgtaacgcaatgttacctgttgtgacggtgattggtttacaagttggtacgatgctagccggagcgatactgacagaaactattttttcatggccggggttaggtcgctggctaattgatgctctacaacgtcgagactaccctgttgttcaagggggagtattgctcattgccactatgatcattttcgtgaatctattagtggatgtgctatatggcattgttaacccacgtatccgtcataagaaataa

SEQ ID NO: 299153 - DNA, 1590 bp, Proteus mirabilis; identical to SEQ ID NO: 297044

SEQ ID NO: 299154 - DNA, 192 bp, Proteus mirabilis; identical to SEQ ID NO: 297043

SEQ ID NO: 299155 - DNA, 864 bp, Proteus mirabilis
  misc_feature (848)..(857): n is a, c, g, or t
gtgataaaaaaaatattagatattctccctatttttgggaaaaaagacgtcgatattactgaacaatatcttcaaggctctcttgtcctactggctatatttgatgaaagtttacctaagcgtgcattagattatgtacttacaggtacaaaccctgaaattctatttgaattaaataaactagatgcagcgaaagccgccgtttattttcatcgtgcgggaacattagagtggtggtatgccagtaatgttgatacaggaaagtacggtaaggttatcacccaaggccttaatgcccgccataaactctactcaaaggttggtgaaagtttttccttagagcaagtggcccgttttgccaaagtcatcgctgccgcatgtcaagatatcaatattaaagtaacaacaacgcaagtccccacttgggttatctacctgttagttgatgcgttttataccacttacgataatgcacgtaaccttaatttagaacatcgtaaacattggagtatggagtttatcgccaatatggtcgaagcagaggccaatattgccggtgaaaatgcgttatttgcaatttttgatagaaaagatgtctctgaatattatgccgctaatcttaagcgtatttatgaactgtgtgatttaaaagactatctactttcacatcaagaatttgttagaaaagaattagttgaaaaactttcagcgaatggcttagtcgagctaataaattatctaaataaaaatacgatattacgcgatacttttgcagatattattgttttacttgccactagcagtttaagaaccgtcaaaaaaacggctgaacctattttaaatacctnnnnnnnnnnctgctga

SEQ ID NO: 299156 - DNA, 1341 bp, Proteus mirabilis
atgcatcaatctgatgtagcggatcgctcacttttttcccttagctggcctatttttattgatatttttcttcatcttgccacgctattgattaacacttacatgataagtcatgtctctactgcctatttagctgcaatgggcgtaggtaaccaagtttttgatctttttatcaccatatttaactttattagcgtgggatgtagcgttgttattgctcaatatttaggcgccggtaagcgcgataaagccagtcaagctattcatatttctatcgcctttaactttttgctgggctttagtagtgccattattattctcttttttggctacaacattctaaatgtaatgaatacgccagagcatttagtacaagatggctataactatctccatattttggggatttgtcttattcctgaagcaatttcaattatcttagcagcctgtttgcgggtttatggtaaatcgaaagcggcgatgtatgtgacgttaattgccaatattgtcactgttatcggcaatatgattgtactatatggtttctttgggcttccacaatacggtttagtgggtgttgcatggtcaacagttgtcggtcgtattattgccgttgtcttattatgtggtcttttattctatggattaagaattaaattcgatataagactattagtgatttggtctaaaaatatgttagccaaaattctacatattggtttacctgctgcaggtgaaaacctagtgtggattttacattatatgaccgcctctgcctttataggcttaatgggagaagttcctctcgccgcacaaacactctatttccaactatcattattcttaatgttatttggcattgcgattagcattggtaatgaaatattagtcggtcatttagttggtgcaaaacgatttgatgatgcatttacacggggttttaaaagcctaaaagcaggtgtgctatttactattggcgtggtgattatttattggtttatgcgtgatcctattttgtattctatcaccgaagatcaacgcattatcgaccaactgttgcctttatttattttatcggtctttttggagcctgggcgtacatttaatattgttatggttaatgcgttacgtgcagccggagatgccaaattcccactcattacagccgtttgttttatgtggggagttgctattcctattggctatttccttggtataaaaatggaaatgggtttaattgggatttggataggttttctttgcgatgagtggctacgaggcttaacaaatgcatggcgttggcgctctcgtaaatggcaagctaagcgcttagatatttga

SEQ ID NO: 299157 - DNA, 948 bp, Proteus mirabilis
atgaaagtctggtctttaggtgatgcggttgttgacctaattccactgcaaaatatgcaatatgaagcatgtgctggtggagcaccagtgaatgtcgctgcaggtgttgcaaaattaggacagcaaagtggctttattggtcgggtcggtgaagatgcatttggtcactttatgcaaaaaacgttatttgatctcggtgtagacaccagcacaatggaatttgatgagttacatcgtaccagtacagtcttagtttcgttgcaagaaaatggcgaacgagattttacttttttagttgcggactctgctgatcaatttcttaccaataaatcactgcctgtatttgaaaaagacattttacatttttgttcacttgctttagttaacccaatttgtcgctcgacgctagatagtgctattagtaaagtaaaaaatagcgactctttactgagtttcgatattaatttacgcccccaaatgtggcgtgatcatgaagaaatgcgtgcgatcatcgatgaatatgctcataaagcagatattttgaaattatctgaagatgagctgacttggatgactcaggaaattacgttagaaaatgcattaaaaaaattagctgattatcctgctcgtttaaaagtgatcacccaaggctctaaaggatgtttagtgttgacgcctacaacacaagttgccttgagtgcctttaccgtcaattgtgttgataccacaggggcaggtgatgcctttatgtcaggattattagccgcagttgcagaatatggttttgctgatgatgaacaatatttattaaaaattattacgcaagccgcggcctgtggcgcattagcaaccactaaaaagggcgctattgctgcagcaccgagccgaaaagtattgcgtgaatttgtcagtaaacaaccgccgttacatgtacgagatattttttaa

SEQ ID NO: 299158 - DNA, 561 bp, Proteus mirabilis
atgtggaactcccctatgccttcgcaacaggagttttgggctggttgtttcacgcttcctcgtgaaattaactttgataaaagggcaaaccgtttacgtatgaccccgataaaagaagttgaaagtctcagacaaacaagaaatacgatagagatgaccacactcaataaccaagcgcttaaattactcgataagacaccggctattgagttaaatttaacctggtcattagatagccaagcggaaaaatttggattatggctaggaaaaggtttagaggtatttgtcgataatcaatcaaatcgctttgtgatccgtcgccattatccacaatataatatcagtggatcacgtagcacaccgttgccagtaggaagcgaaattaacttacgtatatttattgatcgctcatcaatagaggtttttatcaatcacggagagctgacctttagtagccgttattatgcagatgaaaatgatcgcgatttatcgctatttgccacagatggcagtgccacattaatcgctggcgaatattggacactatcaacgataagttga

SEQ ID NO: 299159 - DNA, 570 bp, Proteus mirabilis
gtgcctcaatctgggtattatgagttcaccccctcaaatacacttattctgaaaccgagagattatggcataagcattattcctgctgattttaaccctcatcaatctaaaacgggaaaagtgggtaatgaagagccacccattgagtttaattatattgttaccaccagtggccctagacaagcagactctattactgcatctgtagaaggaccacaaacaacattaaaagggcaatcctattgtttattctcctccagtgataaccgacttaatgtgccttttccggcttatctctcatttaaaaatagtgatggtacggatgcaaaatatagagcgagttgtgatagtcatgaaatttcattaaaaaatgcgttatggacagaaacaccatgggatagacctgatgaagacttaggctctttttatagaacgaacctagatttatcttttccaatgaatgatgctaactcatttttcactttagatggtattgattggctaggaacagtctcagccagtggaatggtaacagttaaggctatatggactgggcctgatattaactaa

SEQ ID NO: 299160 - DNA, 273 bp, Proteus mirabilis
ttgcaatttaatgtagctattagttctggattttcaattgatgctaggccttattttttagattctagtgcaaagataacagtccatacattaaaagcctgcgatgtgacgccacaaacagcaacatcgattaattaccgtagtcaaatagcacaaaattttgctacaccgactaaactcgatgagaatattgccagtataaatgttgattgtccctatgctgggaatgtacatatcacattaagaccgtttaataccttagtcggcaagtaa

SEQ ID NO: 299161 - DNA, 1518 bp, Proteus mirabilis
gtgattaaagaacccttacaaggaggaaaacttgctataatgaccatcgcacttgcgctggccacttttatgcaagttctcgattcaacaatcgctaacgtagccatcccgacaatagcgggtaacttaggtgcatcaaattctcaaggcacttgggttattacctcatttggtgttgcaaatgctatctcaattcctattactggctggctggcaaaacgtattggtgaagtacgcctctttatgtggtcaacagcactatttgccttaacatcatggctgtgtggtatttctcaaagtttagaaatgctgatctttttccgtgtacttcaaggtttagtcgcaggccccttaattccgttatcacaaagtttgctattgaataactatccaccagcaaaacgcaatatggcattagcgttatggtcggttaccattgtcgttgcacctattttaggccctattttaggtggctatatcagtgataattaccattggggatggatcttctttattaacgtaccttttggtgtgttaattattatgtgcatctcaaatacattagcgggtcgcgaaaccaaaacggaaattaaaccaatagataccattggtctcgtactattggtggttggtgttggtgcactacagatcatgcttgatcaaggtaaagagctggattggtttaattcaactgaaattattgtacttactattattgctgtagtggcgttaagtttcttaattgtgtgggagttaactgacgaacaccctgttattgatctttctctgtttaaaagtcgcaatttcactattggctgtttaacccttagtctcgcttatatgatctatttcggtactattgtgttgctccctctcctgttgcaagaagtctttggttataccgcaacatgggcgggtttagctgcagcctctgttggtttattaccgctgatcattacaccaatcatcggaaaatttggtggaaaaatcgacttacgctatatcattagctttagctttattatgtttgcggtatgtttttattggcgagcttatacttttgaacccggaatggattttgccacagttgcttggccacaattctggcaaggtttaggtgtagcatgtttctttatgccattaaccacgatgactttatcgggattacctccggagaaaatggcctcggcatccagtttatctaattttttaagaaccttagcgggtgcaattggcgcatcattaacgacaaccatttggacacaaagggagtcattacatcatgaaacctttgttgaaaaaattaatccactcgatcccgatgcacaattggcttttcaacagatgagagaattggggctttctgatgaacaaacctccgcttatttagctaaaacaatcactgaacaaggtctgattatttcagcgaatgaaattttctggctagcggcaggaatattcattttaatgctggtggttgtttggtttgctaaaccgccattctcaccgggtaaataa

SEQ ID NO: 299162 - DNA, 420 bp, Proteus mirabilis
atgataaaggacaaaaagatcagtgcaccggcacagaaaaacgtgtttcgaataccgaacaagtcaggtaaccaacctccagctagagggccaataagattacccgccattacaccacatgaaacaatgcccaacgcccaagcaacacgctctcttggagcttgtactgcaataagaatagttgctccagatgagtatccccccgccaaaccaactaatagccttagaccgacaagttgccaaatatttgttaccattcccataagtgagacggtcaccgccataccaagactggctcttacgagcatcgatttacgtccatatttgtcaccgagctttccccatactggagcaattaagcctgcagtgataaaggttgcactgaatgccacgccagaccattggacaatggcggcgtga

SEQ ID NO: 299163 - DNA, 747 bp, Proteus mirabilis; identical to SEQ ID NO: 238183

SEQ ID NO: 299164 - DNA, 267 bp, Proteus mirabilis
atgccattattacgtgctgatttccttgctaccgagcgttatttttttcaaaaaagcactaaacggctttttcatacccctgttttattaatgtatggtagtcatgatagtgaagctgataaaaacgaagttgaagcatggcaagattggatagataagcattgcactattaattgcatcgctggagatcacttttatccaattacacgcccaaatactttttgtcgttttattattgatttttatcaccaatttatcaatgattaa

SEQ ID NO: 299165 - DNA, 225 bp, Proteus mirabilis
atgtgttacacagagaactttaatactctattgtggacaatttcacgtacaatcgagtattataaaacgctcaatctaacacataatattggtgaattaataggttatacaaaaaatgatatctatgcagagcggataaaaaaagcaaatattatctttctctgcctcgtcgcacaatatttagatagtttaaactgctttcaagacgaattcagaccaaagtga

SEQ ID NO: 299166 - DNA, 549 bp, Proteus mirabilis
atgaaaaagtggagtttagcagcactattacctggttttttaacgttaaatagtcaagctgttgctagttcaacagggctacctaattctgaattaacatttgaacctgaagatctcgtgtttgctcctttaaatacagaaacaccgttttatatagcagggcatagaagccatagttctcatcgaagccatcgtagtcatagctctcatcgctcttcatctgggggaggatattatcgaagtaccccttctacacaaagttattctcaaccacaaacaaccaatagaacaacttctaatttatctaataatgatttttcacaagcagttaagaattctaatgttaatcaggaacaaaaaaaacgcctgataatgagggtacaatatgccctatttgaaagacattattttaatgggatcattgatggtattatggggccaacaacacgtcaatctatacgtaactatagaagagatgcaaaattacccgctaatgtattaattgatgtagatttattaaattcattgggaatttatgcaacttattaa

SEQ ID NO: 299167 - DNA, 783 bp, Proteus mirabilis
atggaggctgaattaggttatgcgctgtttgagcgttcatcgagagagccacggccaacagaaaaagctaaagcacttgaacctcacgccagaatgattgctgagcaattaaagctattacaggttcatgctcaagagctttcaatggatctggaaagtatattaaatattggcgtcgcggcagatattaatcccgactatttattaccggcattatctgagttaacacagcgttaccccttactcaaagtgaatgtagtaaccgcggcgcaagatgacattattgagatgctgcacgcacgtaaaatccaattatgtctcgtgtatggtgggttatacgtcaatggcgatgaacaatttcaatatttgggctctgagtcattagttgccacaatttcggcaagtcatattgcacttgctcaccctgcaggggtatttattgaagatttagtgaatgtaagacagataatgatagccagccatactcaagagataagagatgtacgctctttagtggcgactaattactggcaaacagataactttcaaatggcattaggtatggttgaagcggggatgggctgggggaatttaccttattcgctgatttatacgcagttacaaaagggaaaattaaaacaactgcaatttaaaaatactaaaaatgaattgcgtttaccggtacatgcaatgtggttaaaaggcgagtcactacaaaaaggggcaaaggaattggtggagttaatgaatattcaccaacccattgtgcccaattttgattaa

SEQ ID NO: 299168 - DNA, 1380 bp, Proteus mirabilis
atgcacattcatattcttggtatttgtggcacctttatgggaagtcttgccatcttagctcgagcgaaagggcataaagtaactggctctgatgcaaatgtttatcctccaatgagcacattattggaaaatcaaggcattgagctaatcgaaggttatgatccacaacaattagaacctgctcctgacatggtgattattggcaatgcgatgactcgagggaatccttgtgttgaagcggtacttgaaaaaggattgccttacacatcagggccacaatggttacatgactatattttgcctgagcgttgggttttggccgttgcgggtacccatggtaaaacgactacggcaggtatgctggcttggattttagaagattgtggttatcaacctggttttttaattggtggtgtgccgggtaactttcaagtttcagcacaattgggggaaagcccgttttttgttattgaagctgatgagtatgacagtgctttctttgataaacgttctaaatttgttcattactcgccacgtacgcttatcttaaataatctggaattcgaccatgcggatatttttgatgatttaacggcgattcaaaaacagtttcatcatttagtccgtattgtgccgggcagtggcaaaattatcatgcctgataacgatctgaacttaaaacagaccattggtatgggatgttggagtgaggaagagtataccggtgagacgggtgattggcaggcgaaaaagatcagtaatgacagtagccactttgcagtgttccataaaggtgagcaagtcggtgaggtttgttggggactttcgggtgaacacaatatgcaaaatggcttaatggccattgtggcagctcaccacgttggtgtattaccggtagatgcatgcgcagcactcaataaatttattaacgcccgtcgtcgtttagagttacggggtgaagtaaatcaagtgagtgtttatgatgactttgcccatcatcctacggcgattttagcaacccttgaagcgctacgtagtaaagttggcggaacagcacgtattattgcggtattagaacctcgctctaatacgatgaagatggggatcagtaaagatgatatcgccccggcattgggacgtgctgatgaagttttcttatttcagccacctaacattcaatggttagtcagtgatattgccgagaagtgtgtacagcctgctcgttggagcacggatattgatacattagtggagatggttgctaaagaagctaaaccgggtgatcatattttgatcatgagcaatggtggctttggtggtatacatgaaaaactcctggcgaaattagccacaccaaaatcatctgtggatcaatattaa

SEQ ID NO: 299169 - DNA, 897 bp, Proteus mirabilis
gtgggtagcttaatttctattggtaattcacagacactgatttcatatgaaaaaattattgccttgatgagtcgccataaagaacatcatattaatataatgtctcgaatggattttttgggcatgatcattggcccattaatcggtatgttatttattgattatggttaccattatttactgattattccctgtctattttatttcattaacgccgtgttctttttgttcttttacttagtgccaaaacagcgccaatctgccactcagttacatagcctaacagagacattacaggtgacgaaaaggatagtggtgatttttacgtctcctattttggttttttctattttaattgctatcggcaataatatgtttgatggattaattgagtcgagtggggcggcgttgatcgaccaatcgatgaatttacccattaaatattatggctttattgatatttctgcggggatctgtggcgtgataggaacttatttatatggttatctaacccattatttaaatcgaaaattattaatgtctctatcaatttgtatcattacaataagttcttttctactggttatttttcaacatgatatcacggcttttattctcttttatgccctatccattattggtaaggttttttcagggaatattttacggatgttaagaatagaaattattcctgtgacacaattagctagcatttcctcactgattattttgtttaatcaactgattttgcccattgttgggggattgctctttttctctacaggaaatatttcgacagtatatatattgatgataatcgctatggcgatcaccttggtgagtggcgtaatgcttattatacgattaaaccataaaaaagagataatcataaaataa

SEQ ID NO: 299170 - DNA, 861 bp, Proteus mirabilis; identical to SEQ ID NO: 5314

SEQ ID NO: 299171 - DNA, 558 bp, Proteus mirabilis; identical to SEQ ID NO: 7707

SEQ ID NO: 299172 - DNA, 654 bp, Proteus mirabilis
atgaaaaacggctggcttaagcaattacttgatttcgctccactattagtgttttttatcttttataaatggcaagatattttctatgcttctggcgcattaattgtagcaacatggatttcagtcggtttaacatggcttattttccataaagtcgaaaaagcaccactgatcaccgcaatcgttgtaacgatatttggtacattgactatcgctttccattcagatgtctttattaaatggaaagtcaccgcaatctacgccatttttgcgctagtgcttattgcgatgcaactctttacgccgaaaacattaatggaaagaatgctaggtaaagaattagcgatgccagcgactaattggaaaaaactcaatatcgcttgggtactgttctttttagcttgtgcgctgggtaatctttatgtcgcattttctttatctcaagaaacttgggtaaactttaaagtctttgggttaacaatattaaccttaatctttactgtgattagtgttgtgtatatctggaacaaccggttacccgaagaagagacgaaagaggaatcaacagaaagtcatacatctgaaacatcagataacggaacaacatcaacatctaaagtattacataaagatgtgacatctaaatctgaataa

SEQ ID NO: 299173 - DNA, 432 bp, Proteus mirabilis
atgactgaacaacaatctttgcctaatggtgagctagtattacgtacgcttgccatgccagctgatactaacgccaatggtgatattttcggtggctggataatgtctcaaatggacattggtggtgccattttagcgaaagaaattgccttaggtcgcgttgttactgtaagtgtaacaggcattacctttctaaaacctgttgccgttggcgacgtcgtttgctgctatgctcgttgtttaaaaaccggtaactcttcaattactgttaatattgaagtgtgggttaaaaaagtagcgactgagccggtaggtcaacggtatcgtgccactgaagccgtgtttacttatgtggcagtcgatgagaataatagcgctcgtcgcctacctgaaggtaaaaccaattttaccttagcaagtaccatggaataa

SEQ ID NO: 299174 - DNA, 726 bp, Proteus mirabilis
atgcgctttaagctttgggtatttatatcactgtgtttgcatgcctcgcttgttgcggctgccatactgtatgttgtagaagataagccaattgcaccagaacctatctctatacagatgctagcctttgctgcagatgagccggtaggagagcctgagcctgtagttgaagaggtgacgcctccggagcctgagcctgttgtcgagccagaacctgagccagaaccagaaccgatcccagatgtaaaaccggtgattgaaaaaccgatagagaagaagcccgaaccgaaaccaaaacctaagccaaaaccggtggaaaaaccaaagccacctgtcgaacggccacagcaacagccattggcgctgaacaagggaaatgagatgaaaaatcttaatcccaacgctacaccgagtaataaaggtgaggaaaagcctgttgcgacaactagccaaggggaaggaaaagtacctaatgtgcttcgccaagggttacctatctatcctcctcgtgccaaggcagtgggtattgagggttcaataaaagtacgctttgatatcgatgccgatggacgggtagataatgtagaaattctctctgctaaccccaaaaatgtctttgagcgcgaagtgagaaaagcaatgcgtcaatggcgttatgagaaaatcccttataaaggtaaagtggttatcattgattttaatatagatggtgtttctgcaagttaa

SEQ ID NO: 299175 - DNA, 180 bp, Proteus mirabilis; identical to SEQ ID NO: 294972

SEQ ID NO: 299176 - DNA, 1461 bp, Proteus mirabilis
atgacaacattttatactgtattaagttggctaacttttttcttctattggctattgatcgcaggggtcacatttcgtgtcctaatgcatcgacgacctgtcacctcaacgatgacatggctactgattatttatatccttcctttagtcggtgttatcgcctattttgcctttggtgaacttcatcttggtaaacgccgtgtcgaacatgctaggcagatgtggccttccgtagttgcatggcttgaagaattaaaaaaatgtaaacatattttcgctaaacactatagtgatgttgcggagcccatttttcagttaaccgctaaacgccaaggtattaatggtgtaaaaggtaataagatccagctactaacaacttgcgaagactcattaaatgccatcacgcgtgatattaataatgcgcgcgataatattgaaatggtgttttatatctggcaatccggaggattggtagaggaagtcactgaagcccttattcaagcggctaaacgtggtgtaaaatgtcgcattatggtggattctgcaggaagccgtagtttctttcgcaccaatggccctgcaagaatgcgagccgccggcattgaatttgtcgagtcattacaagtcaatctgttccgtttcttcttgcgtcgtatggacttacgtcagcatcgtaaaatagtattaattgataactacatttcctataccggcagtatgaatatggtcgacccacgctattttaaacaagatgcgggtgtcggtcagtggattgatattatggtcagaatggaaggccctgtttctacgacactgggtattatttatgctttcgactgggaaatggaaaccggtgaacgccacttaccaccgccgccagataacaatattatgccatttgaacaagcaaatgggcatactacacaggtgattgcctcaggccccggctttcctgaagaactcattcaacaatcattaattacggccatctattcagccagaaaagaattagtcatgacaaccccctacttcgtgccaagtgacgatctggctcatgccatttcaaccgccgctatgcgtggtgtggatgtcagtattattgtgccacgaagtaatgactctttcctggtacgttgggcaagccgagccttttttactgaaatacttgaggcgggtgtaaaagtttttcaatttgaagatggcctattacatacaaaaagtgtgatggttgatggtcaactgagtatggttggctcggttaaccttgatatgcgtagtttatggcttaattttgaaataactgttgtgattgatgatgaatgttttgctagtgatcttagcatcgtacaatatgattatattgcccgttcaacacaacttactcttgatgaatgggaaaaacgtccatttatgaatcgggtgttagaacgcctttgttatttctttagcccacttctctag

SEQ ID NO: 299177 - DNA, 201 bp, Proteus mirabilis
atgagtgataaaaaaatatttcttggtatttctgctgaacaatttgtttatgatatggctctatctttaaccagcaaagatcctgagatatcaactccagatgaattcactaaaagaatgctggaattaattcctgagtgtcaaaaagcagtagaagccaacctacctaaaagtacaagtttctttgctagaaaacgctag

SEQ ID NO: 299178 - DNA, 333 bp, Proteus mirabilis
atgaaagcacaacctgaaagcctaacagtcacactctatattcatgctaaaaaacagttcgatggctcttaccaatataacgcctacgcatttaaagccgatcccaatgctggactaggttttgttattgctgaacacactgttgatgttccttttaaagagcctactcaaactgatctcattcacgctgaaattgattttctacgtaatgaacaagaaaaaatcctagctgatgcccaagtaaaaacaagtttgttagaagatcgaatccaaatgcttctctgcttggaaggcaaacccatctcaaaaaccgacgaagaaatcccttattag

SEQ ID NO: 299179 - DNA, 285 bp, Proteus mirabilis
atgaaatgttcattgtgtaaaaaagagatagatgaatatgaagcgtatgagtatcgcggattcatttcttgtggagagcactttgacgaagttattgctcgtgttgatagaaaacgccaagagattattagtcaattcgattcaatttctcgtccattaaaagggttagatgttcgacctaataatcctattggtaaagctaaccaagaattattgaaaggctctatcgaagtttgtagtaaagaaactttgttagaaaaagattatcgcaaaggaattttataa

SEQ ID NO: 299180 - DNA, 1329 bp, Proteus mirabilis
atgtctgcccaaccagcgccagataaacagttagcatctatttatttagcaattagtggtaaatcgcgaaatgaatcacccactatttttggtgaagagataacgccagcgtcccttcctcaagggttctatgcctttaacggtggtgcctttggtattcaccgttggcaagacaaaatggtgacattaaaagcctataataccaatgtatggtcatctgaaatttacaataaagataaccgttatggccgttatcaaagtcatggtgttgctcaaatcgttcgcaatggctctcaactttcacaaggctatcagcaagaaggctgggattggaatagaatgcctggcgccacaaccattcatcttccgcttaaagaacttgatagccctaacccacacaccttgatgcaacgaggtgagcgaggatttagcggcacatcagcccttgaaggaaaatatggcatgatggcgtttgatcttctttatcccgctaatcttgcgcgttttgatgctaactttaccgctaaaaaaaccgtcttagcggcggataaccatttaatttttgtcggtagcaatattaatagcagcgataaagatcaccctgtggaaacaacgttattccaacatgctattacgcctgagttaaacactatttggattaatggccaaaaaatagaaggttttccttatcaaactacgctaaaacaaggagattggataatcgatagtaatggtaacggttatttaattactcaagcagaaaaagtgaatgtcagccgccaacaccagacttcggctgaaaataaaaatcgtcaacccacgcaaggaaattttagctccgcatggatcgaccacggtattcaacccaaagatcatagttatgagtacatggttttcttagatgcaacaccggaaaaaatggcgcaattagccgagaaattccgtgctaacaatgggttataccaagttattcgtaaagataaagatgtacatattatttacgataaactaagtcaaataacaggttatgcattttatcaaccagcagtcattgacgataaatggatcaaaaaagtcgataagccgtccattgttatgacacatcaggaaggaaatatactgacggtgagtgctgtaacacctgatttaaatatgactcgccaaaaagcggcaacccccgtcaccattaatgtgacagtgaaagggaaatggcaacccacagctcaagacagtgaggtaaaatataacgtttctggggataataccgaacttattttcaccagttactttggcattccacaagaaattaaactctctcctctctcttga

SEQ ID NO: 299181 - DNA, 3042 bp, Proteus mirabilis
atgctaataaaaaattctttagcttatgcgattacactaagtttctgcttatccttacccgcacaagcattaccttctctttctcatgaaccttttggcgatctttatctttttgaagatgaaatgccaaataccttgagcacctcaaatgaccatcagctatcactaagtaaagagcatgctaaagatggcgtacagtcactcaaatggcagtatcaaccccaatcaacattaacacttaataatgaagttaattatcaagatgataaaaatacagcaacaccactcacttttatgatgtggatttacaatgaaaaaccacagtcgacgccccttacattacaatttaaacaaaataatcaagtagcattaagttttaaaacggaactgaatttcacgggttggcgaggtattgcagttccttttcgtgatatgaaaggctcagcaacaggcaaattagataaattagtcattactgcgccagatcaagcaggtacgcttttttttgatcaaataattatgagcgtacctttagataatcgttggcctattcctgactatcaaattccatatgttaataatgcagtaaatacaatggtgagtaaaaattggagtgcattattgatgtacgatcaaatgttcacagcgcattatcctacattaaattttgcgactgagtttcgtgatgatcagcctgaagtggcatctatttatcaacgttttgaatactatcaaggtgtcagtcgtgataaaaaaatcaccgctgaaatgatcgacaaaaatttagcattatggaaaagattagccttagaacaacatgctgatggctcaataaccgcaaaagcccttgatcatcctaatcgccagaattttatcaaagtcgagggggtctttagtgaagaaacccaaaaagcattacttgatgccaacatgctaagagatgtaggcaaaacgcttcttcaaacagcgatttacttgcgtagtcactccttatcagcaatcgatagaaaaaaattagaaacgctctatttattaggcactcgttacgttcttgaacaaggtttcacacgggggagtggttaccaaattattactcacgtaggttatcaaacaagagagctttttgatgcatggtttattggtcgccatattctagcaaaacataatctgttagcaccgacacaacaaaccatgatgtggtataacgcaacagggcgcatatttgaaaaagataatgaaatcgttgatgcaaatgtcgatattctcaatacccaattacagtggatgataaaaagtttattgatgttgccagattatcaacagcgccaacaagccttagcacaattgcaaagttggctaaacaaaaccattcttagttctaaaggtgtcgctggtggctttaaatctgatggctctatttttcaccattcacaacattatccagcttatgccaaagatgcatttggtggcttagcgcctagtgtttatgccttaagtcattccccttttcgtctttcatcaccagcacatgcacgcttaaaagatgtattattaaaaatgcgtatctataccaaagaaacacaaattcctctggtattaagtggcagacatcctacggggttacataaaataagtattgatcccttcaaatggatggctcttgcaggtacgcccgatggtaaacaagagctagatactacattagcagccgcttatgcaaaattagcaaacaaagatagctttgaaggtattaaagcagaaaatgaaccggtaggtgcatgggcaatgaattatgcttcaatggcaatccagcgtagagcatcaataacagcgccacagcaaagctggcttgctatcgctcgtggttttagtcgttatttagtgggtaatgaaagttatgagaataacaaccgttatggtcgttacttgcaatatgggcaacttgaaattattcctgcggatttaactaaatctggttttagtcatgcaggttgggattggaatcgatatccaggaacgactacgatccaccttccttatgatgaactagaagcaaaactaagccaattgccaagtgcaggcatagaagaaatgttgctttcaacacaacgttattctggtgccaatacactaaataataacagtatgtttgccatgaaattacatggtcacagtaaatatcaacaacaaagtctaagagcgaataaatcctatttcttatttgataatagagtgatcgcattaggctctggtattgaaaataatgataaacaacatacaacagaaacgacactgttccagtttgctgttcctaagttacaatcaattataattaatggtaaaaaagtgaaccaactcggtactcaattaaccttaaataatgccgatacattaattgatccggcgggtaacttgtataaattagctaaagggcaaacggtagaatttagttatcaaaaacaatactctgttgatgacagaaattcacagcaaacagaacaattgtttgcaacagccgttatctctcacggtaaagcccctaaaaatgcaaattatgaatatgcaatagccatagaagcacaagataataaagcgcctgaatacaccgtattgcagcataataatcaacttcatgcagtaaaagataaaatcacgcaagaagagggatatgctttttttaatgccaccgaagtcaattcatctcaagctttattattatcaagtgattcccccactatggtaatggtaaaaaaacaaaaacaacaattaacgctaagtattgttaatcctgatttaaatttatatcagggtattgaagctgaccaaattgataataagggtaaccaggttgaagtgagtgtttattctcgccaatggcttacagccgatcctcaaccaataagtagtacagttactgtaaaagggatttggaaattagccacaccacaattaggtgttaatattagatatcaaaataataatacgctaattacaacaacgactatacaagcaataccaataacagtttatttaattaagtaa

SEQ ID NO: 299182 - DNA, 690 bp, Proteus mirabilis
atgcagaattctcaaggggttaactctgttgatatcgcagtgactattttagagtttttagcatctcaaggaggtgctgcacgctcttctgagatagctaaggcatgctcactatcaaaaagtcgtctacataaatatttagtgtctctttgccgtagtgacatgctctatcaagagagtgaaggagggcagtattgtttaggtagcaaaattataatgctggctgaggcaacacacacaaacctctctttagttgatgaaattaatcaaagactttgtgaatttagagatgagcataatatgtcaacaggacttgttattgctcaaggtaagaagctctatttagtgagatataatcgtagttttaaacatgtcgatattgattttctgccaaatacacccgttccacataaattgagtgcggcaggcgcgacttatgcagtctttagtcatttagaaattgatgctgatttatcaatacagcaaaaaaacagtatacatcaacaaggttttgctattcgccaacaacccgctgaaggtattcctggggctcaatctattgcatgtcctgtatttaataggaaaggtgaaatggtcgcagccgcattgaccatgggatttattaaacctgaaaaccaaatagaattaggtaatgcattaaaagcaaaaattcgccatgttttatcttaa

SEQ ID NO: 299183 - DNA, 465 bp, Proteus mirabilis
  misc_feature (405)..(414): n is a, c, g, or t
atgtataaaaataaacagtgggaattagatagaagaacgctattaaaaggaatgggagctattggtttggcagctctttcccctaatgcgtttagcctagctaatgaaaataaacccatatttaaccagaaaactcggataaaattatctgaatatcaaacttttcaatccacctgtgcaatggaatgtctccattgtaacctaaccgcttttactcatcagggaaaactaatcaaaattgaagctacagaaggctttaatgtcaaatgttgtttacgaggaattagccgaactaaatgggtatatcataaggatagactcactacacctttgctacgtgttggcgaaaaaggtaaggctgagtttaaacctattagctggaatgacgctttagatcttatcgannnnnnnnnntatttctactcacgctggaaatatggattccatcaaaaacgatatgggtaa

SEQ ID NO: 299184 - DNA, 1863 bp, Proteus mirabilis
atggattccatcaaaaacgatatgggtaaagcctttttcgactatttaggcggttctacaaaacaagccggctctttatgttgctctgcggttactgcagctatgatccctatggttggcctacgctatgcagatacgcgtgatacggtaaaagatagccgttatattctatgttggggcaataacccagcagtaactatgcacgcctactttaaaaattataatcaggctcgccgtaatggtgccagaatggtagtcattgatccgcgttttaatgaaaccgcagccaaagctgatgagtggatccccattattccgggtaccgataccgcccttgcattaggaatgatcaaattaatcattgaagaaaatcttacagataaaccttttttgcgtgcccataccggagcggtgtatttagtcgatgaacaacaaaaactactacgtgattcagctaatgataaagatagctatttagtctttgataccctaactcagcaaattgttcgccatgatacccccaatattgtaccggcgttaactcatgatgaactgccaaataaaataaattacaccaccgtttttgaacaaatctattggcaagctaaaccctggactatcgaaaaaaccagtaaagaaacagatattccacaagagactattattcgtttagctcgagactacgcgacaacaaagcctgcaatgattgtacaaaatatgtctggcgcacaacgcactgaatttggtgcctatgttgcagcaagccagttttatcttgctctattaaccggcaatattggtaagaaaggcgcgggtatttgtgatgccggtggcgtgcgtcagatggcaaaatttaatcctattattccccctgcaccaaatgttaaacccattaatcctattcctgttgcaaaagtgggtgaatggatagtcaacgaaagaccccacccaattaatttctggtggatcatgacaatgggggtgatgacacaattacccaataccaatatggtacgtaaggcgctaaaaaaagttccttttgttgtcgtagccgataatttaatgtcatcaacagcgctttatgccgacttagtacttccagtgacaaccatttttgaagatacaagtttaatggctggtgtgcgtagccaatatgttcaattaatggaaaaagccgttgaaccaccaggagaagcaaagcctgattattggatttttgcccgccttgctgaacgctttggtttcggtgacgtatttaatcaacctattgagcactatattgatacttgcctcgcgggatcggggattacgcgggaaatgctagaaaaagggcctgtacgaccagtagaaggcgattggatcccatttaaagacggaatatttcgtacatcaacccaaaaagcacatttctttattgaagaatggcaagataaaaactactcccctatagtcacttattatccagtaaaggaatcgacaacaggctcccctgaattagcaaaaaaatatccgttaatggctgtgcaacgtaagctagcacgtagtgttcattcaagccatgggatgaatgaatggattttagaagtacagcgtaatcaacccaatattttaatacatcctaatgatgcgttatctcgtggaataaacaatggtgattgggtgtttgcttttaatgatagaggtgaacatagagcaatagccgttgtcaccacacacataaaacaaggtgttgtttctcttgataatggttggtgggaacaacaaggggggagtagtagccatgtaacaaatgaccatgttgaacctttaggtaatggtcattgttgtaacagtaccctagttaatgtgagacgggaggcataa

SEQ ID NO: 299185 - DNA, 1206 bp, Proteus mirabilis
atgggtattttaatcatgaaaagcttaaagcctttagcagcgctggtaggtttattggttctgtcgggatctgcaaacgcagtaaatgtgtacaacgataaaggtacacgttttgatgttaacggtcagttccgtttaaaaacgcaagtgacaagtaaagatcatgaaatgcgtatgcgtgatgatggtagccgtatcggtttctttggttcacatgaactgactaacgatatcaaagtgtttggtaagttagagtggggttcagatactcaaaaaaccaacagtgataatgagaaaacaaactttgatctgtacaaccgcgtaggctatgtcggtttttctcatcgtgattatggacaaatccaatttggtcgtacttatatcccaattgactgggtaaaaaaatcaagctacggctatggtaatacaggggtattttactttagtgatgtattaggccgtgcagtaggttattcaagtaaaggggttggtaaaaacaactttatgacccgtttaccacaaactatctttattgaaacaaaccgttatgaaggctttaaattagcggcaactttaacgggtaaagatggtaaagataatgatggtgatggaaaaaatggcgatcgcagaaccggtgatatccgtcatgcctattctgtcgttggtttctataaatcaactttcggtttagagtttgatgcgggttactcagcagctgtaggtgagcctaatctatacccagatagtgttgttggtaataaaaaaccagaaaatagtatcttagcattcggtgctgaatacttcttccctggtcgcgaattctctatcggtatcgactatggtcaatctcgcggtaaaaatactggcttaaccttaagagaaggtgcaactgagaaagattataaatggaactcagttaaaggcgattggaaagcgaatttatatggtgttggtgtgaaatggcactgggatcgtatcgaaagtggtatgtatgcgggttattacctgcgtgatggcgatgctaacactttcaactacaaaaaagaaacctatactgtgggtgtagataaacgttttgcggtatctaaatacaacaacttacgtttattcgctgaaatggcatatgatgatgctcgtagcgaaaacccagcttatgaagataaaaaacaatatatctttgaaactggtatgcgtctgtacttctag

SEQ ID NO: 299186 - DNA, 237 bp, Proteus mirabilis
atgacgccagatggtactccgatagttgggccaaccgcatatcgtaatttatccctaaatacggggcatggtacattaggatggacgatggcatgtggctcaggacaactgttagctgatttaatatcaggtaataaaacggcaattgctgcagatgatctctccgtgttccgttatatcgatggatttaatactaaattgctccgtccagggcaaaaacttgacgctgtttattaa

SEQ ID NO: 299187 - DNA, 1485 bp, Proteus mirabilis
atggctctaaattcgccaatgctaattacctttacgatctatatattggggatgctttttatcggctatctagcgtatcgatcaacaaaaaattttgatgattatattttagggggccgaaggcttggtagtgtagtaacggcactttctgcgggcgcttctgatatgagtggctggctattaatgggattaccaggtgtggttttttttgcggggatctccgaaagttggatagccattggtttatgtttaggtgcatggcttaactggcgtttagttgcagggcgattacgtttacaaacagaaaaaaacaataatgcactgactctaccagactatttaacttctcgctttgatgacaaaagcaaaatgctacgcattatttctgcgttagttattcttattttcttcactatttattgtgcatcaggtgtcgtcgcaggaggtatgctttttgagtctacctttggcattccttatcatgaagcgatgatttatggtgcactagcaaccattgcatatactttcctaggtggttttttggcggtaagttggacggatacggtacaagccacattaatgattttcgcacttattctgacaccaattattgttattttctcaattggtggaattgacacctctatagagatcattaaagcgaaagatcctacttatcttgatatgtttaaagggcttgattttattgctattgtttcattattagcttggggattaggttattttggacagcctcatattctcgcgcgttttatggctgcagattcaaatcaaactattcgtaaagcgcgtcgtattggtatgacttggatgatcctctgtttaggcggaacggtggcggtgggcttctttggtattgcttattttgaagttaatccggccgttgcaggtccggttatggctaaaaatgagcgtatctttatggaattagcttcgttactttttaacccgtggatagctggtattttgttatctgcgattttagctgcggtaatgagtacgttaagctgccaattattagtctgcgccagtgcattaactgaagatttatataagccttttattcgtaaaaatgccagtcaaaaagagctagtttgggttggtcgtggcatggtgttattagttgcggttatcgctatttatttagcccgtgatccagaaaataaagtacttgatttggtgagtaatgcttgggcaggatttggtgctgcatttggtccggtgatccttatctctgtcacttggaaacgtatgactcgtaatggtgcttttgcgggaatgttaattggtgcattaacggtactggtatggatgcaatataaatggttcggtctttatgaaattattccgggctttattttcgcatccatagccattgttattgtcagtttaatgggtaagtcaccaacggcagaaaatcaacaacgttttgatgaagcagaagcggaatatcgtaacacttaa

SEQ ID NO: 299188 - DNA, 3522 bp, Proteus mirabilis
atgttgagaatgatcatagatgatgatggacaacaacgtatcttaaaagaagttccttattttcattttattcaacatgacctaacaaatttaacccaacaagagcaacaagagagcctaacacagataagggaagccctttcttatcgggtattaccgactgagtcatggccattatttgaagttgaaatttcttggctaaataacgattgttacagattacatatcaatctagatttactgcagtttgataccatgagctttaaaattctgtttgatgatctatttaacgcctattcaggacaagaattaataccacaaacatttaccttccgcgactactgcttaaaaaatcaaacaaatcgtaacagtgatgagtggaaaatggcatggtgttactggcaggatctattatctgatttaccttctgccccatatttaccgataaagaattcatccattactgaacaacctcgttttacgactttccaacatcatgtttctatagcgcaatgggacaaattaaaacagaggtggaaaaagcatggtattacaccatcagcagggcttttaacactttttgctttagttttaggtcgctggacaaaatacccagcctttacactaaacttaactttctttaatcgtcaaccatggcacccagatgttacacaacttattggtgattttacctctgtactccctatagatatttatctagataacgactgtacattaaatgagtcaatggcaaaaatacagcgcagactttggcaacatttaagtaagtcccaagtaaatggtgtagagattttacgtgaatggggacgctataaaggggatagtagccaatctctgttacctattgtatttactagcatgttaggtatgacactagatggtgacaatattgatgaagcattaaatcagcttttcggccaacccgtatatagcttcgcgcaaacacctcaagtttggttagatcaccaagtaatggaaggaaaagaggggctaacattaaattggttctgcatggatgacatctttgctgacggtttattaacaatgatgttctctgattatcaaagcttgatcactcaattatgccaagatgaagataataatcaatcagttgataagattattgcgcaacttccttcatatcaacatttagcaatagataatcacctccaatcacgctatcaacaactcgagcaaacattggaaaatcatccgcaaatcaaacgtgctcatgctatggtaatggtaaaagacgatacgaaagtagagcctcctctacaattactgtttgaagcctcttctgatattccactatccgttattaaacagcccaattggttacctaatttactttcgccatcagcttcactcagtgacattattgaaaagagttggcaacgatttgaggaacgagcacggtatggcatatgtcacacactgtatcgaaatgctctttttaccgagctaaacacaccaatcaccctagctgaaatagtggctcgtttaaaagcaaagcctcagtatgagaggctacttagtcagtggctagatttattatgcctgcatcacttattaaccaaagagggtgatcagttttatgccacaacacagtttattaacttatgtttatctgccccagtatttcaacaacctgttaatgattgggaatatgtactttgggattaccttgaacaatcactaacccaacatgaattactctttagtggtaaggtttctcctctttcactactttttaattcagatgaaattaccacagcactatacgccaaacaccctgcactaaattatttaaatcaatgtgcaaaagatattgttagtgcaatggttggtgcaacatcttcactcaatattttagaaataggggcaggtacaggagctaccactcaaggtatagtcgcagtacttaagaatacgcattactcatacacctttactgatatatcacattacttccttgataaagcgcgaaaaaaattcactgctgtaggagaaatgcgctatcaactctttgatattaatgcaccaatacaattttctcatcatccagataatggctatgatctgatcattgcatctaatgtattacatgatgcatcacatatcggccacgcactaaaacggattagaagcctgttaaaacctcaaggctatttattatttatcgaagcaaccgagtgtcaaagtgctatgcaaatggcgactgttggctttattgagggattaagtgcatatcaagataagcgtatattgacgaataaagcgatgcttgatagtgaaagttggcatgatattttaatcaatactggttttgaaactattggtcaatggccccaaacagattcctcatctttgcgacaaacactctttttagcctctcccactcgtggaggaaaaccttatttaggtaaattacgtgattatttatctcattctcttgatcagaatatcgactcttttgagttgttccaatgtgaaaatattgaagcaacccttaatggcatagcaacatcatccgctcaagagctaaatgaacagatacaacctgttgcaatacctgatgtaccaaccaatatgattaatgaaatcattgcattatggtctgagttattaggtcgtgaggtcaatagtacaaatgatttcttccgttctggaggagatagtttgattgcaaccaaaatgatcagccaattacatcaacggggatatccagcaacattacaacagatttttacctatccatgcttagccgatttttgtgctcatttagagcaggaaaagcaatctcaacgagagtactcctctttgatacctctaagcgctgtatctgctccaaaaccttaccactactttatggtacatgcttctgatggtgatcccggtgtttacctacctcttgctgagtcgttaaataatacagtgtggggattaacagttacagatgcttcaaaactaactgatttggatacattgttatcattacatttatctagcataaaaacagcacaacagactggcccttatattcttattggttggtcatatggtgcttttattgccagttaccttgcagaacaactctcgcaacaaaatcattccgtattattagtattaatagatcccgtctatcgacatgattttattaaattttgtcatgatgactcagatagttcatcagatgaaaataagcagcttgcatgcactaaaagacttatgtcattcctacctgaaagtgacctaccattatctgatgatatcgcctgtttatggctggaagccaccaaccacccaacagaatggacatcacctgaaaaagagtggtaccaacgattaccgccacatacccaacatcactatttttcaggggagcactggtcaatactgcaagatcgcgctaccagcacacatctggccgaaatcattgatcagtgggtgcaacaaaaactttctaataacggatatccatccgaaggaggtaattaa

SEQ ID NO: 299189 - DNA, 765 bp, Proteus mirabilis; identical to SEQ ID NO: 295787

SEQ ID NO: 299190 - DNA, 2370 bp, Proteus mirabilis
atgctagacgcggaagatcgcgataatgtcgacctttcacgtttttctacctcaaattatatcattccgggtatgtactatttagatattcgtctaaatggtcgcgactttcctcgccaaaatattaattatattgaagtagcagataatcattccgtggcttgtatcgaccctactcttttaaaaaagttaacaatcaaccaagaaaaccaaaaatatatcaaacaaatatcaccagattgttttgatattagccaattacccggtatctcgattaaaaatgatggtggtgtacttgatatcacgttaccgcgctcattaatgaaatatgaagaatctgattggacacctccggagctttgggatagcggggtctctgggcttatttttgattatacattaacaggaacgtcaactcgacctaataaaggcaataataacaataccttaactggttatggtcaagcgggattaaacttgggtgaatggcgtttaagagctgaatatcaaggcaattattcttctgaatattcatctaacaatcgttttgattggaaccaaatttatgcctataagccattaccagatctcgcagccaaactaacggttggggaaacttatttaaactctcaaatttttgatagtttccgttttacaggagccaatttacaaagcgatgagagaatgttacccccttctctccaaggctatgcacctgaaattcatggcatcgccaataccaatgcaaaagtgacggtaacccaaaatggacgtttaatttatgagacaaccgtacctgctggccctttcgtgattaaccatctacaaaataccgtacagggtcaactcgatgttagagttgaagagcaaaatggtaagattaacgaatttcaagtgcaaaccgctaatttgccttatatgactcgcccaggatctgtgcgttttaatacctcactgggacagtcatccgtgaacaaccataaaatgcaaggccctattttctatcaaggggatttttcatgggggatgaataatacatggtctctctatggtggtgctttacttaccgctaaagattataacgcatggtctttaggtatcggccatgatatgggacgttttggtaccctttctggcgatattacacagtcttatagcaaaacctatgataatgaaaagatcaatgggatgtcttttaaactaaactatgcaaaaacttttgatgagtaccacagtaccattacttttgcaggttatcgtttctcagaaaaaacatttcgctctttttctcagtatattgatgagcgttataacggcatcaataataatggctatgaaaaagaaatgtacaccattaccggtaataaaactttttgggctgatgatgcagaaaaatcgaccaccctctatctctcttatcgccaccaaaattactgggataaaaatactcaagagcagtatggtgtcacagtaagtcgtaatttttccattatggggattgagcaaatcaataccaacttgtcagcatttcgtacccaatataaagggaatactgacgatacgctctcttttaatatttcactaccattaggaagtggtcgcaatattggttataacttgcaagataacaatggcaaagtgacacaaatggcctcttatgctgataatcgcgattataataatttatggcgcataagagcaggcttaagttcggataagaaagccaataccgatggttattatcaacatcgttctcagtatgcagaaatcaatgccaatgcaagctatcaacaagataattacttagcagtgggcgcaacgataaaaggcggttttactgctactcgttatggcgctgcattacacagtagcagtatgacctctagcacagcaagaataatggtggatactgatggtgttgcaggggtgccctttaatggtcaaagcacgactacgaaccgcttcggcattggcgtactaaccgacttaacaagttataacaatgttgatgcacgtattgacgtcgataagatggatcaagatattgaaacacgtaaagccattgcttcaacaaccttaacagaaggtgccattggttattaccaatttccggttcgtcaaggtgaacgcttaatggctgtcttacagacaactgataataaataccctccttttggtgcagaagtcaccaatcaaaaaggggaaagtattggtatggtgatggaagaaggccttgtttatattgcgggtgttaaccttaatgaatcattaaatgtaatttggaacggtaaaacacaatgttcaattaccattcccgcggaaataacagatcccttaaaacatcaatcgctcgtttgtcaggatcgttaa

SEQ ID NO: 299191 - DNA, 1635 bp, Proteus mirabilis
atgcatacagaaggtgttggattaagcacaatagattatgcaatctttgccctctatgtcatcattattattagccttggattatgggtttctcgttcaaaagatggagctaaaaaaggaacaaaggattacttcctcgcgggtaaaacactgccttggtgggcgattggttcttctcttattgctgctaatatctcagctgagcaattcattggtatgtctggctcaggattttcgataggtcttgctattgcatcttatgaatggatggcagcattgacgttaatcattgttgctaaatactttttacctatttttattgaaaaaggcatttataccattcctgaatttgttgagaatcgttttaaaagtcgtaatttaaagacgatcctcgccgtattctggttagcactctttattttcgttaacttaacatctgtattgtatttaggatcattggcgttagaaaccattcttggtgtgccgatgatgtatgccattattggtctggcactatttgcggttatctactcgctttacggtggactttcagcggttgcatggacggatgttgtacaagttttcttcctgatcctcggtggacttttcacgaccgtacttgctgttagctatatcggtggtgatggaggaataatggaaggcttaagtaagatgacagccgccgcgccagatcactttaaaatgatcttagcaaaagaaaacccacaatttatgaatttgccaggaattgctgtgctaatcggtgggctatgggttgctaacctctattactggggctttaaccaatacattattcagcgtgctttagctgctaaatctattaatgaagcgcaaaaaggtttagtgtttgccgctttcttaaaactgattgtgcctattttagttgttgtgccggggatcgcagcttttgttatcacaaccgatcctacgctgatggcaggattaggaacaatggcacaggagcatatcccaaccttagcgcaagcggataaagcctatccttggttaacacaattcttacctattggggctaaaggggttgtgtttgcagcactggcagcagctatcgtttcttctttagcttccatgcttaactctatcgcgactattttcacgatggatatttataaagaatatattgggccaaaatcctcagaaacccgcttagttaatgtgggacgtattagtgcggtgattgcattgattattgcttgctttattgcgccactgttagggggcattgatcaggcattccaatatatccaagagtacacaggtttagtgagtcctggtatcttagctgtattcttgttaggactattttggaagaaaactaatgccaaaggggcaattataggggttgtactctcaattccttttgctttattcctaaaattaatgccactaggaatgccattccttgaccaaatgatgtatacctttattttcaccgcggttgttattggtttggtcagcttaacctcaacgaaaagtgatgatagcgtaggggcgattgtattaactgatgcaacatttaaaacccaaagtgggttcaatattgcttcttatatcattatgatcatcctctgtgtgctttatgctgtattttggtaa

SEQ ID NO: 299192 - DNA, 2598 bp, Proteus mirabilis
atgtcaaccatcgattatccagagaaaaaagcgtcccgctcgataaggcaacaggctactatgcagtcgcatatcttaacccgttattacaaattttatcgtcataatggggcttcattcagtgcggctatcgtgaatgagcttttctgggtattaatgtggctctttttgcgtatggaatcccctttttggcagaaaatagcacaaaaacaacaacaactatttcctcatattaatccgcgtcgccctaaattatgcgatccgatccgatacttattacaaagtatttggcttatttgccattacttgatgctcaccttggtgaaaaaaccgattcaatttattgtctatattagacagtattatcaaaatctctttgctcgcttatctcctgttgcgcgagatatgatccatcataagaaaacaaacacgccactatggcaatacgctctattatcgctcgttgctgtttttgccatttttattatcttattaagtattactcaaccttttgatttaaaactacaattcgtttttgttctcgtgatttggctgatagctttagctatccgcgatatccctggccgactgtcttctattaccattattattttatcgctgactattgcttgccgatatatttggtggcgctatcaatacacactctactgggtggataatctgagccttttctttgggatcttactattactggctgaaacctatgcatggattgtgttatttcttagttttatgcaatgtatttggccactccatcgacaacctatttcaatgcctcaagatacaacacaatggcctactgtcgatatttttattcccacatataacgaagcgctacaagttgtaaaaccaacactttatgcctgtttaaacattgattggcctaaagataaattaactatctatttattagatgatggctctcgccctgagtttgcggcttttgctaaagaaattggtattcggtatatcactcgtgaaaaacatgattttgccaaagccggtaatatcaaccatgcattgagcaaagcctgcggagaatatgtggctatttttgactgtgaccatattccgacacgctcattcttacaatttactatgggctggtttctaaaagacgaaaaaatggcattggtacaaacaccacaccactttttctctcctgatccctttgaacgtaatttaggcaatttccgcgaaacaccgaatgaaggcacgcttttttatggattagtgcaagatggtaatgatacttggaatgcagcttttttctgcggctcctgtgctgtattacgtcgttgtgctttagatgaaattggcgggctggcagttgaaactgtgaccgaagacgcacatacctcattacgcttacatcgtcatggttggacttctgcttatattcgtatccctcttgccgcaggattagcaacaggatcactttcagcacatattggccaacgcatacgttgggcaaaaggaatgatacaaatatttcgtttagataatccactctttggcaaagggctgacactgccacagcgcttttgttacctcaatgccatgttgcactttttatcaggcataccaaggataatcttcttattagcaccactaacgttccttatctttcatgcctatattatttacgcacccgccatcgctatcgctttgtatgtcgtgccttatttattacacatttggttagccgcgaccaaattacaaggtccttatcgccactcattttggggagagatttatgaaacgattttagcttggtacaccactcgccccgtattaagcaccctattctcaccttataaaggtaaatttaatgtcacagagaaaggggcaatcatgaagaaaagttttgtcgattggcaaattaatcgcccctatattctgtttcttaatcttaatttgttaggaattctatttgctttctggcgtatcgcaacaggcgatcccgatgaaaggttagccgtactcatgtgcttagtttgggtatgctataacttagtattactaggtgttgccattgctgtttctgtagaagcaaagcaagagcgccagttcccacgggtacgtctaaaagtgcccgcaatactattactccaagacggttcgctttattcttgtcagctcaatgacttctctgataatggctgtgccattgtattaccagataattttacagttcccttatcttgtcaccaagagatcaccgttattctcaaacaaaatcagcgtgaatatgcttttgaagcacgtattttacggattgataatcgcattattggcttacaactgcttaatatggatacacaaaaatccattgattttaccgcctgtacttttgaacgagccgacacttgggctaattggcaacacgctctccctgccgataatccactgaatagtttaagaaatatcatttatatcagtatgcggggctataacaccttacttaaacgcgccccgtatcttgtttacctcttatttcgtttattagggcagtgtttattgtggctattatcgctacttccacgacgtgtcaatgtttcacaaatatttcattaa

SEQ ID NO: 299193 - DNA, 732 bp, Proteus mirabilis
atgccactaattgtattaaaagggctcagaggtggagtaggaaccacctcaataaccgttgcactggctcgccaatttcatcaccataaatacaatgtcattgttatcgataactgtgtgaataatatcttacatttctattttccagaaaaatcacaagtcaccacattaggacaagcactactcgcgcataccccaatagaacaagcgatttgtgattatcaaaacggttatcagattttaccttttggagtcgttaattcagaagataaattgcatttgcaagcatctgccactgccaaccaacatctgcagcatttttttaccgcttttactcaacaatacccagacactttaatttttctcgatttacaaccagagcacgataccctttttaaatcatgggttgcgaaagccaatatcgtattaaccgttaccacacctgaaagtaactgtcatattcggcttaaccaacatacctttgctgccaatgagtatattctggtgaatcaattttgtgccactagccaaatccatcaagatttttatcaattttggcaagccagtcagtttcctttctgcccaataaaacttcatcgcgatgaagcattattagaagcctgtgcttcacgcttacctttatatgattaccgcgctaattgcatgttagttgaagaaattaatcaacttctacaatggtgtttgcctttattgttaagcaaaaaaggatag

SEQ ID NO: 299194 - DNA, 246 bp, Proteus mirabilis; identical to SEQ ID NO: 296731

SEQ ID NO: 299195 - DNA, 942 bp, Proteus mirabilis
gtgacccagaccaagttatcgacacaaacgacaacagataataaccaagaagataatgacgttatcatagaacaatttctcgatagtatttggctagagcaagggttatctgcgaatacactcagcgcttatcgtttagatttgcaggcgttaagccagtggctggtcacacaaaaactcaattggttatcggtgacgacgttagatttacacgcttttcttgccacccgtttggatgagggctataaagcaaccagtgcggcacgactgttaagtaccttacgtcggttttttcaatatctttatcgtgagaaattacgccaagatgatcccagcgctttgctttctacacctaaattacccaaacgtttacccaaagacttaagtgaacagcaagtagaaaatttacttagtgctccttgtattgatgagccaatagaattacgtgacaaagcgatgcttgaggttctttatgcctgtggattgcgggtttctgagctagtaggattgtctttatctgatattagcttacggcaaggggtgttacgtgtgataggtaagggcgataaagaacgattagttcctttaggtgaagaagctatttactggttagaacaatatctgcaatatggtagaccagcccttatgcaagggaaaaccgatgatattgtgtttccaagcttaagaggccaaaaaatgacgcgacaaacattttggcatcgtataaaacattacgcggtgatcgccggaattgattcagagaaattatcaccccatgtgttgcggcacgcctttgcaacacatctattaaatcatggagcagacttgcgtgttgtacagatgttattggggcacagtgacctctctacaacacagatttatacccatgttgctacagagcgcttaaaagtgcttcatcagcaacatcacccaaggggataa

SEQ ID NO: 299196 - DNA, 1227 bp, Proteus mirabilis
atggatataattattctaggtgttgcgatgtttaccctgattgtattggtgctaactgcattgattttgtttgcaaaatcaaagttagtcaatacaggggatattgaagttgaggtgaatggagatcctgaaaaaagtttccatgcgccagccggtgataaattactcaacgtattatcaaacgaaggtatttttatctcatctgcatgtggtggtggtggctcttgtggtcaatgccgcgtaaaagtacttgaaggtggtggagatattcttcctactgagctttctcatattaataagcgtgaagctaaagaaggttgccgtttagcttgtcaggttaacgttaaaaataatctgaaattagagctacccgaagagatcttcgggattaaaaaatgggaatgtgaagttatctcaaatgataacaaagccacgtttattaaagagttggtattaaaaattcctgaaggtgaagtggtacctttccgtgctgggggctttattcagattgaatgtcctcctcacacagtgcgctatgaagattttgatgttcctgaagagtatcgtgaagattgggataaatttaatttattccgctatgtttctgaagttaaagagaccacagtgcgtgcatactccatggcgaactaccctgaagagcatggcattatcatgttaaacgtgcgtattgcgacaccgccaccacgtaatcctgatgtgccaccgggaattatgtcatcttatatctggtcattaaaaccgggtgataaagtgacaatttcagggccgtttggtgaattcttcgcgaaagaaactgatgcggaaatgatcttcattggtggtggtgctggtatggcaccgatgcgttcacatatttttgatcagctaaaacgcttacattctaaacgtaaaattagcttctggtatggtgctcgttctgtgcgtgaaatgttctatacagaagattttgatatgctggctaaagagaatgaaaactttacttggcatgttgcgctgtcagatgcattaccggaagataattggacgggttacaccggctttattcacaatgtgctctatgaaaactaccttaaagatcatccagcaccagaagattgtgaattctatatgtgtggaccaccagtgatgaatgctgcggtgatcaaaatgcttaaagatttaggcgtagaagatgaaaatattatgctggatgactttggtggttga

SEQ ID NO: 299197 - DNA, 597 bp, Proteus mirabilis; identical to SEQ ID NO: 296749

SEQ ID NO: 299198 - DNA, 558 bp, Proteus mirabilis; identical to SEQ ID NO: 295742

SEQ ID NO: 299199 - DNA, 1158 bp, Proteus mirabilis; identical to SEQ ID NO: 297263

SEQ ID NO: 299200 - DNA, 849 bp, Proteus mirabilis
atgttattttcaaaaactgaacaatttccgggaaaaaacgttcaagtcggtgaattactcgcagaaatggctattagcagtgcgcaacgacgtatgcgtgcggctaaaaaagtggtgagaaaaaaactgacttcggggcctgcattgccgggtaaattagcagattgtacttcgcaagatttacgttataccgaactcttcttagttgaaggggactctgcggggggctctgctaaacaagctcgcgatcgtgaatatcaagcgattatgcctctacgtggtaaaattcttaatacttgggaagtctcttctgatgaagtattagcgtcacaagatgtgcatgatatttctgtggcgatcgggatggatcctgatagtgatgatttaagccaattacgttacggaaaaatttgtatccttgcggatgcggactccgatggtttacatatcgccactttgctttgtgctttatttgttcgtcatttcccggcattagtaaagcaaggtcatgtctatatggctatgccacctctttatcgtatcgacttaggtaaagaagtgagttatgcccttgatgaagcagaaaagaacgctattttgcaacgccttagccgtaaaaaaggtaagccaaatgtgcaacgctttaaaggcttaggtgagatgaatccactgcaattacgtgagacaacgcttgatcctaatacacgtcgtttagtgcaattggtgattgatgatgaaaattatcaagaaacgttgggcatgatggatatgttacttgccaaaaaacgttctgaagatcgccgtaactggttgcaagaaaaaggcgacgaagttgacatcgaagtgtaa

SEQ ID NO: 299201 - DNA, 468 bp, Proteus mirabilis
  misc_feature (237)..(246): n is a, c, g, or t
atgaaatatattattgggatcgcggtattgatgctgacggcttgttcaagtgtgcctgataaagcttattatcaattacctgatgtttatcaaggtgcaaataataaggttgttacaactactgagagcgcaaagcaagatcagatttgggttcagcctatccgtttatctgatatgttagttagcaacggtataattgatatcactggtttgatagacaatgcccgtgttaactannnnnnnnnnggtgaaggtaaaggccgagctttgggtgtgggtgaagtgaaattcactgggcaaattctaccaacagccaaaaaagtcacctataaaattgatttcaaacgtgttatcaatcgcaagcttattatgggtatcgctgacggtgaagtttatgttgatggtaaactgatttatgaagccaaagatttaaaagtcggcttatttaaagatacctcagcattctaa

SEQ ID NO: 299202 - DNA, 1377 bp, Proteus mirabilis
gtgcgggaagagggggaggatgagggtaacaaaggttcactggcaattgtgcgtatcgagaacgcgctttacggcgcctttgtggtgatcctgttttgttgtgtgccgttgatggaggtgagtgtcagtaccctgcaatttgataccagccggaccaaaacctgcggcacctggaccccggtgaagccggcggaatccggttacagcggcgtggtgtcgtcactggataatcagacagccaaaatcccgctgtggtggatgctggtacataagctgtcgaaaggggtgactcaggcggcggtggccagcattccgtgccggccggatttgcgtcaggtgcgttttgaggtgcagcacagcaacattaaaaatccggcgctggctgccgcacttcaggattttacggatgactgttactcacgtgccctgtatgactggaaagcgaaagatcagggaaaaacacaggatgaaaaaacgttacaggatatcacctggataggctcggccacctttatgaaaggggaatatcatcagatccagtcacggacaccgcgggcgggctttccctgggatgccgaccgggatgacgggtatgcgaatgtcaacggcaacggttacccgacctgttatcagtggtggaatgatgcgaatgcagggttactgaaacttgtcaaagagcagaccgatgaagggatgtggctgcgtgcccgggcggcgatgaagctgattaataaaaactcgaaagagtttgaggaggccatcgtccgccggctggtgagtccggcgaatctggatgtctccggcggccgggtataccggggatacgggggtaatgcggatatgacggtgatgaatgagctggccagaatgggaggggtagccgggacttcgctggcgtcactgggggcattccctgcctttgatacgatgcgacagtccttaccgatggtgcaggggctgatgttaatggcggtgtatatcatgatcccgatggtgctgatgttttcggcgtatgaatttaagacggcgataacggtgacgtttgtgatatttgcgctgaactttctgacattctggtgggagctggcacgctggatagacagctggatgatggaggcactgtataattccgatacgcacagtcagtggaatatgaacgggcttcagaacacgtctgatgatgtcattatgaacctggtaatgggaacgatgtttttggtgttgccggcgttgtggttgacagcatttggttgggctggagctaaagttgggtccgagctaggtaatatgacatctaacgcgacttcacctgcgcatagtgcgggggggaaaggaggacagttagcagaacaagctatttctaaaaaagttaactaa

SEQ ID NO: 299203 - DNA, 1464 bp, Proteus mirabilis; identical to SEQ ID NO: 297399

SEQ ID NO: 299204 - DNA, 243 bp, Proteus mirabilis
atgacaccaaatataccaatagagcctgttaatgttgaagggctagcgataattttactcgcaggtgtagagatccaatatccccctgatgcagccattccgcccattgaaaccacgacatgttttttctcttgtttaaaggcggctatttcactgcggatctgctcagatgcagatacactaccaccggggctattaactcgtaatactaatgctctaatattaggatttaaacgcgcttga

SEQ ID NO: 299205 - DNA, 387 bp, Proteus mirabilis
atgacgattacacaacaagctggattaccactgttacaggggttaaaaattattacagagcaattaacgcattcactgtatcaacgagcactcactgatatgatagcgcatattactcaaggcaaatcacttagctcatttatgcgacataatcctctattcccgccaatctgttatcaattgatctcttcagcagaaaattctggacaactacagtttttttgccagcaacttacccactggttttatcatcaattagaagaacgtcttgatagtgtaaaaacatggcttgagcctattttaatgacactgatcgcattgattactggcacgcttattattgcgatgtatcttccggtgttacaactaggtgataccatacattga

SEQ ID NO: 299206 - DNA, 252 bp, Proteus mirabilis
  misc_feature (81)..(90): n is a, c, g, or t
atgagcgaaaaattaatagtgaaatgcccaacatgccgaaccgaggtaatatgggatgaaagtagcccttatcgtcctttnnnnnnnnnntataggcgaatttttactggtaatttttgttgtaagcgttgccagttaatcgatttaggcgaatgggcggctgaagagaagcgaattccaagtcaaagcgaaagcaatgacagcgatgaatggagtgaaatgccagagcaagatcctaagccgtttaattaa

SEQ ID NO: 299207 - DNA, 2544 bp, Proteus mirabilis
ttgcaagcggatttattgcgcaaacaaggtaatttacctgctgcttatcagctattatctgaactatatcaacagcatagtcaaaatgaaaaagttatttccgcatattactacttgcttattcaacaaggaaaaaacagccaagctgagcagttagtagcaaaacaacccgcatctttacgacaaaaattaacggcaaatactgatccatcagaaagattacgtcgtgatgcgcaaaaggcgttagaaaatggtcatcgcactcaggcaagacaattattaactcaggcacaacgtaaaaacccgcaaaataattgggtataccttgatttagcccgtttaatgatagccgaaggtgataaaacgcaagcggaacagctcattttacaacttgaacgtcgtcaaacacgtgatgccaattatattgcggctctcttttatgttgaacaaaaacagtgggataaagtttttaccctactgaacagtcaacctcaacaaaatgaggcggaaaaagcgttattagagagagcgcgtttttatcgtcaactgacacaagctgagcgttactataaaacgggcaatcttgttgcgatgcgcaatacgctgcgtcctttaatcaaccaagtggctgattatccaaatgatgtaggggaattagctgaaaaactggtaaatagtggtgcacaagatgaagcgctgcaattgattgaaaatgatctggctaaagggactaaaggctctgtgggaaattatgcagggcatatcaatgtgtttaatgcgttaggacgttatgcacaagcctcgagcttgattaatgatcccgcattacagcaacaaacgccagcagccgagaaacaacgtttagctatactgacaaatgttgcgcaagcggatagtttacgggaaaaaggtgaaatcaaagccgcttatcaaactctcgtcacctcattaaaggtaagtcctgatgatccagacttattaatggcattaagtcgtgtgtatttagcgcaatctatgccagagcagtcaaataaaattctctcttaccttgaaaaacagcaagggagagatagcaaattacttcaagcacaaattgaagttgctctggcgcaaaaagacggtcgtaaagccaaaacactgttacaacaaataccgacatcttcacagcctgcttatctattacaagcagcgcaagtagcgcaattaaacggtgaaaatcgtcaggcattggcgttattgcgtagcgcgcaatggcaaacgacaaataacacaacaggtacggtgaataccgcagcagggcagttaatggcactagagagtgaaaatagtgtgatgactggctctataaatgaagataaacagatggttgctgttcaacgctccattcgtcaattagagcagcagatatctccttgggtacaaggtggtattgctattcgtcatcgtaatggtgataagggattatcaaatttgactgaaatatcggcaccgattgctatctcaagtgttcctggtgaagattggcgctggcaatttaatattaatcccgtttcaatcaccagcggtacggcttctggagagcgcgctaatcgctttggctcggggcaattgcagcatgctgaacgttttgcgaaaaacagtgataatcatgatgaaaagaacaaaataaacgcagatgatgcgggaagccagcgggcttcaggtgttgaattaggattgattttatctgatcacaatacacgttttgatgttggaacaacacctttgaataaagatagttccactattgttggtggactgacttactcaccaaaaattggccaaaatggacagttaacattaaccgcagagcgtagagcgattaaagatagcttactttcctatatgggacgtaccgatcctataacgggagaaacctggggacaggtcacgcgtaatggtgctaaagcgcaatatgcatgggatgatggcaaagtcggtgcttatattggtgggggatactataactaccaagggaaaagtgttgaaagtaatgaagaggtaaaagtttggcttggctcttatgcaaacttctacaaagatgagcaacaagaagtcaaagcaggtgttcatgtggactatatgaactttaaaaacaaccaaaattacttctcattagggcatggggggtacttcagcccacaagattatgtcgctgtctctttgcctgttgcttatacccgtcgttttgaaaaaggagaggtatcgctaaatggtgcgataggggtacagagttacaagcaaaaggggagtgattattttccaacccatgcttatatgcaaaatgcgttaaacaaacgtcatacgagtgactcacgtattaaatctcgttatgaagagcaagatgaaaccaatattacctatcgtttagggctcgatgctaaatattatttaaataaagagtcagaattagggctcagcttatctcatgatacatcgggtgattatgctgaagataatatgtggttatatctaaaatacaccccagactttttatctaaataa

SEQ ID NO: 299208 - DNA, 2382 bp, Proteus mirabilis
atggctaaattattcaagacgattgatttaaatgttaaacataaaagtaagcagtgcagaggtcgttctgctaccacactgatctatttcgtgattatagggatggcaagtattgccagcgagtcatttgctgttagcaaagatattgaatttaactcagatattcttgacttaaaagatcgaggaaatattgatttatcaagcttttcccgagcgggatatattactcctggcaagtatgagttaattattaatattaataacaatgaattaagtggaacttatcgtgttgactatattgtgcccaaagatgatcccaaggcaagcgaaccttgtatctcacccatattagttaagcagtttgcactcagaccagaatggttaaaaaagttaacttggaaagataagggtaattgccttaatgaggcatcgttaccaggtatgagcctgaggacagatttaggtagtggggttttttttattactcttcctcaagcttatctagagtattcatcaccgaattgggaatcgccttctttttgggacgaaggtattgctggattattgtttgattataacgttaatgccaatgtcagagcgcctagtgatggcaagcagaaacagcagatcaccgcaaatggtacggcgggagcaaatttaggtgtttggcgttttcgggcagattggcaagcaagttatgagcacactacaggtgtattgcatagcacagaaaatcactggaattgggatcaattctatctttatcgagcgataacgaaatggggcgcccgtttagtcatgggggagacttacttacgttcaaacctattagataatttccgttttacgggaataagtttacttacggatgagcaaatgttgcctcctaatttacgaggttatgctccagagatcacgggagttgcaaaaacgaatgcaaaagtcactgtgagtcaacaaggacggattatctatgagacacaaatcgcgcctgggccatttcgtattcaagatctgcaagatgcggtaagtggacgcttggatgttcgtattgaagagcaggacggaacaatacaagaataccaaattgatacagccaatattccttatcttacaagaccgggacgccttcaatataaagtatctgcgggtaagccttctcgcttagatcataaaactgaagggcctatttttgcaatgggagagttttcttggggagtgaataatggttggtctctttttggtggcactttagtttctaaggattataactcggcctcgctaggttttggacgagatctaatgatgttaggtgctatctcttttgatacgactcattcatgggcaaccttcgctaatgagaataaacactatcatggcagttcatatcgaattagctattcaaagcgttttgaatctattgatgggcaaatcacttttgcaggctatcgattctctgatcgtcattttatgagtatggatcaatatttagataggcgttatcgctatggcgcacaagaaaataataaagagctttatacccttacactgagtaaacaatttcctcaatggggacttagtacctatataaattataaccatcaaaggtattgggatagaccgaataacgactattacaacttctctttatcaaagtatctcgctatcgggaagtttaaaaacattaacattagcttatccgcttatcgtaatcgttttaatggcaatcatgacaacggcgtgtatttcaacattaatttgccttggcgtgatagagcaacgataagttataactcggtcataaataaagaaggtaactcacataatgtcagctatttcgatcgcattgatgataacaataattatcgtctaagtgcaggagttagtagtcgaggtaaaccatcggcggatggtttctttacacattatggtgatgttgctttagtaacggcttcagccagtcatattaacggcgactatacttcggcatctttatctttccaaggtggggcaacattaaccactaaaggcggggattttcaccgtagcaatatgccgggggcaacccgtttgttaattgatactcaaggtgtttctgatgtcccggtaaaaagtcttagtgccatatctcataccaatatttttggcaaggcggtgatccccgatattaatcactattatcgaggcagtgcttctatcgatcttaagcagctaccagacaatgttgaagcactacgttctattcatcaattaactttgactgaaggcgctattggctatcgtcaatttgatgtgattgccggacacaaagcgatggcaacagtacagttggctgaaggaggcgttccgccatttgcagcgacagtaacaacgcttaaataa

SEQ ID NO: 299209 - DNA, 1470 bp, Proteus mirabilis
ttgacagggctaattaactttgcaaataacattttatggggatatgtacttatttacttactccttggtgtgggtatttatttcactattcgaacaggatttattcaaatccgccattttggtcatatgttttctattttaaaaaatagtcataagtcagataaatcaggtatctcttcattccaagctttatgcaccagtttagctgcacgtgttggaacaggtaacttaaccggtgtagcaattgcgctgaccgcaggtggccctggggccattttttggatgtgggtagttgcaattataggtatggcgacttccttaatagaaagtacattagcacagttgtataaaactaaagatgatgaaggtaactatcgcggtggccctgcttattatatgacaaaaggtctcaatatgcgttggatgggcgtattattcgccattttcctcatcattgccttcggacttgtttttaatgcggtacaagctaactcaatagcacaagctgctgcatcagcatttaatttcgatccattatatgttggtattggactggtagtgatgagcggctttattatttttggcggtctacgttggattgcgcgtgttgccgagctggttgtacccattatggccatcgcctatttattattagcattttgggttgtcgcagatcattttgaacgtttacctgaagtatttatgctaatttttaaaagcgcatttggtttacaggaagccgcagcaggggcaattggctatggtattagtcaagcgatgacccaaggtattcaacgcggcctattttctaatgaagcaggtatgggatctgcacctaatgccgccgcttctgcaacaccttacccacctcatccagcatcgcaaggttatattcagatgttaggggtatttatggataccttggtgatttgtagtgcgactgcagtgattattttatcttcaggtgtgttagataattatcaagatggtattaatggtattcagttaacccagctagcattatcgtcaactgtcggtggttgggggagtacttttattgctgttgcgatttttttctttgcttttacatcgattattgcaaattatgcctatgctgaaagtaatatgatttttttaggccgcaatcatatgacagggctattcttactcagatcagccgtactggcgatggtgatgtttggtgctttggctgaaatgccgttagtgtggaaaatggctgatctctcgatgggattgatggctgtcactaacttaattgccattattttactttcaggcgtcgctttgaagttaattaaagattataaccaacagcgacaagctggtgtattacccactttcaatattcaccaataccctgaattacaaaatgatatagagcaaggtatttgggataaagagcctttacctaatgaaccgttagtccgctgtgaaaaggtgaggcaataa

SEQ ID NO: 299210 - DNA, 300 bp, Proteus mirabilis
atggtggcgaaacccttactgttaccggcggatattattcagttaccgaaaggacaggcgtttgctctgctggaaggcggaaagttgtggaagatccggatgcccctgccggcggcggaggacgatgcgctgatgccaccggatttgcaaaaaatcgcacagtatatggagaaaaattaccgtaccggcgaaacctggtggacagccgcgtcattttcagatgcgcggcctgatacagacggaatgaaggtgacagaaatgacgccggatacggaaggaggcaacgatggcaacagctga

SEQ ID NO: 299211 - DNA, 759 bp, Proteus mirabilis; identical to SEQ ID NO: 27135

SEQ ID NO: 299212 - DNA, 549 bp, Proteus mirabilis; identical to SEQ ID NO: 27136

SEQ ID NO: 299213 - DNA, 606 bp, Proteus mirabilis; identical to SEQ ID NO: 27137

SEQ ID NO: 299214 - DNA, 504 bp, Proteus mirabilis
atggcacatcaagtgactttacaaggtaatgcggtgactttagctggaaatttccccactgtaggccaaaaagcagccgatttttctttagtaggtaaagatctaaatgatgtttctttagcgcaatttgccggcaaacgtaaagtattaaatattttcccaagtgtagatactggtgtttgtgcagcgagtgttcgccaatttaataaagtcgccaacgaattaaataataccgttgtactgtgtatttcagcagatttaccttttgcacaagcacgtttttgcggtgctgaaggtttagataatgttgtcacattatcaacaatgcgtggtgcggaatttaaagaaaactacggtgtcgcgattacatcaggtcctttagcgggattaactagccgtgctgtgattgtacttgatgaaagtaacaacgttatctacacccaattagttgatgaaatcaccactgaacctaattatgacgcagcattagctgtactaaaataa

SEQ ID NO: 299215 - DNA, 882 bp, Proteus mirabilis
atgcaagtcgcacaatcaatgaaaaacagtatcaaggtatacttggtaaactcatttactcgtgatcattgcggtggcaaccctgccggagtcgttctcaatcctcccaagctaacgacagaacaaaaaatcgccattgctcaacaagttggattttctgaaacggcatttgtctattcgggtgatgacactgattttaaagtagatttttttactgctgaaggagaagttgatttttgtgggcatgcaacattagcggtttttttcactctgtcatcgcttaagttactcaaacctggcgattatagccaaaaaaccaaggcaggaattttaaccgttaccattaatcacgataatattgtgatggaacaaacgcttcctattacccgtaaggggccttgtgttaacgatgtcgcaaaggcgctgggcattctacctgaagtgatagaaaagacagatttaccaatagagattgtctcaacaggattaaacgatatttttgttcccgtacaatttggctatttagatgccttacagcctgactatcaagctatcgctgctttaagccataaatttgatactatcggctttcatgtctttgaacttagtcatgatcaaaatattactgcccactgccgaaactttgcaccacgctatggcattaacgaagaatcagccacaggtagctcgagcggtgctttagggtgttatcttgttcatcaccttttgccaaacaaaaggcaatttttgttcgaacaaggtagagcaatgcaatgctcttctttaattgacgtatttattgattcgacagcaaaaaacgtcactcgcgttcaagttggtggaaaagcgacattgattggtacaaaaataattgagatctaa

SEQ ID NO: 299216 - DNA, 1515 bp, Proteus mirabilis; identical to SEQ ID NO: 297247

SEQ ID NO: 299217 - DNA, 747 bp, Proteus mirabilis
atgttctctggtgaatatgacagtgctgattgctatcttgatttacaagcaggctctggcggtacagaggcacaagattgggcaagtatgctaatgcgtatgtacttacgttgggctgaatctagaggctttaaaacagaaattattgaagagtctgacggtgatgttgcaggtttaaaatcagcaacaatcaaaatcataggagaatatgcctatggttggctacgtacagaaaccggggttcaccgtttagtgcgtaaaagcccatttgactcaggcggacgtcgccatacttcatttagctctgcttttgtttaccctgaagttgatgacaatattgatattgaaatcaacccagccgatctgcgtatcgacgtttaccgcgcatcaggcgctggtggtcagcacgttaataaaacagaatctgcggtacgtattacccacgttcctacagggcttgtcacacaatgccaaaatgatcgctctcaacataagaacaaagatcaggcaatgaaacagatgaaagcgaagctgtatgaactggaaatgcaaaagaaaaatgcagataagcaagtgatggaagataataagtcagatattggctggggtagccaaatccgctcttatgttctagatgattcacgaattaaagatttacgcactggtgtggaaacgcgtaatacacaagcagtgttagatggtgatctcgataaatttattgaagctagcttaaaagcgggcctgtga

SEQ ID NO: 299218 - DNA, 720 bp, Proteus mirabilis
atggttattaaggctcaaagccccgcaggttttgcggaagagtacattgttgaaagtatttggaacaaccgttttccaccaggttctattctgcccgcagaacgtgagctttccgaattaattggtgtgacaagaacgacattgagagaggttttacaacgtttagctcgtgatggttggttaactatccagcatggaaaaccaactaaagtgaataacttttgggaaacgtcaggtcttaatattcttgaaactgtcgcgcgtcttgatcatgatcgcgtgccacaattaatcgataatttattagccgtaagaacgaatatctcagcaatttttattcgcacggcatttaaaaataatccagaaaaatccctagaagtactgactcatcaactaacgactgaaaatagtgctgatgagtttagtgagttggactataacattttccgtggtttggcatttgccagcggtaatcctatttatggattgatcttaaacggacttaagggattatatacccgtgtagggcgttattatttctctaatgttcaggcgaaagagttggcgctatcattttataaaaaattggcgttgctatgtgaacaaaaagatactgagcatgttatggattgcgttcgccaatacggaaaagagagtggcattatttggcatgagctccaatcgccactacctagtgacttagaagaagtaaaacgttaa

SEQ ID NO: 299219 - DNA, 681 bp, Proteus mirabilis
atgcaacaagcactgactaaagccggttatagcagcaaaattctgcgtggactaaaagagctgcattggaatagtcgtggtcagttaattgatggtgataaacgtattgttgaatgtgtatggaaaacatgggcttgggaaaccgcgttagatcaactaagagaagagagtgaacaacagtcacttattcctattcgtattggtgatccggcgggagaagttcgtttagttgatgttcttttacgccctgaaatcacggtttttgaacctctttggacacttattccaagtaataaagcgatattacctattttgtggcaacttttcccagataatccttatctacttgatactgagttcactttaaccccacgtttgtcgcagagtggttatgcggttaaacctattgctgggcgctgtggtagtaatattggtttagttgatcaccaagaaaatgtattaggtgaaaccagtggtcaatttgaacatcaagaaaatatttatcaagagttatggtgtttaccaaaagtgtctaaccgatatattcaggtttgtacctttacggtagatggacattatggtggttgttgcttacgctctgatccgacattagtgataaaaaaagacagtgatattgagccattaattgtccttgaagataaacactttttagcggattaa

SEQ ID NO: 299220 - DNA, 339 bp, Proteus mirabilis
atggtacgtgttgatgtcttaattaatggtgagagagtcgatgcacttgcattaatcacccataatgataacgcaccgtatcgtggacgtgagttggtggaaaaaatgaaagaattcattccacgtcaacagtttgatattgcgatccaagctgcaattggcaatcatattattgctcgttcaactgttaaacagttacgtaaaaacgtattagctaaatgttatggtggtgacgttagccgtaagaaaaaactgttgcagaaacagaaagaaggtaaaaaacgtatgaagcaaattggtaatgtcgagttaccacaagaagcgtttttcgacacataa

SEQ ID NO: 299221 - DNA, 891 bp, Proteus mirabilis; identical to SEQ ID NO: 297517

SEQ ID NO: 299222 - DNA, 1245 bp, Proteus mirabilis
atgaaaatatcacatttctatcgatggatagtattcatcatactcacaatattggctctttactttactgtactcggagggtatttagtttcattagcaggatcgcctttttatctctttaccggtgtcatgcttcttattattgcagcttgctttctaagtcgaaggaaaagcaccctattactctttaactttctatttttaataacgattgtctggagtatctgggagtcaggatttgatttttgggcactcgcccctcgcttagatattatttttattctaggcttactccttattcctttcacactcaataataatgtttacacttgtcgtaccaataaaattggcttattcacactattagccacaacacttatcattatattaggtagttcactaaccgatcctcatgccattaatggtcaatttacacaacaacagcccaccaactctatatctcctatcggagtaaatgataatgactggcccgcttatggcagaacgcaagccggaatacgctattcaccattaactcaaatcaacagtgataatgttgataagttagttgagaaatggacatttcataccggtgatgaaaaaagagctaatgatgccgttgagataaccaacgaagttacgcctataaaaattgaagataatctctttctatgtacacctcaccaatatttaattagcttagatcccgcaacaggtaaagagaagtggcgttttgattctaaattgcaatataacaaaagcttccagcatatgacttgccgaggggttgcctattataatcaaaataatagtgccgaatttgccaaaagcctcgaagttcgccaaccaagcatatcagatgaatgtcctgaaaaagtctttcttccagtcaatgatggccgcctaatcgcagttaatgcgcaaacgggtaatgcatgccgtgattttggtcagaatggagaaatcaatctgttagcttctatgccttatgcttatttgggtggatataacccaacatctccccctatcgtcaccggtaatactattatcattggtggctctgttactgataacttatcaactcaagagccttctggtgtgatccgtggctatgatgttaatagcggaaaattaatatgggtatttgatactggcgcagaagaaattgaagatatcagtggtgcattgtttaccgaaatgtcaattttatggggagcaaccaatcaacgggtattagttgattaa

SEQ ID NO: 299223 - DNA, 558 bp, Proteus mirabilis
atgaactttattaccttgccttttatctcaaaactttatttaaaagatcctcaaaacagtcaagcaattgacgcaggccacggagagcaaggtttacaacccatgacgggaacaccttatagtgttgatattcatccattcttatcaccactaggattaccttgtaaacaacccccttggggatttgttgctggtgttgatttaacaaaaaatgagcttgtttggcaacaacgatttggcaccattagggatagtttgcctaatttagtggaattaccaccattaaaaattggtgttcctgggctaggaggcgctatctcaaccgcaggtaatgtgatgtttgttgctgcttctcaggataattatattcgagcatttaatgtgacgaatggcaaaatgttatgggaagcacgattacccgcaggtggacaagcaacgccaatgacctactctattggaggcaagcaatatgtggtcattatggccggcggacatggttcatttggtactaaaatgggcgatagcttagtggcttatgggttacctgataatttatag

SEQ ID NO: 299224 - DNA, 2400 bp, Proteus mirabilis
atggttacagttgccaataactttgcttggtcaattgaatattcaggcttagaaacaggaaaagatgaatattgccaagagtctctcttaactacggccaatggttatattgggttaagaggaactttgcccgaaatgactataagtgatgagcactaccctgctacctatattgctggcctatataatcaagcaagttcacaaatagaaaaccatcaggtgattaatgaagattttgttaatgcacctaatggacaatttatttctcttaaaattggtaagggagaatatcttcatccaaagcaactgataacacaccatttaacacgtcatttagatttgaaaacgggtgtattcactagccaatggcgtgtagaaacccctgaaggacagcaacttgatattcattgtacaaaatttgccaatatggctgatatgtcacattacgccattttatatacctttaaaccattaaatttctcaggtgagataacggttataactcgcctagaaggaaatacttataattacggtgtacaacgctaccgtagccttaatccccatcattatcatgtgctacaaactggagcgaataagcaacacgcatttatattagctcaaacagatcagtcaaaaatagggatcggattatcgtcaacaatcaggggggatttctttgcaaatgaagatattgtttgtcatgtttcagatacgcttgttgaacaaaccatcaccttcaacgctcaacaaaataccacctatcaacttgaaaaatgtgttgctgtaacaacctctacggcttacccagactcatggcaagatgtgattaattgggaacaacaacctttacacagccaattgataaatagccaaaaagcatggaaaacgttatgggatagtgccgatatctcgatttctggcgatctgatgacccaaaaattactacgcttacataccttccatttactgtcatccgcatcaccatttagcaatcagcaacatcaattagatgtttcagtcaccgcccgagggttacacggggaagcctatcgaggccatattttctgggatgagatctttattctgccattttatattatgcacttccctgaaaccgcacgccaactattactatatcgttaccacaggctacctgctgcgcgtcttgcggcacgagcagaaggatttcaaggtgctatgttcccttggcaatcagggcatgatggtagtgagcaaacccagacattgcatttaaaccccttatcagggcaatgggatgccgaccatagttgtcgtcaacgtcatgtctcattagcgattgcctataatgtgtggctatattggctaaatactcatgatcaccaatttatggaacagtatggacttgaactactcaatgacattaccttgttctggttagaccaatgtcagtgggatgaaggcgatcaacgttttcatattaatggagttatggggccggatgaatttcatgagaaatacgcagactcacttgaaggtggcttaaaagataacgcatacactaatttaatggtggtttggttgtttaatcaaatagagatgttcataaacaatgatcgtttttctaaaaaattacaacagctaaacagccaatctagcgttttcaataaaatacaagaagttaaaaatcgtattgctatcaatattgatgctcatgaaattattgaacagttctcaggttattttcaattaaaagatctggattgggaaagctatcgaaaaaaatacggcaatatctatcgtatggatagaattttgcgtaaagaaaataaatctgccgatgattacaaagttgctaaacaagcagataccctgatgttatttaataacttagataagcaaaccgtacattccctaattacctctcttggttattcagtttctaagcactttgctgaaaaaaatctacattactatttagaaagaacctctcatggttccacactgtcacgcattgtccatgcttatctcgcagaacaaatacagttacatgatttgtcatggcaactttatcaagatgctctttattcagattataatgatattcaaggtggaacaactgccgaaggtattcatactggtgtcatggcggcaacattaaataccaccatcatggcttatgccggtgttgatattcgtcaggatatgttgaccatcaccccttcactccctcaacaatggcaaaaactaagctttaaattattgcatcgctctactttatatcaaattaatctcactcataaagaaattagtattttaagtgataagcccagtactattttaattaaccatcaaacgcataagctaaccgccaatacgttattagtattaaatttaaatggagacacgcaaaatgactaa

SEQ ID NO: 299225 - DNA, 294 bp, Proteus mirabilis
atgactaaaggtcttatttttgatctggatggcgtaattgttgataccgccaattaccactatattgcgtggaaaaaactatctaatgaaataggaattgattttgacaaagagtttaaccatttattaaaaggaataagccgaattgagtcattagagcttattttatctcatggtaataaaagtgatgtttattctgcggatgaaaaaaaatcattcacagaaacaaaaaataaatattatcttgagttattaaataacatcagggtatctgcttgtttagcaactttgtaa

SEQ ID NO: 299226 - DNA, 453 bp, Proteus mirabilis
atgcctaacattaaacctttttcattattcccaacattatctgacaacttactttcaaaccgttttgatcagatagatcgcttgtttagtcagttaacaggcagtaagccaattgcatcacctgtacagacttataacctgaaacagattgatgataaccattatgaattgacagtgagtgtgcctggatatcaagaagatgacttatcggtttcattgaaaggaagtcgcttattgattgaagggaaaaaagaagaaaaatcagaagaagataatgataaatggatacaccgaggcatatcccaagggcaatttacattgcagtttgacctcggtaaaaatgttaaaatagaaaaagccgatttatcattgtcttcttctaatttttcttcttttttcccttcaatcaataagcgacttcctttcaatgaaaccgataagtcatcttcttga

SEQ ID NO: 299227 - DNA, 699 bp, Proteus mirabilis
atgggatgggcgggtaacaaaagtgtggggaaaaagggggcagataattatccaagaggtgcgatagtgaatattgagtggatacgcgagcgagtaagtacagcgttgatgaatgtttgtattatagaaaatgggccgttaagtgccatggaggaacaagcaatacttgtaaccgataggtttaaaagaaacccaatacgctatgcgggtgaaagaaagtctcgatacagactcccctcacatccactcaaaattaagcaaaaacatgccaaaggaaaatcaaaaccattaattaatgaagttacttatcgcacttcatcatggcgcagaggtattcatcaattgcctaacgaaatgcgcttatggttactctattgctatggtgattatcaatattatcgtgagcaaatactcattgttccctatatttggcatgagtttcagcgattaaatagtaaaaaaaggataacgaaaaaagttaagcaacgacttcaatctcttaccttactagccattcaggcggtaaaagcagaaattaatcaaacagcaaaaaaatatacggatgttaagctcgctgaattgttgggcgtcagtgctgatgcttggcgaaagagctataaactgtattggatttgtttattagattgttgctatcaattagatagagattcgctattcaaaattagcgctttaagctga

SEQ ID NO: 299228 - DNA, 1605 bp, Proteus mirabilis
atgaacaaagaaatagctttaagtcaccatcccattaatcagaaaaaaaataccacaaactctctatttcaactctcccttattacttcggcacttcttttttctggctatgctgttgcatattcagaagttggacaattaggtaataaacaaagttgggaaagccctgaatatcaaaaagactgggggcttgcagccatgaatgcctctagtgcttatgctctgggttttcatggtcaaggtgctaaagtcggggtgatggactctggtgcactgctctcacatcaagagttgagtggatcacgctttcatgcagtaaaagccaaaggtgaatatggctctacgggaatgcgctatccacaagaaatgggcggacattatgaaaaaggccaagtctttgatgttgatggtaattggatcaaaggggtgaatgatacccatggcacacatgtcactggtactgtgggggctaaccgtgatggtaatggtatgcatggtgtggcgtggggggctgatatttatttagggaatactggggcaacagacagcaataactatggcccttatcaagactacacctatttctatactggctggaaagcgatggtcgatgcgggtgcgcaagtgattaataatagctgggggactaacccgcgtattattaatacagataaaacagaggggcctgatggtggtaataccacgatacatatgcctgttaacaccacggcacagacagaatacgaatatttctactttaaaaaagtctatggtgataaaccttcctttgttgatgctgcttatgatgcagttaaaggaacgaatgttgttcaggtctttacaacgggtaatcgcgactttgctcaaccttattatcgtcctctttatccttattttaatcccgaagccgaacagcattggattgcggtggcaggattgaagcaaaatgcggataacaccggttatgtattagaaaaagtcttcaatgaagcgggtaatgcaaaatggtggacagtggttgcaccaggtcgaaatatctattctacagtggttgataaagagggaaatccaggttgggatacctttagtggtacttcaatggcagctcctcatgtgacgggggcgatgggagtattaatgtctcgttatccttccatgaacgccattcaagttcgtgatgtcatgttcactaccgctaaccatcgtgatcctgatggctctttatatgagagctggacggctgcagaaggtactcccgatgtacgttatgggtggggaacaccagatttagataaagggatgtatggtccgggtcaattgctaggtaaatttgaatataacctaaatgcgacaccgcttgatgtgtggactaatgatatttcccaaacagctttagatctacgtaagcaagaagatctcgcatggttgaaagaatataccgaaaaaggtattgcggcaggaggtgattatcatctcggtactgattttgtgattaatgatggcaatcctgatcctacatcacatattgttagccaagaagatgctgaaaaatggcgtcatgaatattaccaaatacgcgcattactattacctagttgtgcatga

SEQ ID NO: 299229 - DNA, 834 bp, Proteus mirabilis
atggcggttgcgggtatctttgttgtagtcgaatcatggttattaattggtgataatcctaaagagcgagctaaacgcttgggcttttatatgacatcactttatggtggcacaacattaggtcagcttgctattggtgccattggtacgcaaggggcaattccttttatcgcggtattggcattgctattaattgcagtgttacctcctttgttttttaaacaaggacaaccccaatgccacgagcataaaagtttgtcacttaaacagattagccggctgaataaagcttctttagtaggctgtatggtttctggcgttgtgatgggtagtatttatggcatgatgccattggctttaaatcaagggcaatttaacaccgaccaaattggggtgttgatggcagcaattattttaggtggtatggttgttcagcctattattagcaaattgtcggtgatgatgagtaaaaccctattattagccatgatgtgcttagttggggtatttgcgatgggcatgacttatctgtctaatgactatgtggtgttaattattgcattagctttattaggaatgtcatcttttgcactttatcctattgctatcacattagcttgtgatcatgttaatgcgagctatattgtggcaattactcaggtgatgttattaagttacagcgtgggttcagcaatggggccattaggcgcaggtatgtttatgtcacaagcaagtaacggcattatgaactttttctttgtcgtgttattagcgacagctgtatatatgttatttgccagtttacgacgcaaaagccatattgtgcttaactaa

SEQ ID NO: 299230 - DNA, 228 bp, Proteus mirabilis
atggacactattatgtttcccggtagccagatcttcgtcaataatttgacgaataaagttcgttgggcgggcatctgcctcattcatggtcattttttcctcaaagcaaaacgcatattgacctactataatccaataagcagacttaaatcaagctattgttttaaaatcaattatttacaatttaaccatgatataattaataagaaaaaacacgacaaaacatga

SEQ ID NO: 299231 - DNA, 255 bp, Proteus mirabilis
atgggattgaaaattgatttaacttggttcgataaaaagactgaaagttttattggtgaagaatattcggtcgatctgggagatgacgacacggttattgaacagactgttaatccgacagaaaacatcataaatgcaggtagcttcgatgttatttccgcatgggttccttacctacagaaatatatcaaacataaaattgaactaaataaatacgattaccaggtagcatttgattatcgtgataagtggtaa

SEQ ID NO: 299232 - DNA, 261 bp, Proteus mirabilis
atgatgaaactgaaaaatagcattaatgattatacagaagctgaatttaaacaatttattgaagctataattaattgtgaaggtgacgaaaaaacacaagatgataatttagaacattttattaaaatcactgagcatcctgaaggttcggatctgatttattatccagaaggcaataatgatgggagtgctactgctattattaaagaagttaaagaatggagggctaaaaatggtaagcctggatttaaaaaaggttaa

SEQ ID NO: 299233 - DNA, 450 bp, Proteus mirabilis
gtggtttggttttccgcattagtaatgatggcctcttttttaggaaaattaggtctaattaaatggctctcattaagtgtgggtgccggtattgatagtatggggataagctgggtaagtggtatgatattactcgtgctgatttatgtctattctcactatttctttgctagcaccacggctcatattaccgccatgtttgctgcattctatgccgcaggtttagctcttggcgcgccaccaatgttattaggacttattttagctttctcttcttcattaatgatgtctttaactcattacggtacaggtactgcaccgattattttcggctcaggctacgcgaccttaggtgagtggtggaaagcaggttttgttatgagcattgttaacctgattatctggataacccttggtagtttatggtggaaggtgctggggtattggtaa

SEQ ID NO: 299234 - DNA, 813 bp, Proteus mirabilis
atgaataaatcggttgaagcagtgattttagattgggctggtacagtagtcgattttggctctttcgcccccacacaaatttttgtcgatgcctttgctcaagcctttaactttaaaataagtttatcagaagcacgagggccgatggggatggggaaaatcgatcatattcgtgctttacttaacgagcctaatattcgtactcgctggacagcccaatttgatcacccaccaagtgaagaagaggcacagcatatttatcgcacttttatgccgttacaaattgcacaagtggtacattttgctaaaccgattgaaggagcacttgaggctatctcgaccataagagcacaaggaattaaaatcggctcttgctcaggttatcctaaagccgtcatggatgtattagtaccgaaagccgctgaatatggttatcagcctgattgcgtggttgctagtgatgaaattgccgccggctctcgcccaggcccttggatggcgttaaagaatgtgattgaactgggtataatgagtgtagcacgctgtgttaaagtcgatgatgcagtaacaggtattgccgaagggttaaatgccggtatgtggactgtcgggttatctgtttcaggcaatgagtttggtgccacctttgaacaatatcaaacaatggaacaggcagaaatagaaaaccgtaagcgcattgctgaaaataaactacgtaccgctggtgctcattatattattgatacccttgccaatttacctgcggtgatagaagatattaatcagaggatcgctaataatcaaaaaccgtaa

SEQ ID NO: 299235 - DNA, 840 bp, Proteus mirabilis
atgccccatcgccatcccgaacgaaaaacgctcactgttcacatacggaatggaagatattgcggtcaccccggcaatccccgcattggcccgtttctccacctgactgattttattgtccagctgactgaaacgctggtcggtatactgccgggcattgtccagcaccgtgtgggtcacctgcccgaacgtctcatcggtatagcggtttgcggccgccagggtctgttcctccccctcaatacgggcctgctgctcttccgtaatccgcttgtttatcttcgcctcactgtactgaatgctcacatcggtgtagtccatggcctgtttcagcgtctgcttatcgccggcaatacgcgcatcccgctcctcatccagttgccctttgttgaccgcatccgtttttgcaatgccggccgccacatgcgtcagaaaacgttcctgaccttcacggccgacggacacgctgttatcccggtcagccaggctgccgtcccccagtgccacactgtttttcgccagcgcccgggcatccacacccagtgccacggatttttcgcccagcgccagactcttatccccgaccgcaacagcctgtttaccctgactcagcgtactctgcgcctcattcagggctttatccgccgcctgatattccgcctgtttctgcgccagttcggctttcaccttctccagatcccggatgttttccagctcggattgcgtcggacgcaaatcagacaactttgtatccagcgcggagagatccttttccagccgggagagttgcgtttctgcctgcttcagtgcctgatcggtgacggctttttccgccgataa

SEQ ID NO: 299236 - DNA, 2190 bp, Proteus mirabilis
gtgcgtgtgttttccgctgcggttaacgcgacaatcacttattttcgccaacataaaacaccagcacttattgtattacctaccggtgctggaaaaagcttagtcattgccgaacttgccaaaagagcacgtgggcgggtattggttctagcacatgtaaaggaattagtagagcagaaccatagcaaatatgaagcctatggtctatctgcggatatttatgccgccggattacagcaaaaagagagtcgaggcaaagttgttttcggcagtgtgcaatcggtagcacgtaacttatcgcagtttgagcatgctttttctctattaattattgatgaatgtcaccgtattagtctgtctgaagatagccaataccaacaagtgatcaaacaacttcaaaccattaacccccaattacgcatcttaggattaactgctactccttatcgtttaccgactggttggatttaccaatatcactatcacggtatggtaaaaggagatgacaattgttttttccgtgactgtatttatgaattacctttacgctacatgataagtcaccattttttagtcccaccaacacgtttagatatgcctattttgcaatatgactttagccaagttagaacgagccaaaatggtatttttaatcaagaagatctcaatcgcgaagtaaaaaaacaacagcgtattacaccccatattgtgtcacagataattgaatacggtgaacaacgtcgtggtgtgatgatatttgcggcaacagtagaacatgcgacagaaatcttcacattattaccccaaggacaagccgcgttagtcagtgctgaaactccctcttctgagcgtgacgcattaatttcacagtttaaacagcaacagctacgttatatggttaatgttgctgtattaaccacaggctttgatgcaccccatgttgatttaattgctattttacgtccaacggagtccgtcagtttatatcaacagatagtaggacgaggattaaggttatttgcaggaaaaacagaatgtttaatcttagattatgcaggtaaccctcacgacctttatcttcctgaagtgggtagtaaaaagcccaatccaaatagcaaaccggtacaagtgttttgtcctctctgtcaattcgctaacactttctggggcatagttgatgcagatggcgatattattgagcactatgggcgacgttgccaaggttgggagcttgatgagcagacattagaagtggtacttcgtgattcactcttagacattgagccggttgttcaagagatggtcgaagagttacatcgtgtttatagtgcaaaaagtaaagcctatggtttatttaatgaagagagcgaattagctcaagcattacgtttacaacgtcaaggtgaagaagaatttttaggtttttctcgtgcagcgacggttagacttaaagatgagttagcgaaatacccttttgctgaagggggaacggttcttttttgtcattatcgttatctcgcggtggaatatttattaatcgctgtattgaatagctgtaatagcatgtgggtcaatgacagtcttgatgtatcttcaacacgctatttagatattcctcatgcagatattatcgctcgtattgatttaactgaatgggaaacttcacccgattctttacgttatttaaccttcttaaaagggcgtgtaggacgcaaagtttcagatttctttatggactttttaggggcgcaagaaggtttaaatactaaagtacaaaataaaggcttattacaagcggttgatgacttttgtgaagcatcagacatgaataaacaagagcgccaaacttgtcgtgaacaagtctacagctattgtaatgagcaattgcaatcgggtgaagagattgcattaactgaacttgcacaagagttaccgccattaggtgatcaaaactttgcacagtttacagaagaaaaagggtatgaattagcggaaacttttcccgcagatcgcagtacattacgccaattaatgaagtattcaggaagtggtggggggttaacggttaattttgatgcgaaactgttgggggaaagaattttttgggatcctgctaccgatacactgacgataaaaggaactccacctaatttacgcgaccagttacagcgtagagtctcagaaaaatag

SEQ ID NO: 299237 - DNA, 126 bp, Proteus mirabilis
atgccacaagataatcatctcgcattagtttgcgcgctaagtaaatggattgaggagcatttaggtcgcgtaatacaccttgaagagccgtttagcgggggctatccatcttttacgcaccagtga

SEQ ID NO: 299238 - DNA, 150 bp, Proteus mirabilis; identical to SEQ ID NO: 297543

SEQ ID NO: 299239 - DNA, 189 bp, Proteus mirabilis
atgtatggtgataccccaacaatagtgtttccttctttgtcagttggcggtgagtcattgaatgttataccctctatatttttaatttttgcaattgcgacagtatctcttctgacattactgaataataatcctgtatctggggtggctaataaacttcctgaagcattaatagaactggtagtttga

SEQ ID NO: 299240 - DNA, 657 bp, Proteus mirabilis
atgaatattcaacagtttgattatcattcagatcttttacaagcgatactttggcaatatgaaaatgccgataaattaaaatcactggctcattttaaggcagattattttcaccaatccaccgtgttattttggcaaaattggtatcgcgatatatttaatattgataccgccaacgactttgggttagcagtctgggcgcgtattttagatgtgcctttaggcattgatatttccccaagtgagaaaacaaaaataggttttggttttggtaaaaagaaagctaattttaacgcaaattttcgacgcaataccgattacaccttatcactgacgttagatcaaaaaagaatgttgataagaatgcgttattttaatctcacccaaagtccgacggtcaccaatattaatcaatttttaaaacgttttttctggcgaggtgaaagtaaagtatttgtacttgatccctttgatatgacgtatatgtattacgtttttaattttaatccagatgaacgcttacgtttattattagaaaacttcgatttaatgccacgtccttctggcgtaggcgtcaaatatcgcatcataactaaaaaagcatttggttatggttcatatcgtaaaaatttcttaaaaagtaatttcggagaataa

SEQ ID NO: 299241 - DNA, 924 bp, Proteus mirabilis
atgccaaatagcgccctattgaaaggtgatcatattgtcatcttgctattgatatcgctatgctctttttctgtttctgcaaaaaaaatcattcaaggcattactcaagatagtgaaaatattgttgttgctaaaggggatattcccactcctgaaaaatttacaaccaatattcttaactatcggcagaaagctgttgatcagttgaccttagttgaaactgcattaaaaaatgtcattgttaacagtgaaaaaaatcaactgactgatgcccagctcgcctatcaacaagcgcattatcactatgaggtgatccgcccgattattgcattgtttggcgctactgaacgcctattaaataatcgggctgatttctttcttgaaagagaaaactcgccccgttttagtggatttcatttggttgaatatcaactctttaaattagaggatatgcaatcgtcagccgagtcagccaaggcactgttaagaggcattagtgatctaaaaaaacgcttagcgattgaagatattcccattgctaaattagtgcaatctgcaggtgatagtttagagctgattttaaccgacaaattagccggcattgaaaatcaatatgcaaaaagtgatctgggggatgggtatgccaatttatacggttcacgcctaatcattgagtctctatctaaccatattccacttcaggaatatcaatcactacgcaaacagtatgacactattagcaaactatttttaaaatatcagcgagatgaagaactattccagcctttagatacgctttctgatagtgagaaagccgtgctctttgcacaaataacacaattagcggagcaagttgcacaattacgtaacgtgctcaatattgatgtctattattactataaagaagcatatggtgaaaaataa

SEQ ID NO: 299242 - DNA, 249 bp, Proteus mirabilis
ttgctattaaaagcagtagaagagatagctaatctacttattgaaatggatattgaattacctgactttttgatttatccactatgggatcttagccatattctggatgattcaagcatttttggtaatttcttagtttcattctttgcttatcgctcacaacccatcggtttaagtgttgttacttttattgtgttttggttggtggtcgcactgttatttaaacaaggggatcgtcatgccaaatag

SEQ ID NO: 299243 - DNA, 1416 bp, Proteus mirabilis
atgactcgatatgaacagcttgcggcacagatacgccaacaaattgaagataatatttggcaatcaggcgatcgtttaccctcattacgggatacggttaaacaatcaggtttaagtttaatgaccgttttacaatcttatcaactgttagaaagtcaagggtggatcaccgctcgtccgcaatcaggttattatgttgcacatcgcaatacaggttttgctcaagtaactgccagcaaagggctacatatgagtgaaaatgttgagataagcgcctctatattcaatgttcttcaagcctgtaaagatcccaatattattccgttcggttccgcctttccagatcccagtttattcattcaacctaaattaagccgagcattagcctctgccgctagacatttagcccctcaaagttcagtgattaatttacctcctggtaatgaaaaactacgtcgtaatatagcccaacgctatgcactgcaaggtattcatgtatcgcctgacgatattgtgatcactgcaggtgcgatggaatcattaagttttagtttacaagctgttactgagccaggagattgggttgtcatagaatctcctgctttttatggcgcattacaggcgatagagcgtttacgattaaaagcgattgccatcaaaaccgatccggtgacaggcatttgtttagatgagttagagaaggtggtagaacaatacgacattaaagcgtgttggttgatgagtcattgccaaaatccattaggtggcactatgcctgatgaaaataaaatcagactagtagaaattttagcggcaaaacagataaccttaattgaagatgatgtctatggtgaactgtataatagtccaaaggcgccaatgcctgtgaaaggctttgataaatccaatagcgtattgcactgcgcttctttttctaaatgtttagcgccaggatttcgagtcgggtgggtcgcagccggaaaacatgcgactaaaatacagcagttacaaatgatgagtactgtatcagcgagtatgccaacacaacaagctatcgctgactatttatcacaaggggggtatgacgggcacctacgtcgcttaagattattattagagcagagacgttatcgtatgttacaggccatacaaacgcatttacctaaagatgttaaagtgaatattcctgtcggaggctatttcctatggttagaattcgagccaagctttgatgctaattcattgtaccattttgctctcgaaagaggggtgagtattgcaccaggtgctatgttttcgaccagttcacagtttaatcatgcttttcgtttaaactcttcttttcaatggaatggtcagactgaaaaaggaatgcaaattattggtgaagggtgtcgaaaattacgtcgtaaatag

SEQ ID NO: 299244 - DNA, 918 bp, Proteus mirabilis
atgacacataatcacattgatgatattgagttgaatatggctgagaaaacacaatctgacaaattcaaagcggccaagaaaagcacattggtcagtgtttttgttaatatctttttatccatatttcaaatcacaattggtttcttctcacattcccaaggcttaattgctgatggtattcattcactgtctgatttaattgctgacttcgtggtgttaattgcgaataaaggcagtcaaaagcaacccgatgccgatcatccttatggacattttcgctatgagaatgccgcttcattagtgttagggacgattttattgattgttggtttgggaatgatattttctgctatccataaaatgttagatccttcaatcattcctgatgttcatagcatcgcgctttatgtggctttattggcattagcggctaaagaagggttatttcgttatatgttagctgtagccaaaaaagtcgattctagtatgttagtggcaaatgcttggcatgcgcgctcagatgccgcctcttctttagtggttgcaatagggatcattggtagccttgctggatttaaattctttgacccactagcagcacttattgtcgggctatttgttggccgtatgggatggcgttttacctatcaagctttgcaagatctcatggatagaggtgctgatgaagaaacacttgaacagatcaccaatacattaatcaccacaccaggagtacaaggggtacatgatttaaaaacccgtcgtgcaggtgattatttattagttgatgtccatttagaaattaaaggcgaattaacggtcaatcaaagtcatgatattgtggtcaatgcccatgatagagtacttaaacagcatgcacagattttaagtgtgatgatacacgtcgatcctgcttaa

SEQ ID NO: 299245 - DNA, 543 bp, Proteus mirabilis
gtgcgtgctctcacgttgttatcattaattcccacttctgtcttcgctcttgagtatcccgtaggtcaaccaatcattaaaaatggcatggaaattcaaggtgtctatctacaacctatcacgatggacacagaggaaggccatcatgcaatgaagcacctacctgctgataaagctgatatccatttagaagcagatattcatgctgttgaagataatccgaatggttttgctgaaggtgattggatcccttatctcactgttgaatataccgtgactaaattagatgcaccggagaaaaaacagcagggaacttttatggccatggtcgccagtgatggtcctcattatggtgaaaacctaaaattagatggcaacggccaatataacgttacctataacatttacccgccttcttacaataaagatgtcgtttttggtcgtcatatcgacaaagagacgggggtagccgcttggttcgagccttttgaagtgtcatgggattttaactatagcggtactggtcgtaaaggcagttactaa

SEQ ID NO: 299246 - DNA, 660 bp, Proteus mirabilis
atgaaaaagaatatttccctaatattatttttactattttccctcataacggctagccaagctgctggaataagtgtgggaggaacacgttttgtctatgacgatgatctacgtgaaatcagtattccaattatgaatacagataaggaaaaaccctatttaattcaaagttgggtttcagcttatcaaggtgatgaaaaaacaccttttattgcaacacctccactatttcgtattgagccagatagttcaggcacggcgcgaatttcatataccggagcacctttggcatcaaaccaagaagtggtttattggctcaatatcaaatccattccaccgatggaaaaaagtccagagaatcaactccaattagtgattaactctcaatttaaattgtttctccgtgcccatgatattgaaccacttgattttgataaggtgaaattatctaaacaaaataaagggttagtaataaataacgatacgccgtatcacctgacaattaaacatatcttagtgggtgataaacgctacccatttaatgattttgttaatcctcaccaagaagtggtcttgctaaaagaaaatcatattccgcagaaagttaccgttcaatttatcaatgattacggtgcgactgtagataaagtattaaattaa

SEQ ID NO: 299247 - DNA, 1554 bp, Proteus mirabilis
gtgctatcagataaattaaataaaccttttattctaagcagcgcagtaaaaaaagagcggatcagtggaaaatttgatatttcttcacctgaagacgcctttgaattaatggtaaagcgtttgtcattactttattttaatgacggagaatctatttatatttatcgcgataatgagatacagcaacagctatttcaagtgaaaaatatcagcttgagtaaactgaaagagtatctacaagatgttggattatatgatctccgctacccattacgtgcaggtcacgatcagcgtactttttatctctcaggtcctcctatttatattagcttagttaaggctgctgctgagcttttggataatgatgtacaagaacaaattaatgaaaatatcaataatcaagttccaaccggaagctctcgttatggcgatgagtttgtgcagatatttccattaaaaaacacttttgtacaagatagaacctatatattacgtgatgaaaaagtggttttaccaggtataacaacggttttgcaacagctatttatgccatcgggagagaaagaaaaaacagtcagaagagcgcgtgagattatcgaagataatgataaatatcaggatgataaaattaccaacgatatacaagatactcattcaccgattatcactcaaatgggcaaatataatgttgaactcgttcctttacctggatcaaatagcctgttggttaaaacgagtcgagaaggtttagctttagttagctcacttatttcacaattagataaaccgaaaagacaagttgaattgtcattatggataattgatatttctaaaagtaaagccgatagtttgggggtgaattggcaggggagttatggctcgggtaaaaatacatttttctttaataccgctagtttaagtgctgtatctggttttagttttttaagtaaaatcaaagcactcagtgaggaaggggaagctaaaatggtttctcgtcctattttgttaactcaagaaaatacccccgccatatttgataataacaccaccttttatacacaaattaaaggtgagcgagttgcttcattagaatctacaacattcggcactatgatcagtgtattgcctcgtattagtaatactaaccaagagattgagatgattatcaatcttgaagatggcgccgagaaaaaaagtgatgatgaagatagagaagaagggattgaaaaattacctgttattaatcgcacaaatatcagcactgtggcgcgagtttctgaaggcggtagtttattaattggtggatatacacgagaagataacataaaagcagaaaacaaaattccttttttaagtgctatacctttagttggccgagcatttagctatcagtcagataataataaaaaaatggtgcgtatttttatgttacaaccgcgtttattagataaaactgatacgcacggattggactctttaactgaacacccatttttaccgatggataaaaaaacatctcaagcgctaaaacaaattcaggcatttatgaggtga

SEQ ID NO: 299248 - DNA, 354 bp, Proteus mirabilis
  misc_feature (324)..(333): n is a, c, g, or t
atgtatcacgatcttcaaggaaaagttgctgtagtaacaggttcgtcacgaggaattggtgcagcagtagtgacgagattagttcaagaaggaatgaacgttgttatcaactatcactctgatgaaaatgaagctcaagcattagccgatagcctaaatagacatggtaaaggtaaagcgattatttttggcggtgacattagtgatgaaaaaattgctcataactttatttataaggcgattgaccactttggtcagctcgatcttctgatcaataatgcgggaattgagacacaaaccccttcccatgcagtgaatctagannnnnnnnnngaatttagaagattggcgtaa

SEQ ID NO: 299249 - DNA, 300 bp, Proteus mirabilis
atggtggctaaaccgctgctgttaccggcagatattattcagttaccgaaaggacaggcgtttgcgctgctggaaggcgggaagttatggaaaatcaggatgcccctgccggcggcagaggctgatgccctgatgccaccggatttacaaaaaatcgcacagtatatggagaaaaattaccgtaccggcgaaacttggtggactgcgtcatcattttcggatgcgcggcatgacagcggcggtatgaatgtggctgagatggcaccggataccgaagggggcaacgatggcaactgctga

SEQ ID NO: 299250 - DNA, 1137 bp, Proteus mirabilis
atgatgcttcataaaaaattacatagcgaaatgtcatgggaacaacttggtgagtactatgatgaaattagtgatatgtccggtgttcgacaagatccgatccaccatgctgaaggtgatgtagctattcatacacagcaggtgatccacgctataaaatcactccctgaataccaagagctgtcagaaagagagcaacaaattctatggattgcagcacttttacatgatgtagaaaaacgttcaactacccgtgaagagaatgggcgaattatttcgccaggccatgctcgtaaaggagaattaacgacaagacgttttttatatgaaaaagtgccggttagctttattgatagagaacagattgcggcattagtacgctatcacggattacctttatggttaatggataaacccgatcctaaaaaagccttattagcggcttcgttaagggtagattgttatttattggcattgctggctaaggcggatgttctgggacgaagctgtgaagataagccctctttattggataaaatagcgttatttacactttactgtgaagaattaaattgttggagaacacccgcacgatttatttctgatggcgctcgatttcactattttcatagtgaaaatagtgtcgatcctcactatgaaccttatcctgagcaaggaagtgaagttattgtgctttgtgggctaccgggaatgggcaaagatagttatattcgccaatattgtgcagatatgcctgtagtaagtttagatgcattacgtcagcagcataatataaaaccagatgatcgtgatgcgaatggatggattgcacaacttgccaaagagcaagcgagaatatatttaagagagcataagccttttgtttggaatgcaacaaatattactaaacaaatgcgtaatcaacttattgctctgttttatcgttatcaagctaaagtgacattggtatatattgaagtcccttatttgcaatggaaaaaacaaaacagcgcaagaaaggaagcggttcccgataaagtgatggaaagaatgttgagcaaactggaagtcccaacaccagaagaagcgcttaatgtgatttattgggttgatggggaagctcaaaatttgatttaa

SEQ ID NO: 299251 - DNA, 1638 bp, Proteus mirabilis; identical to SEQ ID NO: 297386

SEQ ID NO: 299252 - DNA, 378 bp, Proteus mirabilis
  misc_feature (284)..(293): n is a, c, g, or t
atgacacaaccccctgttttccagcaaagagatcagatacgtaaagctatccgccaaaaacgccgtcaacttactgtggcacagcagcaagatgctgcacataaactctctgaacgggtactccatcatcccaaagtcaagcaagctaaaacaattgccttatttctctcttttgacggcgagattgataccgcacctctaatcactcatttatgggatttaaataaacaggtttgtctgcctgtattacacccttttcatcgccgtcaaaagagagaaataannnnnnnnnntgcctgtattacacccttttcatcgccatcatttactttttttacgttacgctcccaccacgcagttagtgaaaaatcgttttaa

SEQ ID NO: 299253 - DNA, 465 bp, Proteus mirabilis
atgtggcagaacttccgtgaacatatggacaagctctatcaccactatctggccaatcctatatccgcagagcagatatgcggcggatacctggataaaatcatagtgttgtgtgatggtctgggtgaaaaccggctgaacgatggttcattattcaccgatgacggtgaggcactttgttttaacggcaatgcggctgatgatatgaatcatgagacatttattgtacagcgcgaaatccccgttgaggactactgggattgctgtaagacagcatacaaaccctatgacgtgtttgtggtggcggcattactgctgctgcacaacctgtgccccgggtatttttcggtctcttctgacggggataccctggactggcaaccggtgctggactatgtcagtaaggcattcccttatcttatcctgacgttaccggcaggcattgatgtgccggaggctggataa

SEQ ID NO: 299254 - DNA, 261 bp, Proteus mirabilis; identical to SEQ ID NO: 27108

SEQ ID NO: 299255 - DNA, 411 bp, Proteus mirabilis; identical to SEQ ID NO: 277239

SEQ ID NO: 299256 - DNA, 1401 bp, Proteus mirabilis
ttgattgtagctcgtagcgcagatagtgatgctttaaaagcacaacattttgttattcatccagccaaaaataatcagactggtatttatagcactcaagcccatcatggcgctaataactttacttatccactacctaaacactcattacgttataccactgtacctaattggaaaactcaattgcatggtgcaacgggttttaatgagctaggcgttggggtgagtggtacagaatccatttttgcctcacctaaagcattggcgttcgatccttatgttgaagatacggggatcactgaagatgatattccagatattttactctcaagggcaaaaactgcccgtgaagcaattgaattactgggaaacatcatcgaaacacaaggtgcgggagaagggtttggggttgccgtcgttgataaaaatgaggtgtggtacctagaaacaggtacaggtcatcaatggatggcgcaaaaactaccaaaagataaatattttgcgacgggtaatcaagggcgtttacaggcttaccatacagatagtaatgataatttaggttctaaaaacttagttgagtttgcaatagaaaaaggactttatgatcctgccactgatggcgaatttaatttttctaaagcctatacgcgtgatgatgaacgtgatctcacttataattacccgagggtttgggttatccagcaacaatttaacccttctctgaaacagaatgtggcagatggtcgtcaatttgcgcctatgctgacaccggagaaaaaagtatcagtagaagacgccaaagcgatgttacgcaaccattttgacggtacagaacatgatccttataccaatggattgaatggcaatgaaccatggcgaccaataagtgtgtttcgtacttatgaatctcatgtgatgcaagtaagacctgaattaccgcaagagattggtgaagtgacttatgttggtttgggaatggctgatctaaccgcttttgttccttattacagtggattaaaagcatatccgcaacactatactattggaacagataaagcagataatgactctatctattggaaatatcgtaagttacaaacattagtaatgacagattatcctcaatttgctcctattgttaaaaaagcataccaagaatgggaagctaaaacagcattagaacaaaaagaaatggaggctaactatttgtcaatgagtaaaaagaataaagcagcagcggataacatgctgaatgaatttaacttacgtgtaatggctgatgcagagcaactaactgaaaacttaactaatcaactctttactcttaaaactaaaaatatacaagatgagatctttttgctaatcaatctaaaaaagattaattactttaacgtgttgtaa

SEQ ID NO: 299257 - DNA, 1323 bp, Proteus mirabilis
gtgctaaaatcaatcgctgcggtttttcctctgataatagcgccagatatttcacctttattagaaaaaacagattcatggttagaaacgacaccaccaaatattagcggtggtgtcagtggtaatcaattaattgcgcgttatggtattagctacgaagggggggataattttattagcgctgctgaacgtggcaatgtcacagagaatggattagcagcagctaattttattattccaacagtattaaatgaatttaataatacacgtagccagatttcagatgaagctttaagtttattagtcgccgctggtaataatgataataatattgctgcactatcaaatgatctggcgcccattgctgacggtagtgatattcaagcaggattaatcatggttgaagatatgcgcaacaatattgctcatcgctacttacgctatgataatcagctccccattgaagaaagagaaataggttggaatagctgggcaaatattctgtacggttatggtacgcaaagtcaacaaggtggaattaacggctacaatacttatcgcactggtattcaaatcggtactgattatgaaataaatcaagatgcgctaattggcatttctttagcatataactacgctaaagccgatgctaaacaacgtaatgcaagcaaagaaattagccattttgaatttatgccttatgccggttggtatagtgatacattattcttaaacggtaatttaaatattggttattacactgtcgatagtgagagggatattggtggtaatacgggatggcaaggaaataccaaagcaaaaggtgactactctggtgtgcaattaggctatcagattaacgctggcacctatttggattttgattttatccatattaaaccgatgctaacttaccaatatcaatggctcaatattgattcttgggaagaaacaggctctacattatctatgcgtacttatggccaacgctacgcagttaatcaattaggtggctctgttgctttatggaatgactaccaaacctcttatggcaaattaaccccttctcttaaccttcgttatatcaaagatattgcaggtaataacgatattaatcaacgccacagccttacctattttaatactggaggaagcaccttcgatattaaaggaaataccgttggtggtgacatcattagtgctgaattaggtgcaaaccttgatattacccaatcgttaaatttaggtacaacaatgggatatcagcgttatgacaaattcaatgaagggcgtatcggctttactgttagccagcgtttctaa

SEQ ID NO: 299258 - DNA, 933 bp, Proteus mirabilis
atggaattaataaaaaacactaaaaaaccgactgttttctatttatctgaagggattatatcaacaggcgctatatcaggttggcctaaaaattcaatagatggaacaacgcatctcacctatacatttcctaattacagtgagcggtcagaaaatataagaaataaacatccgataacagaaagtcaaaaaaaagaaacgctaaagaatatcgcagagtattacaaattagattatgaaataaaggaaagaaaaaaagaactagaagccattaaagatagtgaggatcccaaaaaaagaattcaggaaataaatgaagatataaaattaaagaccgagagaagatacgagataaaaaaaggcatacctttatattttttggctacaccaatgacgatatttcctcatcaacaagaagttatcacagaaattttacaattggcttcagatttcgcagaccttacttttactagagtacctatacaaaaaaatgccaatttaaagtttggctatttcaatcatttttacaaagattcaactactttttttatgacgagaggaaatggaggctttgctcaatatcctaactataacggtacacctataaaagagatcgggcaaaatgaaagttatgatttctctggaaccatatttattaatttagcttctcatgaattttataaatgggtcaaacgggataatcttgataaatatatagaaaatgaggccaatatcggcgatttatataattaccatgataataatcaagttgctataataaaaagtacggatgtgttactcaacgaaacaatgaaaagtaaacacaaactaggatcacaaatatattatgtttttttgcatgaattaggtcatgcactagggctagagcacatagatgcatatttgaaaaatataaaaaatgatgcaatttaa

SEQ ID NO: 299259 - DNA, 735 bp, Proteus mirabilis
gtgctagttacacactcttcaaaaaattctattgaaaaccattttgataccagttttgaattagaagctattttagaaaaacgagttaaacgtcagttgttggaagaagtacaaggtatttgtccaagtcacgttactattatgcaaactcgccaaggaatagcaaaagggttaggccatgccattttatgtgcaaaacctttggtgggtgatgagcctttcgctgttatcttgccggatgttattttagaccgatatagtgctgatctgactaaggttaatttaaaagagatgctttctcattttgaacaatctggcgcaagtcaaattttagtagagcctgttcctgaagaggaagtatctaactacgggattgttgactgcatgggagaacatttacagcctggcgacagtaaacccattactcgtgtggtagaaaaaccgaagaaagaagaagcaccttcaaatttatctattgttggtcgttatgtgttgtctgaaaacatttggcctttattagccaaaacggcaccaggagcaggggatgaaattcaattaactgacgcgattgcaatgttaattgaaaaagagcctgtagaagcttatcacctacaagggaaaagccacgattgtggtaataaattaggttatatgaaagcttttgttgaatatggtttacagcacgaagagtttggcgaagagttcacgaaatggataaaatcactgcaagcttaa

SEQ ID NO: 299260 - DNA, 915 bp, Proteus mirabilis
atgtcaacattttggattttagcctccaacagttggatgcaaacaccacagggattcgaaatcgtcaacaatcaagtggttcccgttgattggctagcggttatttttaatccttccttcccttatcgtcttgctcatatgggcgttgctgcatttcttgcttcggcattctttattgccgcctcggcttcatggcatttattaaaaggcaacaagacatctgcaatgaagaagatgctctcgatgtctatatggattatcttaatcttagcgcctattcaagcacttattggtgatatgcatggtttaaacacgttaaaacatcaacccgccaaaattgccgcgattgaagggcattggcaaaataatcctggtgaggctacaccgttaattctatttggtataccggatatgaatgaagaaaaaaccaaatatgcccttcaaattccttatttaggtagcctgatattaactcatagtttagataaacaagtaccagcactaaaagaatttcctaaagatgataggccaaattcactgattgttttttggtcatttcgtattatggtcggccttggcatgctgatgattttagtgggtgtatggggcacatggttacgttacaagaaaaaattatatcaatctaacctcttcttgcgattcacttttctaatggcaccttcaggattaattgccattttagcgggttggtttactacagaagtaggtcgacaaccttgggttgtgtatgggatacaacgaacacgagatgcggtatctgctcatggtgaaatgcatatgagcattagcctactgattttctttatcgtttatggatctgtattcggaattggatatgcctatatgttaaaacttatccgcaaaggtgcgccggaggttcaagatgggaattga

SEQ ID NO: 299261 - DNA, 399 bp, Proteus mirabilis
gtgatagccgttgtcagtttatggacaccattagcacaaccggcgattgctgaacgttggttttcactacccaatattttctttttcttacctgtaccactgctagtgttatatagcgcttggttgattattcgcgcagtaaagaaaaaaggtcattacttacctttctttgcttctctagcgattatatttcttggttttactgggctagggattagtatctggccaaatattataccgccggcaattagttttatcgatgcatcagcaccaccggaaagccaaggttttatgctcgttggtgcgctatttatcattcccattattctcgtttatacattctggagttattacgtattcagaggaaaaaccaattatgaagaaggctatcactgctag

SEQ ID NO: 299262 - DNA, 1293 bp, Proteus mirabilis
gtgaataaggatattaatgaacttaataaagatattaatattgtcggattacattggattgaacgctggcgagtgaataatggaaaacatcagtcttatgttattcctttcgcaacaacctatcctattaatattgtttatcacggtaaaagcgaatttaaatatgggcagtatggcattcatcttggccagcaagatacactcacctttttaggtgataaaaaacaaaagatactggctaaatttattgattgtcgtaaaaactcaccgacatttaaatcagaattaagtttggagataaccccatcatccgcaagaacacttattattcccccaggagttgctcatactttttcccatctagaaaatgtttttaccttaaatagctactctctttttttacctactattgagcaattagcaaatgaaacattaaattggtcacctaataatgatgtgataaatctgccggaagatatcgatattaatgagattgaaggctatgagccgatgacagaagaagcttcggcgctggtctactatcgagttgctgagatacaacagcagtggttaagccaacatcgatttttacactctgaaactcgtaaaattcgcttagataatggcgatgaaattaatgtaaggttgcgagagaaaatagccgatgttcaaaaacagtcattacctacatccactattttaggtgttgaatttcgtgaaatggcgaccctgcatacgggcaaagagagtggcattgtcccattaacgcgacaatcccctatgtatctagtcgaacatggtcaggaggcttatgatttcgactcttatggattacatttagggcaagaagatcatttaacttttttaggaaatacctcgggtaaaatcactattaagctggtggatatgcgtgaagattcgcctacgctattttatgaagatgaaatggtttttgatccggcacccaatattgaattagtgatcccctgtggtgttgcccatgccttatttaatatggcgaatatcattactgtgaatcgacctgttatctatttggacgaagaaaaagaatatattccgggtcatgacgtgattgattggaaaatcgctaataaaaattatcaagcttatcgtgttaataaaatagcagcagatttaacctattatcaatttcttgtttctaaacaacaagcgttaatgaaacataagcccacccatcataccccaaaatcaattattgtttatgatgaaaataatcagcctattaaagtattaattaaagaaaaggtgtaa

SEQ ID NO: 299263 - DNA, 168 bp, Proteus mirabilis
atgtataccgttcaagaggggagagcgaaaggtacgttatttaaactccactacactcgttatgataaccattccgatataccaagctatgaaggtggttttggtaatatcttccaagatgaaaaagacgttaaattcaatgtgatcatgccatttacgattttctaa

SEQ ID NO: 299264 - DNA, 1620 bp, Proteus mirabilis
atgcgcaaaatattcgttatatcatgtgcacttgtcgttcaaggattgctcatatcacaggctaatgcggcagtggtgccatcaggaacgatactcgacaaaaaacaggaagtagtgcgacatttaaaagatgaacccgcatcacttgatcccattaatgccgtaggtttaacggaggctcaagttcaacgagacttatttgaaggattagtgatagaagatgagcgagggcgtcccattcctggagtggcacaatcatggcgaacagaagataaccgggtttggatttttacattacgtgataatgctaaatggtcaaatggcgaaaaggtgacggcttctgactttgtttatagttggcaaagattagttgatccaaaaaatctttctccttttgcttggtatgcagccctagcttctattgagaatgcccaaaaaattattgatggtaaattaaaaccaaccgcgttaggtgtggaagccattgatgaaaaaacgttaaaagttaccttagaacgacctgttccttatttccctagtttagcgaccaatttttcactttatcctgtacctaaacacacaatcgaaaaatacggttcagaatggatcaaagtaggtaatttagtcggcaatggggcttttatactaaaagatcgcgttgtgaatgagaaaattgtgttaacgccaaacccttactattgggatcaccacaatacggtgttaaccaaagtcacttttgtgcctattaatcatgaatcacaagcgactaaacgttatttagctggggatattgatattacagagtcttttcctaaacacttatatcacaaattgatgaaagatattcctgagcaagtgtatatccctgagcagttaggtacttactattatgcatttaatacacaagcagggcctaccaaagatattcgggttcgcaaagcgttagctatggcgattgatagaaaaattattacagacaaagtccttggtactggagaaaaatcagcgaatcgctttactcctgatgtgacggctaattttacacctgagccaacgctatatgatgaatacagtcaggatgaattagatagccaagcaaaaatattgttatcagcagccggctatggtcctcataatcctttaactctctctctgctttataataattcagaaaatcatcaaaagatcgccattgctgtcgcttctatgtggaagaaaaagttaggcgtaaaggtaaacttacgcaatcaagagtggaaaacttatattgatagtcgtaattcaggtgattttgatgtgataagagcgtcatggataggcgattacaatgaaccctccacattcttatctttattaggctctaagcatgctggaaatatcccaaaatatcagagccagcaatatgatgagattttagtccaagccaatatgacgacagatgaagaggaaagaaatcgtctctataatcgtgcagaacaggttattgcggaagaggcgcctattgcccctatctatcagtatactaatggtcgtctaatcaaaccttggctaaaaggttatcccattgagaatcctgaagatgtcgcttatagccatatgctgtatgttataaagcattaa

SEQ ID NO: 299265 - DNA, 1800 bp, Proteus mirabilis
atgctcgaacaaaataaagtcaatgcggcacaagcacttgcaacattacctggtattgtgatgcaaaaatcaggtaatcgtaacgaatatacccttaaagtacgtggttttgatagtcgccaagttccggtgttctttgacggtattccaacctatgtgccttatgatggcaatctcgacttagcgcgttttaccactaacgatctcgccagtatcgaagttaacaaaggttatacctcattactgcaaggccctaatctgatgggaggtgcaattaatatcaccaccgcaacgcctcgcaaaccattagaaggtcatattgcttattcgcaaggttttgctcgtggtgctgattatgctcataacatgagtgctcgtttaggagcacgtactgaatatggttttatccaaattagtggcagtcaactccagcaacgttttacccccatacctaatgcagatgaaaataataacgcggtggggacacatggacgtcgtagtcattcagcaacagatgataaacgaggaatgatcaaagtgggttggacaccacgcgcttctgacgaatataccctcacctatgtaaaacaagatggtaataaaaatagtccaccgaatagtgatcctaatgccaaaggtcgatataaatattgggcatggccagattataataaagagagttactactatagtggtgtgacacaacttacggatagcataaatctacaaagtcgtgcttatcatgataagtttgaaaataccctttatatgtatcctaaaaaaggtaatagggtcgattatagccattatgatgatcacagcacaggcgctgcattacaattcggtatcgatatggaggaaagtgatctgctctcttttgcggtacattggaaagatgacgttcaccgtgcccaaaaagaaaaaaacggtgattgggtacgttttaaagatagaacttggtcattagccacagaatatcaatgggtagtgagtaacgatcttgatgtcgttggcgccataagttacgactggcgcaaaagtatcgatacagataaaaatgctgataacaacaaacaaaatgccattaactgggaaatcatggctaaatattcattagccaatgacgataatatacgttttacaatctctgatcgcagtcgcttccctacccaaaaagagcgctataccaccgaaaaacccaaagatggatcaagagggattattaaccccaatttagatccagaacgcgcattatcctttgatatgacctacgaaggttatctcaatgagaaatggggctaccaaactagcctatattacaatcgtgtaagtgatgccattatggcgcatacgctttatcgtcacggtgaagcgctatttcaaaaccaaaacagtggacgtgttgattatctaggcttggatattggtactaaagggaaaatgaccgattggctagaacttggcctaaattatagctatatccatagtgatccaaagcaagttgaccatattgaaggtttaccaaaacataaagcctatatgtggttaacctttattcctgttgaacaagtgcgctttactattatggaagaagcacaaagttggacttataaccgtatagatgagaataataaactggctggctatacaaaaaccgatctacggttagattatgatgttggatatggtatttcagttaatgcttccattaataatctttttgataaatcttatcaatatacacaaggttatatagaagatggccgtaattattggttaggcgctgaatataaattctaa

SEQ ID NO: 299266 - DNA, 429 bp, Proteus mirabilis
atgtataaaacaattttagtgcctatcgatattgtagaagaagagttaaccagtaaagcagtacgccatgcggtttatttagccaaagaaacaggagctaatttacatcttatccatgtgcttcctatctcttcagccattattaatgcttattcactgggttatcccgaaattaaagacaaagcgacagtaaaagccgaaaatgatatgcaaatgttggtggattcggtggatctgcctgctgaaaaagtggcttacactgtcacttttggctctccccgtgatgaaattttaacgacagcaaaagatattcaagcagatttaattgttatcggctctcgcagacccaacattagcacacatttattaggctctacggccgcaggcgttgttcgttatgcagatatttctgtgttagtggttcgttaa

SEQ ID NO: 299267 - DNA, 465 bp, Proteus mirabilis; identical to SEQ ID NO: 289075

SEQ ID NO: 299268 - DNA, 648 bp, Proteus mirabilis; identical to SEQ ID NO: 103756

SEQ ID NO: 299269 - DNA, 288 bp, Proteus mirabilis
atgactgtagaaagaaaatacggaaaaaatgctatgcaaggttttagtagttaccgcttactgtcacaagaaggggttattgccagccagcctgatattttgttggtcactaaagagggaataaaaggtattggaggtatcgaaaaactgtgggacttgcccggcataaagtacacccccgcaggtaaaaataagcgctatatcgttgttgatgatatgggtttattaggctttaccttatcaacccccaaagttatgcaacaaattcgtcaagcattggagcaataa

SEQ ID NO: 299270 - DNA, 1257 bp, Proteus mirabilis
ttgtttaaagttaaggtaggttttaccaataatgatggtgtctcagctcttgcgtccgtcgttgcctatggcatcatgtcaaaaaccatgctggtggtggcaccttgggtcttaggattatctcctgatagtgttgaaatacaacgtttaactgatacgggggtactaggtgggatcattgccggtattattgccgcatcaatgtttaaccgcttttatcgtattaaacttcctgagtatttaggcttctttgcaggtaaacgttttgtacctattatttctggtctgattgcgatttttgtcggtattcttttatcctttatttggcctcctattggtactgctattcaacgtttttctgagtgggcagcgtatcaaaatccagccgttgcatttggtatttatggtgttgttgagcgtgcgttagtgccatttggtctgcatcatatctggaatgtaccattccaaatgcaagtgggtgagtatgtaaatagcgcaggacaagtgttccacggtgatattccacgttatatggcaggtgatccaactgcggggatgttatcaggtggcttcctatttaaaatgttcggtctacctgcggcggccattgctatttggcatacagcacgtcctgaaaaccgtgtaaaagttggcgggatcatgatttctgcggcattgactgcctttttaacagggatcacagagccaattgaattctcatttatgttcgtagcacctattctttatgttattcatgccattcttgccggtttagcatttgttatttgtatcttgttaggtatgcgtgacggtacaagtttttctcatggtttaatcgactttatcgtattgagtggcaatagcagtaaactgtatctattcccaattattggcatactttatgcgataacttattactctattttccgtttcttaatcgtgaaactaaacctgaaaaccccagggcgagaagtagaagataaaaacgcgaaacaagcggataaaagtgcgatgggacaatctttagtcgctgctttcggtggtaaagataatatcagtagcttagatgcttgtattacacgcttgcgtattggtgtaaaagagattgataaggtcgatcgtgatgagctgaaaagactgggagcggctggtgttgtggtggttggatccggtattcaagccatttttggccctaagtctgataatttaaaaactgaaatggatgaatatattaggtctttggatttgacgaaatag

SEQ ID NO: 299271 - DNA, 186 bp, Proteus mirabilis
atggtattaccaacttatgtacgtggtatttttaacacacaaataaatagttatccttatgccatgatcaaaattccattagaaacactacaatatataaaaaaaagtaaaagtgtctcaaaaataaatattctattaaaaaatgtgcatgatattgatagcgtaatagctgactgtcttttttag

SEQ ID NO: 299272 - DNA, 225 bp, Proteus mirabilis
atgaatattctacttattaacggtggacaaaaatttgggcattctgcaggacaattaaaccgtacattacatgatatcgctctggcacatttggcgacattagggcatcaggtaaaagaaacacaaattgaagaaggctatgatatcaatgaagagatagagaaatttatctgggctgttattattatttattgcaggaaatctattagccgcacaagcagatag

SEQ ID NO: 299273 - DNA, 786 bp, Proteus mirabilis; identical to SEQ ID NO: 297531

SEQ ID NO: 299274 - DNA, 600 bp, Proteus mirabilis
atgtctgtcccccatcttgatactcgtattattgcgggtaaacgctccctactctttggcccctatgctggattttcaagtaaatttttaaaacacggctcttatttagatttatttgagtcaattcgccccagcaatattgaacctatgctagatgtcgcgaaagataactggtcattaactgaatatttaattggtcaagtattacaaacgtcagcacatcaatttgaaatgcttaaacagttctatcctcaggctcaacatgaggattggcaagaagctgttgcaggtcaacgagtgcagattattaaacccgcagctaaacatcatggcgtattagagtttggtactgagctaattagtagcgcagataaatcattttcagtgttattgggggcatcacctggcgcttctacagcagcatttattgccatcaatatcattaaatcttgctttaagcagcaacttgaaaatgagggttgggaagatcgtcttaaaacgattattccaacttatggtattgatctcaaaatagatgccgatgcttgtcgtaatattcgtgcatcaacggctaagatattaaaattagaaacaccttag

SEQ ID NO: 299275 - DNA, 345 bp, Proteus mirabilis
gtgaatgaaatagggaaaacatctggtggtgtagcattatttttcttaggactattaatttcagggctcaaactcaaagttaatactgaaattgtttttaatgtgataataaagaatgttgtacaaggggcattaattttaggaacgggatttgcacttggattagaaactgaattattaaaagccgtctttctaattggtgtattgcctactgcaacagcagtgcctgctttagctattacaaataaggcctatgctgatatggcaacgggcactgtattattaagtacgctatgttcattactttctattattggtggtatcactattgtagaaatgatgtaa

SEQ ID NO: 299276 - DNA, 585 bp, Proteus mirabilis
atgaaaaaccagaatatcacaggcggtatactcgccggtggccaagctactagaatgggaggcgctgataaagggcttcaactcttacatgggctacctttatacctccatattgcccaaaagttatcaccacaggttgcctctattctgattagtgcaaaccgtaatctggaacgctaccgccaaagccagtatcctgttatcaccgatgaaaccagtgatttttccggtcctttagctggaatgctggcattattaaaacaagctcaaaccccttgggttgtgtttgttccttgtgatgtcccctattttcctagcaacttggttgaaacgctctatcgtcacaaaggggatgccttagccgtctatgccgacgatgggcagcgagagcacccaacactggcactgttaaatcgttgtcttattccaacacttgaggcttatctcgctcaaggtgaccgtaaattaatgctatttatgcgccaaatcgccgctaaaccggttttatttgctaatcaggccgcagcctttattaatttaaacacacctgaagatatagcaaacgccaatcacatagcaaaatag

SEQ ID NO: 299277 - DNA, 597 bp, Proteus mirabilis
gtgaaatttaaagatggtgattatcaaagtgacttaaaaacgatccctcttcctggtggcaataccatcgtaggtaccgaaggtggcacaatcaaaggtaaacttgatcttaacctaccggagatttgggaatttgctgcttaccaccgtgtcgcccctaaatgggctgtccattataatttagcttataccagttggagtgagtttaaagagttaagagcaacacgtaaaagtgatggccagcaactcttcaacaaagaagaaggcttccgtgatgcatggcgtattgcattaggaaccacttattaccatgatgataattggacattccgcaccggtattgcctttgatgatagtcctgttcctgctgataaacgctctatctcgatccctgaccaagatcgcttctggttaagtgcaggggcaacctacgcatttaataaagatatgtctgtggatgttggtttagcctatatgcacggtaagaaagtgacgattaaagagaagctatctgaaagcttaccattgccggcttatgaatttgaatcatcaggtaaagcatggttatacggtatgaactttaactatcgcttctaa

SEQ ID NO: 299278 - DNA, 1104 bp, Proteus mirabilis; identical to SEQ ID NO: 297401

SEQ ID NO: 299279 - DNA, 1200 bp, Proteus mirabilis
gtggttttattaggcttagcaatttttattttttgggctgctttcgcgccccttgataaaggcgttcctgcaataggaaacgtagtaatatcggggaataaaaaaagtgtacaatcttctgttgaaggtattattactcatatttttgtaaaaaatggtgatccggtatctgccggacaaaccctgatacaactaagccctcttcaatctcaagccttagtaaaatcgttatcagagcaatatgataatttactgatcactcaacaaagattatatgctgaacttaatcaacaaacttcatttaaattaaagtatttctcgttattatttaatttaaatgaaaaaagtgcagaattaataagtgaaataaatggttataaagcagctatcgatggcattactagtcgcctaacccatctaaagcgctcaattcagaataaaaagagtcaaattagtaatctacaaaaccagcttaatgatttacaaattttagctaatgaaggatatattcctcgtcaccgatatcaagaaatgataagagaattagctgaaaataataatcaacttaacgagacttttgggcaaataagcgcattagaaaagcaaaaattagaatatgagcaaagaatattgcaacgtaatgctaattactaccaattagctagaactgagctaaataaaatacaattacaaatcagtgaaacagaaaaacaacttattatagaaacagataaattagctaaaatggcaattatcgcaccgatatcgggtactgtgatggatctttctgtttttacccaaggtggctttgtaaaaacaggtcagacattgatggatatagtgcctgaagatcatcaacttgttattgaagcgcgtcttgctccgcatcttattgataaggtaactcctggccttcccgttgatttgatctttagtgcctttaatcaaaataccacgccaaaaattcctggtgaagtaacgattatttctgccgatagattaattgatgaacgaacaactgagccatattatcaagttcttattaacataaaagattatacattattagcagataataaaaataaattgaaagcaggtatgcccgttgatgtatttattaaaactggcgatcgctcattattaaattatcttttcaaaccagtattggataggctccatacttcattaacggaagaataa

SEQ ID NO: 299280 - DNA, 201 bp, Proteus mirabilis
atgggcaatatgggtattgatatcccaacgctcaatgtatatctatcacaacaacgtgtctcaggggttcctggtgcaccacgtggtaatgtgcatttacctaatggtattcatttccgcgaacaagcggatggtacttatgccgttgcaccacgtcttattaggtggcggagagttaccgttggaattctctattggtga

SEQ ID NO: 299281 - DNA, 1230 bp, Proteus mirabilis; identical to SEQ ID NO: 281209

SEQ ID NO: 299282 - DNA, 285 bp, Proteus mirabilis
ttgggggattatcgtaactattttgaagaagatggcgttcgtttttctcatacgattgatcctacaacaggtcgtccaatcaaacataaccttgcctctattaccgtaattgtacctacttgtatgagtgctgatggtttatcaacagggttaaatgttctggggcctgaaaagggcttagaggtagcaaataaattaaatattcctgtttttatgatagttaaaactgaaaatgggtttgaagagcgttatagtaaggcattcgccccattcttgaaaaagtag

SEQ ID NO: 299283 - DNA, 582 bp, Proteus mirabilis
atgaatgccattagtgtgcatgataatagtcttttaccacaagaaacattagatattgataaaaagaaccgttgctgggatgacaagaaagtagatgcgcaccatgccattattcctactgcgaaaacaggtaatatttcattaagtgaaaatgaaaagaatatttactatttgattgcccgacaatatctaatgcaatttatgccagatgcggtgtaccgcaaatgtgtgattgaactcgatattgagaatggaaagtttattgctaaggcacgatttttagcacaagccggctggcgtaccttattaggtagtaaagagcaagatgcggaaaatgatggtagcgccttacctattgtggctaaaggtgatgagttactttgtgaaaaaggcgaaattgttgccaagcagacccaaccaccaagaccttttacagatgctacgctactttcggctatgaccggtattgcacgttttgtgcaagacaaagagctaaagaaaatcctaagagcgacggatggactaggtactgaagcgaccatcggagcgtggataagtaataagtttatgcgtttcatataa

SEQ ID NO: 299284 - DNA, 549 bp, Proteus mirabilis
atgaaaaacagcataataaagtcagctataacttgcttgttattgctctctccgaacacttttgctgccactgatattattggtggagagatggaatttaaaggtgttgttgttgcacatggctgtacgattgttgcgggagatgaaaataaagttattgatttcaaacaaatatctgcaaaagatctctattctctacaaaaaagcaaccccgttgcttttagtatcagtttagaaaattgtagccaagatatttataaaagtgtcactatcacattagatggtcaagcgcattcaacaatgcccaatcatatagccgttactgggagtggctcagaagatccgaaaagtattggcatcgcttttaccgacaaggcacataatattattgaattaaaaaaaccaagtgctcctcaacagcttaataataaacgagtacaatttgattttatggcctatgttgaagcaacatcatcagctattcaaaatcaaacgatactcacaggaccatttcaagcacaagcaacctatacactcaattaccaataa

SEQ ID NO: 299285 - DNA, 1059 bp, Proteus mirabilis
atgatctcaacccctgaagcgggttatgcgcctcatgagcggggctttgattacgcctttagttattatgcatcaggtgttgccttatggaattcgcctgcattttggcgtaatggtgtcaatgttcctgctccgggttacaccacccatctattaacggatgaaacactaaaatttattgatgaacataaagataaacctttttttatcaatctttcttatagcgttccacacataccgttagagcaagcatctcctgctaagtatatggataaatttgatacagggaatgtggaggcagataaatattttgccgccttaaatgcagcagatgaaggtattggacaaatcattgcgaaattaaaagaaaatggtgagctagaaaatacattaatttttttcttatctgataatggtgcagttaatgaatcccccatgcccatgaatgccatggatagaggctttaagggccagatgtttaatggtggagttagagtaccttttattgcttatcaacccggaactattcccgcgggaacaaaaagcgatgcgatgatctccgcacttgatattttgccaaccgcgttacaagtcgctgatattcaaattcctgatagcctgcaagtagaaggtaaaaatattatgccattgcttaaaggtgaaacaacgcgttcgcctcatgcttatctgtattgggcaggccccggcactaagcattatagtgaagaaaaccaagagttttggcatggttatcatcaatggatcacctatcaacgtcaaacgcctccagtaaaccctaacttagagaaactgtctaaaggtgcttgggcagtgcgtgatggtgaatgggcgctctatttttatgatgatggtaaaaatcaaccacagctttttaacgataacaccgatcctagcgaatcaatcgatttggcaaaacaaaatccacaaaaagtggctgaactaaaaaatgcgtattaccagtggatcaaagataaacctaaacctgttatttgggggcaagatcactatcaaatactagtagattcagccaaaccttaa

SEQ ID NO: 299286 - DNA, 909 bp, Proteus mirabilis
atgtccagaagagcaaaagccctgtcccgtgaaatgcatatccttgcccgtcaggccggagggagctttaaaaccattgcagaccgggtcaaaattgcagaacgggttgcggcagagctggccgggctgaatattcagatacgatctgttgagcagctgaaatcccgtcatattgaaatgtacattcatgcccgcagagaacagaatatcagtttacgcacctgtcaaaacgaaatgtcggctatccgggcgatatttcgtgttgccggacgtcataaactggctgatcctagacatgagcgcctcagtaatgaggcgctggggatttcaggtgccagcagggctggcacccgtaccgcgatatcggacgagcgctttcacggagcgctcgcccggattgagccttatgatcagggagtggcattaaccatgcagttatcccgtagtctggggttgagaaatgaagaagccgtgcagtcagtaaaatcattacggacctggcaacaggcgcttaaaaacggtaaagatcgcgttcatgtggtttttggtacaaaaggaggcagaccccgtgaagcattagtgccggataaagcccgtgtattaacattaattaataaagccattgaatatgcggataaacataacggttatttaattaatcgtccgtcattacattcagccaaagatcgttatattaatgtgatgcgacggataggcggatttattcacgaagaatcaaatcatggtttacggtatgcctatgctcaggatgttgaaaaatattatctcagtcagggattcagtcaaaaagaagcttatgcattaacctccatggatttagggcatggtgacggtcgtggcgattatattaaacgggtttatagtcagaaaggagatattgaggaataa

SEQ ID NO: 299287 - DNA, 453 bp, Proteus mirabilis
atgaatgagagtagcagctccacaaaccagcattttattcgtaagttagaaggtattgtcggtaaaaaacatgtattaacccaagagcataaaacagagcgatatcgtaaagggtttcgttccggacagggaaaagcgctggcagtggtattccccggctctttattagaacagtggcgtatttttaaaacctgtgttgaagccgataaaattattattatgcaagcggcaaatacggggttaacagaaggttcaacccccagtggtgatgactatgatcgtgatattgttatcatcagtaccttgcgccaagataaaatacaagttctttctgaatataaccaagttattgcctttcctggcagtacattatggcacttagaaaaagtattaaagccattaggaagagagccacattcagtgataggttcttcttctgtacattcgaaataa

SEQ ID NO: 299288 - DNA, 858 bp, Proteus mirabilis; identical to SEQ ID NO: 296291

SEQ ID NO: 299289 - DNA, 216 bp, Proteus mirabilis
atgaaacgtgtcggtaaacgtggtgaaggtaaattcgagcgtatctcttgggatgaagcgacttcgattatcgctgataagctaaaatatactatcgatacctatggtaatgaggctatttattaccaatatggtactggatctaccggagcgaatttacatggtagaacagcctgtaaacgtctatctaagtacagtcggtggcttcttaagtga

SEQ ID NO: 299290 - DNA, 486 bp, Proteus mirabilis
atggcatcagagccatataaagaagacattgggcctcgtactacctcaatacgctcaatcgcgggtaaaggcggtaaccagccttgttcaatacctgagttatcactattaggacgcgtttcacgagatgcaacacgcttaccatcgactaagatcatggtatacttaggatccataccacgaatactaatatcagagctgctaccgccccctgtcactagcacccccggaacatcttttagcgcatcagttacatcacgatatgattttgtttctaattgttcacgagttacaactgaaacagaagctggagcatcttcaacagtctgtttaaatcccgaagcggttgtcaccagtaacctttcaggatcttctgcggaagctgtcatcacaaaacttgatgcaagagcagcaacaacgccaagcgcaattttatttttctttaacactaccattcccgattctccaagaatatatattctttaa

SEQ ID NO: 299291 - DNA, 1245 bp, Proteus mirabilis
atgtgtgaacatattattctcgccagtgtttcgacagaaaacgatcactttgatcaagagttacctagtgacaccaagatacaacaaagttcacactaccaatggcaattaacaccttgtgtggaacaagatcttatcaagccaacattaatatttaaccatcaacaaacattgccttctgaaatcacagctattttatccgctattggatgtctttctgaacagggcgaaaatcaattaatcgttgccaaccttgcagatcctttaattatcgccgagcagatccgccaaatattactgtcatcgtctgatgggtttgttgttatcacgcaacaagcctgggcattaactgccatagaaacggttaatccagcacaacgtagtattcgaagtttattaaaaactattcaaaaagaatatagctcaaggttaattgccattgttgatttaggtataaatgcctcatggtctgaattagttcctgcttttatacaaatagaacaaggtaataatgaaattattgttcgtaaccattgctgctacttaccacaattaaccccactgccctcatcttctacgatcatagcgcagaacatcatggtatccccgcgctggcatattattactggtggttttggaggcttaggtcgaattacagcaagttggttagtaaggcaaggtgctaaacgtatcgctattttggcaccacgagctgatagcagcgcattagattggatgaataacttacagaaatctaaccagctagaaataaaatggctaacatgtgattgtcgtgataacgctcaatgtcatgcagcactcactcagcttgaaaatgaaggtggcattgaggggcttatacacagtgcaggtattttggatgatgcacttatgacacaactcacccctaagcgtatgtctgacgtattttctgttaaagcgatatctgccaagcaattttgtgatgctttagaaaaaacagatgccagttaccttattttatactcctctgccgctgcaactataggctctgaaggacaagcagctcattccctcgcttgtggatatttagatggattagctgaatatgcacgtcgcaatatcaagggattaaccgtttctatggcagttaatgcccaggcttgttgcgtgataacaacaaacccatcagacgatgacagtaatatttggcggatctgctcggcgataattaaaggatctgcaaggttggcaacgattaattga

SEQ ID NO: 299292 - DNA, 432 bp, Proteus mirabilis
atgtgtgaacatattattctcgccagtgtttcgacagaaaacgatcactttgatcaagagttacctagtgacaccaagatacaacaaagttcacactaccaatggcaattaacaccttgtgtggaacaagatcttatcaagccaacattaatatttaaccatcaacaaacattgccttctgaaatcacagctattttatccgctattggatgtctttctgaacagggcgaaaatcaattaatcgttgccaaccttgcagatcctttaattatcgccgagcagatccgccaaatattactgtcatcgtctgatgggtttgttgttatcacgcaacaagcctgggcattaactgccatagaaacggttaatcccttgatattgcgacgtgcatattcagctaatccatctaaatatccacaagcgagggaatga

SEQ ID NO: 299293 - DNA, 975 bp, Proteus mirabilis
atgcgctcaggtaaagaaaaagactatggcgattatgataaatgggggatcaatgggcgtatattaattggcttagacggagagcgtctgttagataataaaaattatgcaggcttcactgttcaaccactggcaaatattgatggtaaggtatcacttgatgatgccgctttttattttggtaaaaaagagcgttggcaatttaagttaggtcgttatgaagcttatgacatgttcccgcttaatcaagatacttttgttgaatattcaggcaacactgcaaatgatacttatagtgatggttttggttatatctacatgatgaaagaaggtcgagggagaagcaatagcggtggtagcatgatgtttaatagccaatataataattggtattttgaaactaatttattaattgaagatggaacgtctatttttgctaacaaggaatatcacggaaataaactatataataataaaaatgttatttattttcgcccagttattgcatggaataacaataattttaaagttgctgtagccttagaaaaaaatattatcaataatgcttatggttatgatgataaaaaaacgggtgaatttagagatcaatccaaacgcaacggttatggattaactttaggctggagtaatctacaacaaaatcctgaaaatggtgtcacaataaattggaataccgcttatttagacgctaacgatgagaacgactttacaacaggtactaatattttatggcgtaaattacaattaggctatatctatgcccataataatattaagtcatatactattaatagtgatgatgataacaataatgatgttatatttggcccaggaaaatataatatccactatttaggtgcatattattctgttattaatggtaaagatattgaaatagaaaatagcgataaagatcgttatggtgtaagagcacgttttaaatacttcttctag

SEQ ID NO: 299294 - DNA, 153 bp, Proteus mirabilis
atgaacatcaaacaccttgcgatagcgacttgtatcggcattgccgtgccgacaattgctcacgccaatacaaatgaattatcgatagaacaacgtttagctcgactagaagagagaacgttagccgctgaaaaaagagctgagttagcataa

SEQ ID NO: 299295 - DNA, 846 bp, Proteus mirabilis
ttgcatcatttccttgctgcaatagatacattttttcaacgttatcaatcaagagttgagcgccttactgcaattagtattaccatgaatgcaattgttgatccgattagtggcgttatttatagctctccttactatgctatccaagatatcccgctggctgataaaattcaggaaaaaacaggtgttgctgttttcttacaacacagtgtaacggcttggacgatggctgaatcactctatggtgcagccaaaaataacaccgatattctgcaaattgttattgatgatattgtcggtgcaggggttgtgactaatggaaagacattacattcaaacagccatagtgccgtcgaaatagggcatacaaaagttattgattcacagacgcaatgttattgtggtgcaaaagggtgtttagaaacggaaatatcgatccctcagttaattaaaaaagcacagcacttggcgcaagaaaatcccacctcaatacttaatcaatatccgattacggtagaaacgctatgtgatgctgtattaattggtgataaacaagcattagacataattaatttagtggcgcaacgacttggttttattttagccgtgatggtcaatatttttaatcctcaaaaaatattaataggttcacctctgtgtagagcaaaatctgcacttttccccctgatccttagtagtatccaacaccatgtattacctagatatgcccataacttggttattgaagaaacagaattgcgcaataaaggcacattgccagcggcatcactagtaaaagaagccttatataatggctcattattacttgagttaatgcaaggctaa

SEQ ID NO: 299296 - DNA, 483 bp, Proteus mirabilis; identical to SEQ ID NO: 297508

SEQ ID NO: 299297 - DNA, 825 bp, Proteus mirabilis
atgcaccaaacccatattgaggctaaccgagatgcgatcaacgggttaaatcaagataaagcggataaagcacagctagcggaaacggataaacgggtagacgcaaacgaccataatcttgctatgcaccaaacccgtattgaggctaaccgagatgcgatcaacgggttaaatcaagataaagcggataaagcacagctagcagaaacggataaacgggtagacgcaaacgcccataatattgctacttatcaaaatagtattgataacaatacgcaggcgatcgattggttagataaaaataaggttgataaggcacaattgatagaaacaaccaatttagtaagagagaatacagccgaaattaatagtaacagggaagctatagacgatataaaatcgagtaatattcttcaagaaaatttaattaatcatcgcactgataacctaataaatttagaaaagatctctcgagatgaaggggataaaagagtcctaactagttcaaaaagttatacggatagtcggtttagttcggctagaagctatgcggatgataaattcggtcaattagataataaaattaaccaaacggaaaagaaactcaatgcaggtattgcaggtgtaactgccatttcttcaattccatatgtgtcagaaaatactttttcatatggaatgggagtaggtaactatcaaaatggtaatgcgattgctgccggagttcagttaaaaactatttataattcgaatattagggtcaatatatcatgggattcatcaagtaatactgcattaggtgttggtatctctggggggtggtaa

SEQ ID NO: 299298 - DNA, 645 bp, Proteus mirabilis
atgacagataagataaacagtacctatatgccttacaaacattataaaaatagcatagcaatattattcctcgcctctgccttgctacctagattttctgtggctgaatcactcactcatttacctcaaaaagatcgtatttcttattttgctcaagcggagaaaatggccatcactggtgtggcaattaaaaccaaacccgttttagccagacctgcaaaagaaggagaagtgatcaccacttacataaaaggtgaaggggttgaaactatttcggagccagccaaagcgggtgattgggttgtacaaaatatttgtccagcaacaggtaatgaagaaattctggtcagaaaagataaatttgctcagcgctataatctggctgatgcagacaaagcgaaaagcatcacaccgataaggcaaggctatcaagtttttatccctaaagggattgaaatgaattattttattgttccaaaacaaaccgctgagtttgcaatggaagcgccttggggagagctacaacgttttcaagccggtgatgcagttgtgcaatctaccaccgataaacaagatatttatcggatccaacaggccgcttttaaatgcacttatactattttaaaaaccgccaaagagatttga

SEQ ID NO: 299299 - DNA, 660 bp, Proteus mirabilis
atgatgatccaagcgttacattcgctttatcaacaacacaccgataatggtggtcatggcatcggacgttgtggtggtaaaggtaaacacagaggacaacaccacaatggcaataatgaacattgttgtcatggtgaaagaggccatcaccaagaaggtcatggcaaatgttgccaacagggtgagcaaagtcatgagcataatgatcatgccgaacatggctgctgtcacggtgaaaaacagcaagagcatggtaaacgacatggccgaggttgtggtgctggtaaaggaaaaggaagaggccaaggtcgtcaattaaaacgtatgtttgaccatggtgatttacgtgtccttttgttgagtatgatcgcggcaaaacctagccatgggtatgaaattattcgaggaatagatgaagcatcttcaggactatatgtaccaagtccaggggttatatatccaacactgacactattagaagagcaagatttagttgttgctaatatcgctgaaaaaggccgtaaaaattatagtattacgccagaaggttcagcatttttagcagaaaaccaagaaacagaaaaaaatattcaaaataaactggcttatgcacgtgatttatcacatatatacagatcaaatctctttggcggtttttaa

SEQ ID NO: 299300 - DNA, 555 bp, Proteus mirabilis; identical to SEQ ID NO: 103787

SEQ ID NO: 299301 - DNA, 1350 bp, Proteus mirabilis
gtgataggttcttcttgtattggtgcttcggtgattggaggcatttgtaataactcagggggggcattagtgcgccgcggtcctgcttatactgagttatcactttacgcccgtgttaatgaacaaggtgaagcagagcttatcaaccatttgggaattgatttaggtgacactccggaagagatattaaccaatctggataatcgacattatcatgcgaaacaaattcatgcgacggataaactggcatctgatcatgaatatagtgagcgagtacgtgatattgatgcagatacaccatctcgatttaataatgacgaaagacgtctctttgaagcggcgggaagcgccggtaagctctctgtttttgccgtgagattagatactttcccagcagatcatcgcacacaagttttctatattgggaccaatgatcctgatgagttagaagatatccgtcgccatattctcagtcaatttaaggtattacccgttgcgggtgagtatatgcatcgaagttactacaagatggcagaagtttatggcaaagatacttttttaattattgataagttaggtacagataagatgccagcattatttgctattaaagggcgtgttgatgctgttcttaataaagtgccatttttgcctaagaatctaactgatagaacaatgcaattgatgagtaagttatggcctgctcatttacctgctcgtatgacagaatatcgcgataaatatgagcaccatttaatgctaagaatggcggatagtggtatagaagaagcctcaacttatttaaaagaatattttaaacatgccacgggggattatttcgaatgtacagaagaagaaggtaataaagcctttttgcatcgttttgccgccgcgggtgctgcggtgcgttatcatgccgttcatattaacgatgtggaagatgtgctacctttggatattgcattgcgtcgtaatgatcgggattggtttgaaaaactgcctcctgaaatagaaaaccaattgctctataaattgtactgtggtcactttatgtgtcacgttatgcatcaagattatattattaaaaaaggtgttgacgctaaggcacttaaagcacagatgttagccttactagacaaacgtggtgcggaatatccagcagagcataatgtagggcatctctattatgcaaaaccgcaattaaaagcgttttataaacataacgatccgacaaatagcatgaacccaggcatcggtaaaacctcaaaattaaaatattggggagaagagtgtggttgcgggcataatcatcatcaagctgaagttaatcatatagaaaacaaagaataa

SEQ ID NO: 299302 - DNA, 600 bp, Proteus mirabilis
gtggaaggggcggtgatcagcggctcggccaccggtgactggacattgtcctgtgtgcgcggggatatcacctcgatcacctttgtttttacggacggcacgatccgcacggtgccgaagccggctgaccggacggacggcggcagtcaggccaacagcggacagaatgcccgtaataacggcgggtcgctcggctggatttcagatgagagcgggatcccgtgtatcagcggtgaacgtaaaaccaatgccggcacctatctgccgaccctgtttgccctgacggcagcggcctcggccggggatgcgatgtcgcagagtcagtataccgcgcagaacaacgggtacggtatcacctcctcgctctccggggatgcggggaaagcggcgctgggcagtgccatcggcggcgggtttaaggatgtggcggactgggtgaaatcccgctacgggcagacctttgatgcggtgtatgtgccgccggggcagaaagtcgcggtgcatatcagccgtcagatcccggtggattatgaatcgcagggacgccgggtgaattacggtttttcactgacagagggtgaggaaggaggtctggagtga

SEQ ID NO: 299303 - DNA, 486 bp, Proteus mirabilis
gtgacgtattttgcgaagccgggggtgctggctgtgacgccggtgacgtttccgctggtgtttgtgttcagtgccggacaggccggttgtactggaagtcatttttgcctgacggtggccggtcatcaggtgtttgatgaggagcaacagcagctgattgccggcatgtcaccggcgacgatacagctggcgtggcagagtaccgccggtgagacgcccggggcggttctgtctgtgggccgtcactgggtggggctgagtgacaacgacattaccgtttaccggtttgccccgcgggatgaggcgtggccgcaggacagtgactgggatcgcctgctgtacaccgtttttaaaggggaggcgccggataaagccggctggcaatgtgtgcctttttcactatctgaactgagctgtcacggtgagtttgcccggctgacctgccggggggcgatcctgaagggcgcgggaggcgtcatatcatga

SEQ ID NO: 299304 - DNA, 600 bp, Proteus mirabilis
gtggaaggggcggtgatcagtggcactgccaccggtgactggacgttgtcttgtgtgcggggggatatcacttcgatcacctttgtctttacggacggcacggtccgcacggtgccgaagccggctgaccggacggacggcggcagtcaggccggcagtggacagaatgcccgcaataacggcggatcgctcggctggatctcggatgagagcgggattccgtgtatcagcggtgagcgtaaaaccaatgccggcacctatctgccgaccctgtttgccctgacggcagccgcctcggccggggatgcgatgtcacagagtcagtataccgcgcagaacaccggttacggtatcacgtccacgctctccggggatgcggggaaagcggcactgggtagtgccatcggcggcgggtttaaggatgtggcggactgggtgaaatcccgctacgggcagacctttgatgcggtgtatgtgccaccggggcagaaagttgcggtgcatatcagccgtcagatcccgattgattatgaatcacagggacgccgggtgaactatggcttttcactgacagagggtgaggaaggaggtctggagtga

SEQ ID NO: 299305 - DNA, 486 bp, Proteus mirabilis; identical to SEQ ID NO: 27141

SEQ ID NO: 299306 - DNA, 153 bp, Proteus mirabilis
atggatctcactgctttgtgtccgggtatacgccgtgttcgcctgctgacgtcgcgccgcttcctcgttcgtcagcccgcgacgcagcgtactgcgggcggcttccgtcaccgtccggctgtccgtactgtccgggtcagcctgtctgcctga

SEQ ID NO: 299307 - DNA, 786 bp, Proteus mirabilis
atgacaataggtcaactcattgcttttaatatgctattaaaccactgtctacaacctttaagttctgcaatagaagtttggggaaagtatatccgagccaaaacggctatttataatttacaagacattcttaatctcccaatagagcaagaaaaagccaataagaaaatgaccttacaaggtgaagtgagttttgagaatgtcagttttagttatcaacatgatgccccccctgttgtaaggcaaatttcatttagaataaataaatatgaaactattggtatcgtcgggacgtctggatcagggaaaagtacattaacgcgcatcatcgcagggctttatatcccacaattaggtcaagttaagcttgatggcattccggtttgtgaaattccccccgcagtattacgtcaacaaataggttttgtcttacaagagaattttttatttcatttaaccgtgctcgacaatatccgtttaacgcagccatcagcctcattagatgatgtaattgctagagccttactctcatcccctaaaattttaatttttgatgaagctaccagcgcattggatggtgagtctcaagccatcatcgaaaaaaatcttccccttattacccaagataagaccgtcattatgattgctcatcgcctttccacaataaaaaactgtgaccgcattattgtattagaaaaaggccagataattgaagaaggcaaacataatgaattgattagaaaagatggcgcttataagaaactttggcaacatcaacaaggataa

SEQ ID NO: 299308 - DNA, 519 bp, Proteus mirabilis
ttgaccactatcagtatcgataaaggcattaagcatcctaccacagaaccgttagcaacactgcaaacattccgtacagatgaaaaaggcgatgtggattttggtcaaaatattatcattcgccaatcaggtattattcgtgttggggataaagttgaaatattagcttataaagaagcgaaatcttatttacaaacaacagagcaaacaaccgaaccagcaactgacaatgcggttacagcagcctccgctcaagagccaaaacaagctgtcactattgaatttaatggcatcagctttgctgggaataatcaagaggtgttgttagagcaactggaaaatcacggttatgctattccctatagttgtcgtgcggggatttgtggctcttgtgttattcaattagatgaaggtgatgtcaatgcattaaaagcaggtgccataaaacgttctggcagaatactcgcatgtagttgtgttcctaaaggcaatgtaaaactttcacttaataaaaaataa

SEQ ID NO: 299309 - DNA, 1179 bp, Proteus mirabilis
gtgggaactataagctttttatgtaaagtaaaactaaatttcactggctggcgtgctattggtatctctttaaataacgatcttgaaaatcgtgagatgactttaaatgcaacaaatacatcatccgatggtactcaagatagtattggtcgctctttaggtgcgaatgttgacagcattcgttttaaagccccttctaatatcagtcagggtgaaatctatatcgaccgtattatgttttctattgatgacgcccgttaccaatggtctgattatcaaataaaaaaacgattatcagagccggaaattgaatttcacaccgtacaacctcaattacctgtaacaccagaaaatttagctgcgatagatcttattcgccaacgtcttatcaatgaatttgttggtggtgaaaaagagacgaatcttgctttagaagagaatatcagcaagctaaaaacggattttgaagcactgaatattcgccctctttcggatggaggaatgcaaggtcgacatcttatcaccgataaacaaactatcatctatcagccagaacagcttaattctcaagacaagcaactttttgataattacgtcattcttggtaactacaccacattaatgtttaatattagccgtgcttatgtgctcgaaaaagatccaacacaaaaagaacagctaaaacagatgtacctcttgatgaccaagcatctattagatcaaggatttgtcaaaggtagtgccctagtaaccactcaccactggggatatagttcacgttggtggtatatctctacattattaatggctgatgcactaaaagaagctaatctacagacagatgtctatgattctctactttggtattcacgagaatttaaaagtagttttgatatgaaagttggcgcaaatagctctgatttagactattttaataccttatctcgtcaacatttagcgctattattacttgaacccgatgatcaaaaacgtattaacttagtcaattcttttagtcattatatcactggtgccttaactcaagtaccaccggggagtaaagacggtttgcgtcctgatggtacggcatggcgacatgaaggtaattatcccggctactctttcccagcatttaaaaatgcctcacagctgatttatttatcacgactgacaccttga

SEQ ID NO: 299310 - DNA, 912 bp, Proteus mirabilis
atgtattatggttttgatatgggcggcacaaaaatcgagctcgccgtttttgataaagatctgactcaagtatggcaaaaacgtgtaccaacgccaaagaatgattatcaagctctattaaatgtttttaaaacactcactttagaagctgataatgatttaggctgtaaaggaaaaataggtatcggtgttcctggcatcgtcaacgcaaaagaaggaactgtatttaccaccaacgtgcctgctgccaaatataaaccgatgatccacgatctggctaatattcttgaacgccccgtcaaagttgagaatgatgctaactgttttgccttatcagaagcatgggatcctgaatttcgtcattatccttcagtactgggtttaatattaggtacgggtgttggcggtggttttgtcattgatggcaaagtactctctggtaaaaatggtattgccggtgaaataggtcacatgaatcttaatgtagatgctgataatgtgattggtgagaccatgccaaaaatattatgcggttgtggtagaaaagcctgctttgagacttatttatctggtcgtggttttgaacgtatgtataaagcctttaatggttcaccacaaagagcggtagatatcgttgcacaatattatcaaggtgatgaacagacccaacagcatgttgaccgctatatgaaagtattagccatttaccttagtaatattctgactgtacttgacccacatttaattgtcattggtggcggtttatcgcaatttgacgcactgtataccctattacccgattatctctcacattgcgtatacggtaatacgcaaattccaacaatagaaaaagcacgttatggtgatgcgggtggagcaagaggtgctgcctgcttaaatttattagactga

SEQ ID NO: 299311 - DNA, 423 bp, Proteus mirabilis
atgaataaagaccctgaaataaatgagcttagtattttccttaatgaactacatgaagaatctgacagaggaattgcattattatctgcatctataatcgaagattggttatcaactatattgaaatcattcctaattgagtataaggaaatagaaataattagaaaaataagaaatgagtttgggcatagctggcatggaatatcatttaaaacacaaaaaataatagatttaacaaataatcttccatggttaggccctggtgatatagagcaaacagtaaaatcaagattcaagttttgtgtaacaatattgctaaccgaccttctttggcgtaatcgtttggtttcaaaagaaaaaataacacctaagatttggggtaatacaacgagaaagcatttttccaaaaatgaagaggaatag

SEQ ID NO: 299312 - DNA, 147 bp, Proteus mirabilis; identical to SEQ ID NO: 295270

SEQ ID NO: 299313 - DNA, 747 bp, Proteus mirabilis
atgctaatgacaatgattaaattatttgttcttattccttatctattgttaggtggttgtagtgggcttatcaatatatatcttgataataaattccccgtcaatatgaataatgatggcaataaaatcacggtttattcaactatttcccctgaaacagtagtgcaagtccgaggtacttatacgtcaaataaatgccaacgttctcattttaattctgattataccgaagtctcttactcctctttaacacaaaaagtagaggtagaacgtaaaatagcagaggataataaaaacgcgacctataccgtgcctatcgatgggggaggatggtgtaattggaaattgataaaaatagaactagcgccaatctctaccatttataaaaatcatatggtgattagtaaggttatcccaattgtcgataacaaacattcaaaaatagaactatttactacattagcccctgttatagtggaagaagatgatcaatctatctattattcaccatcaatcacggaaggtgagaaaaaactatctaataaatcaaatggagaaatttattttaattataaagttgagcctaaactaaccacgactatctcaaaagatgaaaaagttatttttcctaatgggagtattaaagaaccaaccttttctatttatactggaagggttagttttaatgaaataatcgagaatagtgatgaaaaagcgtttacttcttttgttagatatattgattaa

SEQ ID NO: 299314 - DNA, 219 bp, Proteus mirabilis
atgccatgccctgcatgtaatgcggaagaatggcttaaaaaatatcgagccgaatacattgatgatggtattaattacgggcagaaaggaaagaaaattaatacaaaagagtatacatcatctattactaatgaaattaaagctaatcagggtgctgtaagaaaaatatatcgctggttaaagcgtggctattactacggattaaagaaccgccactaa

SEQ ID NO: 299315 - DNA, 687 bp, Proteus mirabilis
gtgtataagagacagaacttaacctgtttacgtgtcgtagttaacccagaactcgggcaaggaaatagctacgaagtaatacccgtcagtgaaatcaagcacgatcttgagccatggaaagccatagttaaaaaatacggactaccctatccagctggtgcgttctgcactagggaaatgaaattcaatccagtcactaaatactgcaaagataactttgatgaatatacgacatggattggaatacgagcagatgagcaaaacagattgaagccaaaggatggcattaattatctagctgatatcagtgactttgaaaaggatgatattaatcactggtggtcaaaacaacctttcgatttaaacattcctgagcacctcgggaactgcgttttctgcatcaagaaaagtgtaaataaaattgctttagccgcaagagatgatcccattctagcgaagcaatttattgatgtgattaatggggatgtcagaaaagttaatcgagagcaacaatcaagccagattatgtttagaggaaataactcattggaagggataattgctttattcaaggatcacacaagagatgaaatcgccaatgtagttaaaggttctggcggatataaatccggttcttgtagtgaatcttgtgaagcctttaattgccagttggatttacctatttaa

SEQ ID NO: 299316 - DNA, 282 bp, Proteus mirabilis
  misc_feature (156)..(165): n is a, c, g, or t
atggttagcacattggtattgcgcaataagttagaaggttcaaaaataccacgtaatctatccataaatccggcactttgcccagcagtgatagtcacttcttcgccttctgatagatcaataagaatttcacgtcgctcacccggtgccataggnnnnnnnnnngatggtcgctcactctatctgatagcctctgatcaaggtttgttaacatcaccggtagaattgaaatctattcctatggcaccgggtgagcgaccatcattagccgataactcatag

SEQ ID NO: 299317 - DNA, 303 bp, Proteus mirabilis
atgatcattactcagggtgggcgaatgctgatttttgaagcctctgagttgccaactatggtaaaaggaaaaggtaaccaaatggtttctattcctgcttcacaggctgcaagtggtgaagataaagtcgcttggttgcgggtattaccagaaaatgccagtgttacattgcattttggtaaacgtaaactcacgatgtcgatgaatgaattacagacatttaaagccaaacgtggtcgtcgtggaacctcgctccctcgtggtgcacaaagtatcgatcatatagatatcgaaactcattaa

SEQ ID NO: 299318 - DNA, 750 bp, Proteus mirabilis
atgctagccattattcgaggcattattgtcattctgtacaccattattgtggtgacttttgggatgatctattgcatgttttctcccagaaatccgaaacacgtaatgacttatggacgtttattcggcaaattatcacatatctttgggatcaaattagttgagcgttttcctaaagaagctaaaagttatggacccagtatctatattggtaaccatcaaaataactttgatatggtgacaatgtcgaatgcggtacaacctaataccgtgacggtgggcaaaaaaagcttggtgtttattcctttctttggacagctttattggatcactggcaatattttgattgatagaggtaatcgctctaaagcccatagcaccatcactcaggttgcagagcaaatcaaagcgaaaaaaatctctgtatggatgtttcctgaaggaactcgtagccgaggacgtggtttattaccttttaaaacaggggcttttcacgcggcgatgcaagcgggggtgcctattgtgcctgtttgtgtctctaccacacaaggtaagataaaattaaatcgctggaataatggctacgttattgttgaaatgttgcctcccattgatgtatcaaaatataacaaagatcaggtgagagaattagctgaagattgtcgtcagatcatgaaggctaaaattgaagagcttgataaagaagtggaagaaatgaataaacgcgattttgcaggtaagttaaattaa

SEQ ID NO: 299319 - DNA, 750 bp, Proteus mirabilis
atgattatatttatcaccggtgcttctgcaggttttggagaagctattgctcgtcactttattaaccatggacacaaagttattggtaccgcgagacgtcttgataaactgcaagctcttcatcaagaactgggcgatctattctatcctttacaattagatgtcaccgataaaaaagcagtcagtgaaatttatcatcaattgccagaacaatggcgctcaattgatgtattagtcaataatgcaggactcgctttagggttaagtaccgctgataaagccaatcttgatgattgggatactatgatcgaaactaataataaaggtttagtgcatgtcactcgtgcattactaccctcaatggttgaacgcaatgtcgggcatattattaatatcagctcaacagcggcttcttggccttatatggggggaaatgtgtatggtgcaaccaaagcctttgttaagcaatttagcctaggcttacgtgccgatcttcaaggtaaaaaaatacgtgttactgatattgaacccggtcttgtgggtggaacagagttctcattagtacgctttaaaggtgataccgataaagtagaacaaacttatgcaggagcagatgcgcttactcctgaagatgttgcacaggcggttttttggacggcaacattgcctgcacatgttaatattaatacgcttgagatgatgcccgtcagtcaatcttttgccggattaagtgtgcaccgacaaaattaa

SEQ ID NO: 299320 - DNA, 198 bp, Proteus mirabilis; identical to SEQ ID NO: 27134

SEQ ID NO: 299321 - DNA, 555 bp, Proteus mirabilis; identical to SEQ ID NO: 277197

SEQ ID NO: 299322 - DNA, 426 bp, Proteus mirabilis
gtggccggtaaaggataccgttatccgacacggcaggccgcctggcaggccttacaggcatttttacagacgacatcccccaagcgcatcgatgtgggcattgcacaggtcaatttaggctggaacgggcatcacttccgttccacctgggaggcctttgatccttataccaatctgcatgtggcagcccgtattctgaagcactgttatgacgcgtcaccgggcagctggctccgtgctgccggctgttatcaccatccggcgggcggtcagcccgccacccgttataaaggtatcgtccggcgtcagctggcaacactgacgggcggtacccaacctgtccccgctcatttaccagtagccattgcagaacgaccggtatcgtttgtgtggatagaaccggagaacaaaaccaatgcgaaataa

SEQ ID NO: 299323 - DNA, 837 bp, Proteus mirabilis
  misc_feature (734)..(743): n is a, c, g, or t
atgatgacgttatatattgccggtaatgttgataatcgtatcttaaccgaaagtattaatcaggcattttcttctctggaaggaaaacgcgtgacacctgtgcctgtgcctgttcttgccgatatgaaaccagaaacattgtatgtgcaagaacccatgcgaaaaaatgaccaaatctctcttatttgggatctagattggtcaccagtgaaagattctgacacactgagccgttattggttaagtgatttagcgcgtgaagtgatttttgtgcacttaggtcgtagtctcgaacagcgtaaagaaaaagaaagtacgcaagtgaatatcgattgtcgagtgcaatatcaacgagccagttgctcgttaaatgttgatacagcaacggcaaatattcctgcacttgccacttgggtgggggaagagcttggcgaattacgtaatcaaggtgtcagtgatgaattgtatcaagacttactacaagaaaagcaaattcaactcactcaattgtttgcgcgttatgccaaaacaagtacttctatcttaattaatcagcgtttattgtctcagcaaagcaatattattgatattccaccagagcaatatcagcgtttacgccaagcatttttagcgggtttaacgaaagagatgttaaatcaagagttatcgagaattctatctgaggatatcacttttgtattaacgcaaagtagtgagacgccaacggtaaactnnnnnnnnnncccagaaacagcgaatagctcaaacacggctaaaacatcgttaactactggtgaaaaagcttcggtgcaggcagatgcacaacagacaaaatag

SEQ ID NO: 299324 - DNA, 240 bp, Proteus mirabilis
atgacaggactaaatcaaacaaaagtaattagtcgagttttacaatggattagtagtgttggcctgatattgcttgcaattattttaataatttttttagttaaagaaactattatccttgctaatttattgtttacagttagtgatccagtttcaatttatttattagttgatggacttatcatttactttctttattttgagtttattgccttaattattaagctatcacagctgtaa

SEQ ID NO: 299325 - DNA, 423 bp, Proteus mirabilis
atgtcaaaagagataaacgaattacagtttagtcttcactatgcctcagaaacagacagcgaaatgaatatctcaaccattttaacggccaatattcatacggctgatggtgacactcaacaattgacacaattaatttgcacaacgtctcccgcaggtaaaaagcaatatcgaattggcttgcaaaaaattagtgatgcaggagatccatcgctggtggcgattgaatcttattggcgtaaaaacatacaagagagttgtgtttattttttagataaagcaaaacagtttattcaaggacatttacagcagacgaatgcatggatatctatgtatggtcttgtcattgtttctgaggcgtcacttgaagagcaattgcctgaaggtttattaaaggcacttaaagtattaatacccgcctaa

SEQ ID NO: 299326 - DNA, 1188 bp, Proteus mirabilis
gtgaagatctacggtaatgcaatagttaagggaaatagtaaagtaaaagacaatgcagagatttatggtaatgtgctagtggaagataatgtgacaatatctgatgatgttgtaatatatgataatgcagttattaaagataatgcgagaatatctgacgatgctgtaatatatgataatgctgttattaaagataatgctaaagtatcagaatatgctattgttcgtggtgatgcaatagttgaaaaaaatggttgggtgactggttatgcgactgttgagggaaatacaattgtatcgaaaggtgaggttattaagagccaatttggctcttgggatgatattgatgaactaagagcattttatatttatattaatagatataacagtacagcgactgcatatgttaatggtagacatcaggtacctattactatttatatagaggctttagataaaaatggtcgtatcataaaaatagccaaagaagatatttatagaaatacacatattgtaaatgaaaaaaatcttcctattgaccgcaatgatatttctttatctgataaagaaaatggatttgtatttccaagcagtgaagaagcaacattgaactcccctgatgcatctacttgtgttatttatctttctgttaataaagtgatagatacctttagaatttgtgcacagactcacattaaaggaaaagagtatactacagcctttaaaaataattacagtgattatttaaattttatcattctggacgttgcaccaaaaaaaatatttacagaagcagatgtagacatagaaccgctggtaaatcctagaatagaaaaagatgtagaaacatcaggtgatgtcttgacgaaatattatttaaggtttaacggtaataatagaacgataactaagagtgtagagtatgaagaaaataaatcttttcattattttcaaaaaggtcattatcagattattagcacatcgactgataaatatattaaaaaaattccattaaagcctcattattacactaaggaattccattttaaaccagatactttaattccggtcacatcagcaaatgatgaggatggggtatgtttctggagctatagtatagaatatggaaaagcgtttacatccagtaggaaagatgaagaaacataccccatcctcatcatttgctga

SEQ ID NO: 299327 - DNA, 315 bp, Proteus mirabilis
atgaaaaaatatatttttactgcaattattcttagtttaacagctagttatgcatcagcagaaacagcggttaatggttgtgacatcaaaaaacagaatattcaacgacaaatcgactatgccaaaatgcatggtaatcaatatcgagtacaaggcttagagcgagcacttaataaagtagaacgttattgcactccagaaaaggttgttgaagatacccgcctagaaattactaaaagagaagataaacttgcgcaagcaaaagctgagttgaaagcagctgaagaagagttagagctactcacaaaaaaataa

SEQ ID NO: 299328 - DNA, 990 bp, Proteus mirabilis
atggagaatgcacagcaaagtagtacgctttatttagatccacgacaaatctacagtcaaaatcaattagagttctattttgatttacatgagtatgatgatgcaccctgtattttaacggatggccaaggattgattagtcgtattgatccgcaatcaaccttacaatttaaaaatacgtggcactattccagaatgcctaatttagcctatttttcaggtgcatcgttcccatttagtcgccgggcagatttttctcaaaccacattattattgccagaaaaccccacaactgaagagctatatactttagttaatttaatggcgagatcgggctattcaaccggtacacctgtttcttatatttctgtttttcttggtgcgcaagccttagaaaaaaatcagttagcacaaaaagatatcttggcgattggagagttaggtagtaacggctttttgccaagtgctttttcacaaaaaaccttctcttttataaataaccaacttgagatccaatctccctcattgatagataaagctaaaagttggttagccggtgatccattatcaccaagtagtgatgcggcaaattatcttgctccgttaaatgattggcggggaatgatgagttttatctctccttgggctaaagatcgtgtggttgttttagtgactgcaaaaggtaatgactcaattaaaaacatcattggtgatttgaaccatgcaaatgtcaatgccgctattaaaggggatctgactttaattagtggtcaagatacggtgatgagcttccatttaggagaacatttttcacagggagacctgcctctattacagcaatttctttggtattgcaccagacatgtctatttgcttggcatgttggcagtcggtttttgtgcgctaacagggagcgtggtttattgctggttacaacgccgctcaacgcgtcgcctgagtgaaatatcaaagcgtcatgttgataaatag

SEQ ID NO: 299329 - DNA, 567 bp, Proteus mirabilis
atgaatgtaaaagagatcattcgtcatgaaccatttggaacattactcggttatgcacctggtggtgttgcgatttactcttcagattacagcagtatagataaagaagattatgccgccaatgattcattccgtagttatattggtaatgagtatatggggcataagtggcaatgtgttgaatttgcacgccgttttctctatttacattacggggttgtttttactgatgtgggaatggcctatgagatcttctcgttacgtttcttacggagaacgattgatgacgatattttacccttgcaagcttttgcaaatggcagcaaacagccaccgacggtaggagcgttgcttatttggcaagaagggggagagtttaaagtcaccggtcatgtggcggttattaccgaagtattagaagataaaatccgtattgcagaacaaaatgtgatccacactaggttaccgcgaggtcaacaatggacacgagagttaccgcttaaagtgagtgataatggctattttatcgaagatacctttgataataccatcttacaagggatgtga

SEQ ID NO: 299330 - DNA, 843 bp, Proteus mirabilis
atgattgaatggtcagaagaaaaacctgtaatctactcagtatctttagatgggaatgaatatgtgcataataaaaacaggatattacctacaaagaactcatttcaaataatcacagaaaatataaaaaaactacaacatagattaggtcgcgatagagtttcaacagttactacagtaacaaaggaattgcttcataatcctcaatcactgattgatgctcattttgaattagatgtatttgatctttttattaggcctataagcccttatggatttgctgagaaaaaagaaagctacacaatatctgagtatattaatttttatgaaaaattattagatattattttcgaggaaaataaaaaagggcttccttttgttgagcattctggtgctatacatataaaaagattatataatcctggtttttgtgggtatgctgatttaaaatcccctagtggtatagtatttaatagcttattattcaattatgatgggaaagtatatggaagtgacgaattaagaatgcttcagcaggtatactctgatattgacttttctttaggtgactttgattcgttatcatttaataaaaacactatctataataatttactttctaattcatttaacatgctacatgttggttgtgaaacttgtgcttttcagccatattgtggcgttgacccttgtcaaaatatcagtttatttggtgagccggttggaaataaaagtctttcacgattttgtctttatcataaagggatgtttaaactactagtaaaaaaaattgatgaagataatgcaggggctacattactaaaaagttggatttatgcttga

SEQ ID NO: 299331 - DNA, 414 bp, Proteus mirabilis
atgttatatccagcctttattgaaattgatgaagatggtagcgcaagtggctggttccctgatattgatggttgcatctttgcgggggacagtattgaagaagctcacgcagatgcgaggagcgctattgatgcccattttgaattgttaagcgagaagggtttagatatcccctctccaaaatctcaacaagagcatttaattaattctagtggtgattacaataatggaatatggcttttagttgatgttgatatggataaatacgacggacgagcagagcgtattaatatcacattgccacatcgattattgagtcgcatcgatactatcgtaaaaacaaatcctgaatatgggagtcgtagcggatttattgccacagcaacccgtaaagaactccaaaagaatatttaa

SEQ ID NO: 299332 - DNA, 909 bp, Proteus mirabilis
gtggtggagtttgatgagttaactatcgtaccgatgcaagatgcggcaccagagctttctcctttagcgcaagtttatcaagcgttagtgctggcaacgcgtgattatgtgacaaaaaatggttttaaaggcgctatattaggattatcagggggcatcgactcaggcttaacagttgcaattgccgttgatgcattaggtaaagagagcgttcaagcggtaatgatgccatttcgctatacctcagaaatgagtattcacgatgcgaaagagcaagctgatttattaggtgttgagtttgatactgtctctattgagccgatgtttgatgcttttatggatcaactttcgcctatgtttaaaggtagcgctatcgataccacagaagaaaatctacaagcgcgttgtcgtgctgttattttaatggcgatgtccaataaacgtcgtcggttagtgctcaccacgagtaataaaagtgaatctgccgtaggctactcgaccttatatggtgatatggcggggggctttgatgttttaaaagatgttcctaaaacactggtgtttgaactggctaaatatcgtaatactctttcacccgctattccacaacgtgtgattgataggcccccttcagcagaattagcaccaggacaaacagatcaagataatctgccaccttatgatattttagatgcccttcttgaaggctatgttgagcaagataaatctgtttctgacttggttgcggctggatttgatgaagccattgttcgtaaagtggtaaaattagtcgatattaatgaatataagcgtcgtcaagcaccggtaggaccgcgtattaccagtcgtaattttggtaaagatcgtcgctatccgatcacaagcggttttggtcgccataactggtaa

SEQ ID NO: 299333 - DNA, 417 bp, Proteus mirabilis; identical to SEQ ID NO: 277206

SEQ ID NO: 299334 - DNA, 624 bp, Proteus mirabilis
ttgcaggatgcccaacaaaaagagcgtatatctatattaagaagtgcaatttatgatgtagtgagtggtaaggatgatgatatcagtgatagggatatatttaacattataaataaaggaagaagggtttatgacagatataatgatttgcttgatttgtatacaaaaagattttcagtaaataaaattttatcagagttagagcagaagcagcttgaatatacatcaaaaatcaatgattttgtttcatctagtcaaagtaaagcgtttgctatccccggtgcattaattgcagttggcgggcttgcaaagtcaggtggttttctagactcattactcatatttatagggttgtatttgatatacagagtgacttacatttcaaatgaaatactgattgattcatataactcattgaaaaatagtctagatgatttaattaaacgatactctaaatttgacgagggtgctgaagttagagatgccgcatctaaaatagaattggatataaaaaataaaataggtaaggcaaaagatagaatcgaaaagattaatgacatgggcgtgatcatgttagttgtaggtgctggctacttaattatgaagtggctgatgtccccatag

SEQ ID NO: 299335 - DNA, 1053 bp, Proteus mirabilis; identical to SEQ ID NO: 296003

SEQ ID NO: 299336 - DNA, 471 bp, Proteus mirabilis; identical to SEQ ID NO: 297226

SEQ ID NO: 299337 - DNA, 198 bp, Proteus mirabilis
atgatttcaggaattttagcttcaccgggtatcgcatttggtcaagctcttctacttaaagaagaacctattattattagccaacgtaaaatccaaagtgacgaagttgacacccaaatcgaacgttttaaagatggtcgtaataaatcagcgcaacaactagaaatcattaaagccctgtctcttatacacatctga

SEQ ID NO: 299338 - DNA, 846 bp, Proteus mirabilis
  misc_feature (380)..(389): n is a, c, g, or t
atgtcgaaaattgatggaacaattaatcgaataaaagatcaacaaataggtagctcaactaaaaaagtattattagttgaaggcagtgatgatgagttagcttttggcgcttttttaagaaaaaagtttcctagttgggaacagtattgggttattgctagcacgggcaagaaacaaaatgtgttggatattttagcccaagaacaagattggcttggtattgtcgatagagatgaatgggataatgctaaaattgaggaaaaacaagaacaattacccaatttattcatccttcctcgtttttgtattgagaactatcttgttcttcctgatgaaatttggtctgcattacctgaaaataagaaaaatagcatagaaannnnnnnnnncatagaaaatggatgtgaaacattaaggaaagatatcgagactcagcttgaaaattggcgaaatcatgctgcggtatgggcaatcattaatcctttatgggaaggattaagaagtttgggatttaaagaatcgttattagaacttaatacaagcaatgatacagtaaaaattgaacaaattttacaaaagtggcatcaatatcttgagccttctcaattattagaaaaactcaagcataaaaagcaagaaataaatgcatgcacagtagatcaacaattaaaacaatatatacacgggaaacatttttttaaaaatgtagtttatcctgtgcttatttctcatattggtaatataaaagaaaaagaacttaaaaaacagttgtttaactcacaacctattccggaagatcttgatttcctttggcaacatatgatgactaatatcaatactatttga

SEQ ID NO: 299339 - DNA, 1005 bp, Proteus mirabilis
ttgactgggcagtggatattagtttcaccccatagagcaaaacgaccatggaatggcaaagatgaaaaacctcagatagcgacacttccctcttatgatccacattgttatctgtgcccagggaatacccgagtttcgggtgataaaaatcctgattatacaggaacttatgtttttaataacgatcactctgcattattgacagaccaatatagtgttgaggtatccgataatccactcttccagactcaagcggtgagagggatcagtcgtgttgtttgtttttcccccgatcatagtaaaactattcccgaattacctattagtagcctacgtaaaatcattgatacttgggataaccaaatagaagcgctaagtaaagagtatctatgggtacaagtatttgaaaataaaggtgaaacaatggggtgctctcaacctcatcctcatgggcaaatatgggcgagtgattttttacctaatgaattagcacgcaaagatagccaattaaaagactattttaatcaatatggccgtaatctattaatggattatgttaaagctgaatctgaagacggtagtcgaaccgtggttgaaactaaatactggttagctgtcgtgccttattgggcatcatggccttatgaaaccatgctattaccaaaaagccatattcgcagaatgagtgaattaacggctgaacaacgtgatgatttagccttggcaataaaaaaattaaccagtcgttacgataatctatttcattgctcatttccttattcaatgggatggcattttgcaccttcttttaaagagggcgaaagcatcgagcattggcaattacatgccctgtattatccgccgttattacgctctgcgacagtacgtaaatttatggtgggttatgaaatgttggctgaatcgcaacgcgacttaacgccagagcaagctgcttataatttacgccaagtaagcgatatccattataaagagcaagaaaattag

SEQ ID NO: 299340 - DNA, 939 bp, Proteus mirabilis; identical to SEQ ID NO: 296087

SEQ ID NO: 299341 - DNA, 918 bp, Proteus mirabilis
ttgttattaagcgattacaatattgattttaaatataatttctcctcgcaatcattatatttaactattccacaaaaagccttagataataaaaaaaatatgcttgctagccaagttttatgggatgatggtgtccctgctttgtttagctcatattcttattttggcaaatataacaatcaaaataagatagaacacaaaatcagttttaactcaggtgctaacttaggtgcttggcgagtacgtagtaaaagttattatcatcatacggataagcaacagcaatttaagctatactcattatatgcttatcatcaattaaatacgctgttggcaacgcttaatgtgggggaatttcgaccaaccagtagaatgttatcaacagataaattaattggatttcaacttatatctagtaatttgctctctggtaatgatctctatatgaatagtcctatcatagaagagattgcagaatctcatgctgaaattaaagtgaaacaacaaggaagaaccatttatgaaactattgttcctcctgggccttttattttaaacgatctacctgttataggtagcaatgaattggtattagaaataaaagaagcagatggacgtataagaaaaagtactcattactttactacaatgccaaaccaattaaaaaaaggtcgttatcaatataattttatttctggatattcttatgatagatataaccagtttaataatcaaaatagtaaccctatttttttactgggtgagttctcctatggtattaatcaaaaaataaccgcttatggtgcaattagaaagaagctgaatagcaatactttcttttcaggattatcattagatttaggacgctgggggggctgtctcttatacacatctccgagcccacgagaccgaggctga

SEQ ID NO: 299342 - DNA, 204 bp, Proteus mirabilis; identical to SEQ ID NO: 27110

SEQ ID NO: 299343 - DNA, 816 bp, Proteus mirabilis
atgccattacatttttctggtaggatttttgcgtctcttttattagctgggacactattaacaggttgcgataacaatgataacaaccgttatgcaattaaagtgggggtgattaatggtgcagagcaagatgtggcagaagtcgctaaaaaagtggctaaagaaaaatatggtttagaggttgagctggtgggttttagtggctcattgttacctaacgatcccactgcaaacaaagaattagatgccaatgtgttccaacatcgccctttccttgagcaagataatcgttctcgtggttataacctcgtcgcggtaggcaatacctttgtttttcctatggcaggttattcaaccaaaattaaacatcctcaagaattaaaacccggtgatacaatagcactgcccaatgatccaaccaacttggggcgcgcattattattgctacaaaaagagaaactgatcaccttaaaccctgacagtggcctattacccacaacactcgatattattgataatccacttaaattaaatattatgcaattagaaggtgcgcaactaccacgagtattaaacgatccccaagtaacagttgcgataattagcacaacttatatccaacaaattaatttatcaccaaccaaagacagtatttttattgaagataaaagttcaccttatactaatattattgttacaagagaagataataaagaagcagagaatgtacgcgattttattaaagcctatcagtcacccgaagtggcaacagccgctgagactatttttaaaggtggtgctattcaagggtggtaa

SEQ ID NO: 299344 - DNA, 327 bp, Proteus mirabilis; identical to SEQ ID NO: 103752

SEQ ID NO: 299345 - DNA, 885 bp, Proteus mirabilis
atgaacaaacttcgtattgtgcttttcttacctctttttggcttagctttaacttcttttcattctcacgcagcaacagttaatgcgatgttctcgtgggaatctgctgattatgatacatcgaataactattctggttatcgtgttgattttaatattaatccagacaaatcgaactggtattttgacgtcggttttcgtcagcgtgaacatgacaataaaaatcgttatcagcgttatgatttacaaggtagttatcgttttaaattaaataatggttggatacaaccaggattaaaaatacgtcaagatttaactaactatgataatggtagccgtttaactatcgacttttatgaatcaaaaacaaattatcaatttcctattaataaagactgggttttaaccggtagtgttttgtttggattacaaaaaaaagaggacaaacgaagtaatggcgtcactaatacggattatttaggttgggaaattgaacccggtattcgctactttatcaccccgaatctcaatacaacagtggcttattttgatggtggaaaacaagcaataagacatgaagagtatgatacaaaagaaacaaatcacaaccagcaattacgtatgtatgtaaactggacgacacctatcggtgttattatttctccctcaatgcgtaagtctatttttggaaaaatagaagacagaacaaataaaggtgaatatatcgataaagatatgactcgttataccttacaaatggcttaccaaatatctcctcaatggcgtgttatgacagaatattataatgagcgtgttgagaataaaaataacggcagcaagtcaactcaagattattttaaagtatcggtaagagcaactttctaa

SEQ ID NO: 299346 - DNA, 504 bp, Proteus mirabilis; identical to SEQ ID NO: 52325

SEQ ID NO: 299347 - DNA, 756 bp, Proteus mirabilis
ttggctaatgctcctttatctgatcctcaattacctcaccttgctggggctattttctcagtagtcattattaccactattttgtgtgttatttttaaaaaaataaccggctggtctgctggccgctttggtgcgatcgttcaaggcaatattcggtttaacacttatttaggtttagctattgtcgctgatttatttggcgttgaaggtttaggaatagctgctttgatattagcaaccttggttcctctatcaaatgtgacttcagtgctttgtttaaccgcaggacaaaatgtaacttttcgtcaattaatcttcccaattattaaaaatccattaattatctcttgtgtaatagggattgtaatcaatttatcaggaatagggcttccttttggtagcgatcaatttctaaaattgttagctgcgactagtttacctttagggcttatctgtattggtgcggcattacatttatcaacactaaaagcagaaagtaaaatgattagtattaacacagtgactcggttgcttattgtaccgataattgcatatagtgttgctaattttttaggtttgtctccattagttatgatgcttttagtcattttcttttctatccctacagccccaacttcttatattttaactcgacagctaggaggggattctgagctaatggcggggatcattacttcacaaaccatgcttgcagcaattaccttgccgatcgtattaagttttttaattccataa

SEQ ID NO: 299348 - DNA, 375 bp, Proteus mirabilis
gtgagaaaaaccatcaccgcaggtacacaaggaaaagaattaccacgggttcctaaacatatggcatcattttgggggcagtatgatgaaacatcagggctatttaatggtgctaaagcgggctttggtgtgagatatatcggtgtatctcaaggtgacactaaaaatacgattagtgtacctgcagtcactttgtatgatgccatggtaggttattctttaggcgagttatcctcttctttaaaaggggctgaagttcaactaaatatgaataatattgccaacaaacactatgttgcctcttgtgcgggtgaaactgcctgtttttatggcattggcagaaccatgacagcaacgataaattaccgctggtga

SEQ ID NO: 299349 - DNA, 423 bp, Proteus mirabilis
atgtatgtgccttatttagttaaccatgccactttattacaaagggaagggcataccaaatattcagtgactgtaggtagttaccgttcgggtaatgatgagcaggagcggccttattttttacaaggatcagtgatccacggcttacctgcgggttggaccatttatggaggaacccagttatccaaaaattaccaagcggcaagtattggggtaggtaaaaatattgggcgttttggggctttatcatttgatattaccgaagcgagatcaatactacccgatgactctacacaccgtgggcaatcgatacgtattctttataataaatctatcaatgaatatggcacagtaaaggtttgtgttgaaccatcagactcggtaatggttacctctaaatcgccactgttacttgttgaatag

SEQ ID NO: 299350 - DNA, 450 bp, Proteus mirabilis
atgaataaaactattagtgaacatgtagatgtcgcgctcattggtgctggcattatgagtgcgacacttggcacacttctgaaagaactagagcctaatttaaaagtcgcaatgtttgaaagacttaatgattgtggtcaagagagctctaactcatggaataacgcgggaacaggacatgctgctaactgtgagctaaattatacgccaccaaatcctgacggaaccgttaatatcagtaaagcgttagaagtgaacaccgagttcgatttatcgcgccaattatggtcttatttagtaacaaaaggaaaaattgccgatccgcgtgattttattcatgcttgccctcatatgagttttgtttggggtgcagataacgttaaattccttcatcaacgttatcgccaaatgtctgccaatcataggaaccacccgaagttgtttctctaa

SEQ ID NO: 299351 - DNA, 426 bp, Proteus mirabilis
  misc_feature (394)..(403): n is a, c, g, or t
atgcaattatcaacagatgatgagatgtatccagaaagtttaagaggctatgcgcctatcattagagggattgcaaaaagtaactcgcaaataaccatcaaacaaaatggatatactatttatcaaactgaagtggcagctggcccttttgaaattaatgatttatatccatcaggtagtagtggggatttatacgttacgattaagggtgctaatggtagtgagcaacatcaaatcgtacctttcgcctctttacctgtattacagcgtgaaggtcatttcacttatagcgtaacgggcggtgaatatcgtgcttatgataataatgtagataaaacgaagtttggccagtttacattagtttatggtttaccttatggcactactgtttatnnnnnnnnnntgtttatggggggagtcagttga

SEQ ID NO: 299352 - DNA, 507 bp, Proteus mirabilis
atgcgcgattgtacattagctgatggtgttggtaatagtggcgacccttatgattttgtaagtgatagaactaacgttgataaagccaatatgcgcggtgttgaagttactgctaactggattatttctccagaatggaatttagcagcaaactacacgttcacagatacggaacaaaagagtggcgatttcaaaggtaagcctctgaataagcaaccgcgccatatggcaaacgcgaccttaaattgggaaaccacccctgaaatggaaacttgggcacgcattaatttccgtggtaagacatcagactatttatcacgtacttcaatgtctaagagcactccttcatatgcctttgttgatgtaggtactagctatagtctaacgaagcaactaaatctgatcggtggcgtctataatgtttttgatcgtcgcatcgaaagagataattacggttcaaccttagaaggccgtcgttataacatcggattaaactacaacttctag

SEQ ID NO: 299353 - DNA, 822 bp, Proteus mirabilis
atgcatgataaaataattaacgatatccttgattggatagaagataatctgactaaaccaatttcaacaatagatgtaataaaaaaatctggttatagtcaaagatattttcaagatctatttctgcataaaacaaaatcaactattgctaaatatattttgtctagaaagttatctatgtcagctattttgcttaaattaactcggtattctatatcagaaatatctaatgattactcttttacttctcagcagaatttttcaagagcttttaaacgatattttaaggtaacgcctgaattttatagaaaaagtaaattttgggattttagatattatcgacctcaacataaagtatttgattttaaaaaaataaattgtcagttaatttatttatcaaaagatagattgcttgataataattctgatgattttaagttttttgatatttctattccttttgactttaagtcaaatattgcaatagaggggctaggctataaaaataaaaaacagattgaaataataaaaagtcttgttgattcatcaaatgataatttgtgtgtatcttataattatttccttagtagtaaagttaaaaataaaattactgtaaaatataatataaaatatattcatgattataatttttcctttaataaagaaggtctaaagtattatctattttcatttttaggctcttgggaagattatatgattttatccaatattatctatatgagagaattaccgctattgcaagccaagagaagagctgtctcttatacacatctgacgctgccgacgaagaggatagtgtag

SEQ ID NO: 299354 - DNA, 225 bp, Proteus mirabilis
atgatctccgtgacttggaatgcccctattgaagctttcaatgaatttggtaatttctttgatgggcgaggggttgatggtgtctattttgcttttcataaatcacaacaatttcttggtttatctcagttgcctacttttatgactaacaacgtcattaaagagcctaatattgagaaagatattgtagaatataaagcacatctaaccaaagtctttggctaa

SEQ ID NO: 299355 - DNA, 390 bp, Proteus mirabilis
ttgcaaccttcacaagcggtgatggtgatagtgcccgatactcagcataatgttgctgaggtgaatattctcaataaagatattggttttatctatccgggtcaaaaagcggtgattaaaattgatgcttttccttatacccgttatggcaccattgaaggtaccattgtcaatatagcaaaagattccatacaacatgaacaattaggcttagtttatcctgtcctgattgaacttgataagcaagtgatgggtgaagatgaagcacaatataaactggctacaggtatgtctttagttgccgatataaaaattgaaaaacgtcgagtgattgattatttactcagtccaatagaagtttatcaacatgaagcattaagagaaaaataa

SEQ ID NO: 299356 - DNA, 138 bp, Proteus mirabilis
atgaactatataactaaaaatacgccatctcttcatccttcaattattgatgggcttatttatttttcaaaaaagaataaaggaacattaaaaaaagagcagcttattcattttttagaatataccaataaccattaa

SEQ ID NO: 299357 - DNA, 366 bp, Proteus mirabilis
atgatggaagacttacttgcccaacccgaagtcttccgtcattggtttggggagtttatttctcaatctcgccatgaacttgacttggccattcctgaacctttatatgaaaatgctgagatccacgatttactgcaacaaggtgaacaacttcatcgtttaaacggtattcgcgcactgcgtgttggtgatagttgctttgttaatggtgaattaatggatactcatcatattgaagctgcagatgccctttgccaatatgattgtattgataaacaacatttaggtgatgctttagcagatccaaaatttatacgcttattgacgcatcttgttaaccaaggctattggtattttgaagattaa

SEQ ID NO: 299358 - DNA, 513 bp, Proteus mirabilis; identical to SEQ ID NO: 297085

SEQ ID NO: 299359 - DNA, 663 bp, Proteus mirabilis; identical to SEQ ID NO: 297388

SEQ ID NO: 299360 - DNA, 705 bp, Proteus mirabilis
atgcgattagataaatttttatcccagcaattggggattagccgtaatttagtagctcgtgaacttagagcggggcttgtgactatagatggtgaaatggtaaaaacaggtgcgactaaaatcacacctgaacaagaagttgcttatgatggcaatgtgttgacacaaattttaggcccgcgttattttatgttgaacaaacctattggttatgtgtgttcaacggatgatcctgttaaccccaccattctttattttattgatgagccactagcacataaattacatgctgcagggcgtttagatattgatactacagggttagtgctattaaccgataatggtcaatggtctcatcgtataacggcacctaaacatcactgtgaaaaaacgtatgtcgtaacgttggaacagcctattgctacggatgtcgctgagaaatttaaaacaggtgtccagttaaatggcgaaaaagaattgactaagcctgctacattggaagtaataacaccgactgaggtaaaactgaccatcagtgaagggaagtaccatcaagttaaacgtatgtttgctgcggtgggtaatcatgttgtcgcgttacatcgagagcgtatcggtgatatcacattagatgatgctttagcgccaggagaataccgaccgctaacagaagaagaaatcaatagcattcatctacctaaataa

SEQ ID NO: 299361 - DNA, 267 bp, Proteus mirabilis; identical to SEQ ID NO: 296835

SEQ ID NO: 299362 - DNA, 186 bp, Proteus mirabilis
atgcatttatcccaatttttttacattcttttagttttaaacttaattcaagagaaaataaaatgtaatcccaacgttttatatattcttgatatttttggctcccattttcagcaatccattttgcatattctttggccttatttaaatcttgaggaacacctttgttaccatgcagatagatag

SEQ ID NO: 299363 - DNA, 648 bp, Proteus mirabilis
gtggaaattttagttacgggtggaatgggatatatcggtagtcatacatgcgtgcaaatgttagaagcaggcatgacgcctattattttggataacctcagtaatgcaaatgaagaggtacttaaccgaattgaagcattaacaggaaaacgcccactgttttatcagggggatattcgtgacgaaaaacgactggccacaatttttactcagcactctattcaatcagtgatccatttcgctggattaaaagcggtaggtgaatctgttgaaaagcccatcgaatactatgacaacaatgttaacggtactttggtattagttcgttgtatgcgtgatgcgggcgtaaaaagtattattttcagctcatcagccacggtttatggtgatcctcaaactgtgcctattactgaagagtcacctgttggtggcactaccaatccttatggcaccagtaaatatatggtcgagcgtattttgtctgatctctatattgcagatgagagttggtctatcagtttactgcgctacttcaatccagtaggtgctcatccatctggcactatgggggaagatcctaagggtattcctaataatttaacgccttatatctcgcaagttgcgatatctcccgggcgacgtggctga

SEQ ID NO: 299364 - DNA, 441 bp, Proteus mirabilis
atgggagaagggcagattattgcaagtcagcttgcatatgcctattcaattatcggtaaagataatgcccaacgaaataaatcaattctgtcggaaatacaaaaacagaactatgtgcaatacgatgataacacttactttaaaatcctaaaacaagggaaacctgtggattcaattgcaggtaaaacagttgttttcgctatgcatgaacaattaaccgatggtacagtaacacttaattatgacaaagctaagccgttaattttaccataccgtcaacttccactgcctcttaatacttttgttgctaaagcaggcttaaatggcaaagctaaaatttatattaaacctgatggcgggtatgggaaagatggtatcccagggcaagtacctccagaatcgatgtctatagtgacaattgaaattttagctatcaaatag

SEQ ID NO: 299365 - DNA, 519 bp, Proteus mirabilis
atgaacacgcttcccatttattatgttaacgcttttacttcaacacctttttccggaaatccggctgcggttattttgttagataaatggctacccgatgacacactacttaaattagctaatgagattggtttacctgaaacggcttttttagttgccaatcatattcgctggtttacgcctaaagtagaagttcccctatgtggtcatgcgactttagctacggcttttgtattaaaaacgattaacaaagcacctgcgacaagctttaaattccattctctgtctggagaactcacggtatcttgtcactcctcaagttttactctcgattttcctcaagtacctgcatcattaaatccaaccataaaaccgtcattagaagcggcactaaacatagatattgaagaagtttggcaatctcacgacagatatacctgctttgtggctgatcctaacaaggttattgattatcaacctgactttaatgctataacacaactaccacttcccggttaa

SEQ ID NO: 299366 - DNA, 225 bp, Proteus mirabilis
gtggttgatttacataactgcgcatcaacacctagaccaacaccaaataaattatctagtttaccacctcgtagtgatgcctcacctgaattggataaccatagacgtgattcagggcgattatcaccaaacagatggcttgctgatatatcaccttttaatgccatattaatattgcctgccataaatggatatccaccacgtaaaccaaccgtagcaacttga

SEQ ID NO: 299367 - DNA, 468 bp, Proteus mirabilis
ttgggtgggattaatctgtatcaatatgcgccgaatccgttgggatggattgatccttgggggttatgtcgacgtggtaatgcagcgactaaatcacatatggatgaagtaagggatcagtttgctaaggataatcctcggtttactcatttagagggaggccgtgatgcaatttcaaaagttgaacttcgagaaacctatttaaaaccgctttctggaaatacaggacgaaaaggtggttcatatacggatatgacatttaaagatccaaatggaaaaactgtttatatacaaactgtagataagggaaatatcaatggaatgacgcaacgtgagtggaataatgctatcagaattaccaaacaagaccctagtgcaatagtaattacagttccaaaaggaagctcccttaaacctggtgctttagatactactggcatgacgcctggtacagtaactcaaagataa

SEQ ID NO: 299368 - DNA, 402 bp, Proteus mirabilis
atggcaatggtcaacggtgttgatgagcaatttggtcgcattgtcgatgaattagaaaaacagggccttgcagataatactctcgtcgttttcttctctgatcatggcagttgcttaggatcaaatggacaagcaacaaaaaataatccgtatgaagaatcgatgcgtgtccctatgatgtttcgcttaccgggtaaaatcaaaccaggttttgatgatgcattaatgtcagcacctgatatttacccaactattttagggttacttggtttatcagaatggatccctgattcagtagaaggcacagatcttgcagatagagtcatcacaggcaaaggcgacacagcaaactctcagctttatctttttattccttatggtgaaccttcattcggtacttga

SEQ ID NO: 299369 - DNA, 204 bp, Proteus mirabilis
atgtattgggcaaacgatacacctcgtgataaaccgatttatatcgatcaatgggggcctgaacatgaagccgatatggcaatcaagttcctcaaaaatgaaaataatcaatttagagataattcaaaaccgtttgcattagtggtttcaatgaacccacctcactctccttatgatcaagtaccgaatgaaggttcaccataa

SEQ ID NO: 299370 - DNA, 387 bp, Proteus mirabilis; identical to SEQ ID NO: 295557

SEQ ID NO: 299371 - DNA, 393 bp, Proteus mirabilis
  misc_feature (364)..(373): n is a, c, g, or t
gtggctcagactatcagagaaaaacaatttgataatccccccagttatttaaccgtaaaactagcagccgagcagagtttacgcctcgctttactaagagagcacactggtatggggcgttatgatttgcttgatgggttacaaagcgcctttattaaaggcagtttagatgacagtcaaaacgaattatgggacgaaatcaaaacctgtttttcaggttatctattaggacaaattccattaggtacagcaacgccccctttagtcaatgaaacctatgaacgcgccaaagcatttcgctttaaacttgatgatacattagcaaaaactacaaaatgtgatgtttatcgtaacccccaacatnnnnnnnnnngtttttctctgatagtctga

SEQ ID NO: 299372 - DNA, 660 bp, Proteus mirabilis
gtgaccggcgtgctgagcggggtatctgccgggggcggaaacagtgaacagaagtttgaggcaaaacgtaaaaccgccctgcactttttttatgcggatgctatcggtcatccggcaaccacccttatcggcggcagtattccggggtattcctgtgacagcgcagccacaccgctgtttccttattacctgagcacgctcgacagtgtgccgtggcggctcggtgtgccggaaatggcgtatccggaagcgataattcccgggaaacgggaaatcggggggcagagccggggcaacatgtggggaaatctctatccgcgcagcggttttgtcaaccagcaggacggggataaagcggcggctgtggtggcgcagcgcgtggcagatattatgacccgcaccgggcaggcgcatacctatgtgcccctgaaaggcaaccgccgggatggctattggccgccggacgcggtgacggagaataccgggacaaaaaaccataaatggcagcgcctgtcgccggggctgaaaaacagctgtgcggtgtttccggatgagggcggagcacaggcacaggacggtaattatgcctgggcattgtggcagccgtacagctgctgcaagcgcatggggcaaaaatttctgtacagcacaacgttttaa

SEQ ID NO: 299373 - DNA, 660 bp, Proteus mirabilis
gtgaccggcgtgctgagcggcgtgtctgccggcggcggaaacagtgagcagaagtttgaggcaaaacgtaaaaccgatctgcactttttttatgcggatgccatcggtcatccggcaaccacccttatcggcggcagtatcccggggtattcctgtgacagcgcggccacaccgctgtttccttattacctgagcacgctcgacagtgtgccgtggcgactgggtgtgccggaaatggcgtatccggaagccctgatccccgggaaacgggaaatcgggtcacagcaccggggcaatatgtggggaaatctttatccgcgcagcggttttgtcacccagcaggacggagagaaagcagcagccgtggtggcgcagcgcgtggcagacattatcacccgcactggtcaggtgcatacctatgtgcccctgaaaggaaaccgccgggatggctactggccgccggaggcagtgacggagaataccggcacgaaaaaccaccaatggcagcgtctgtcaccggggctgaaaaaccgctgtgcggtgtttccggatgagagcggcccgcaggcgcaggacggcaattatgcctgggcactgtggcagccgtacagctgctgtaagcgcatggggcaaaaatttctgtacagcacaacgttttaa

SEQ ID NO: 299374 - DNA, 570 bp, Proteus mirabilis; identical to SEQ ID NO: 53713

SEQ ID NO: 299375 - DNA, 483 bp, Proteus mirabilis
atgcaaaataattatgtgttacgcagtgtgcgttatatgttagatcttagcgatggacatattgttgatataatgaaactggcagatttcaccgcgactaaagagcaagttaatcagtggttaaaaaaagacgatgatcctgcctttgttgagtgtgatgatatggccttgggacattttttaaatgggcttatcttttatcgtcgtggtaaagatgaaaaatatcctactccagaagtcgaaaaacggataaccaacaatattattttaaagaaattacgtgttgcctttgaattaaaagacatggatatgattaacatttatgaactagcggattttcgcgtttctaagcctgaacttagcgcgatatttcgtaagccaggacataaaaactaccgtaactgtggcgatcaactggtgagatactttttgaaagggttaactgaaaccttacgtggcaaaggcaaagcggtgaagaaataa

SEQ ID NO: 299376 - DNA, 483 bp, Proteus mirabilis; identical to SEQ ID NO: 296594

SEQ ID NO: 299377 - DNA, 351 bp, Proteus mirabilis; identical to SEQ ID NO: 281138

SEQ ID NO: 299378 - DNA, 351 bp, Proteus mirabilis
atgccgctgtcgtcacagtttgaccggaatgccgattaccaggccaccttactgcatgagttggtgcacagtaccggtcatccgtccaggctggcccgtgaaggcatcacctcatcgtccctgaagtttggtgacccgctgtacagttttgaggagctggttgcggaaatgggcagcgcttttctttgtgcgcagttaagcgtcgagggagaagtgaaccatgaaagctatcttgacagctggctgcgggtactgaaatcggacaaaaaagcgttgttccgggccgccgggcaggcccgccaggcctgtgagtttttactgaatgtggccgcatcccgacaggccgcgtag

SEQ ID NO: 299379 - DNA, 492 bp, Proteus mirabilis
atgaaactgagtaaaattgctttggctgcggctttagtatttggtattaattctgttgctacagctgaaaatgaaacgcctgcaccaaaagtaagttcaactaaaggcgaaattcaattaaaaggtgaaattgttaattcagcatgtggattagcagcatcttcaagccctgtaattgttgatttcagtgaaattccaacttctgcattagcaaatctgcaaaaagcaggaaatatcaaaaaagatattgaattacaagactgtgatacaactgtagcgaaaactgccacagttagctatacaccaagtgttgttaacgctgtaaataaagatttagcctcttttgtttctggtaacgcatctggcgcaggtattggcttaatggatgcgggtagtaaagcagttaaatggaatactgcaactacaccagtacaattaattaacggtgtatctaaaatcccattcgagttcaggatattgcgtttcttttaa

SEQ ID NO: 299380 - DNA, 573 bp, Proteus mirabilis
ttggctgttaaggaaagtgataccgtcatagatacggcaaatcggcttattgattattttcaacgccatcagcgtcctattattgcgagtaaagattggcatcccgcagatcatctcagctttgcaaaaaattcaggtactgttgttggcgaaattggccaattaaatggccgcccacaagtttggtggccagtgcattgtgtacaaaatagccatggcgctgactttcatcccttattaacagatgatttaattagtcatattatttataaaggccaaaatcgacttatcgatagttatagtgctttttttgataatgaccatgaatatcaaacaggattacatactcttttacaaagcatgcagatcgagcatctcaccattttagggatagcaactgattattgcgttaaatttaccgtgttagatgcattacaattgggttatcaagtatcagtggttatggatggttgtcgaggtgtcaatattcaaccagatgatagccaactcgcatttaatcaaatgcaacaacatggggcagttttaacaaattgtaataacattattgggtaa

SEQ ID NO: 299381 - DNA, 363 bp, Proteus mirabilis
ttggttgcccaagtcattggttttgttgaactgccaacacaacctttggcattaccacttgatattcaaggaacagtatttcaacaaaaagtttggcgggcattattagatattccttttggttgtaccatgacatatcaagaaattgctcaaaaaattggttcgccaaaatcttatcgagcagtggcgaatgcctgtgcatcaaataaactagcagtggcgatcccttgccatcgagttatcagacaaaatggtgaaatatctggatatcgttgggggattgagcgcaaagaaaaattattacaaagagaaaaatcccttcatcatcagcatgatagattggctattagcaagagcgattaa

SEQ ID NO: 299382 - DNA, 345 bp, Proteus mirabilis
atgttgtataaatttacccccattattctgctgataatttccaatatctttatgacttttgcttggtatggccatttaaaatacggtaacaagccgttaattatagtgatcttactcagttggttaatcgcttttgttgaatactgttttgcagttcctgcaaaccgtatcggccacaactattacagcgcagccgaattaaaaaccattcaagaagtcatcacactaaccatttttgctgttttttcggtgacttatttaggtgaaagtttcacacttaaccactttatcggttttattttaattggtgcgggtgcgctatttatttttaaggggccattttaa

SEQ ID NO: 299383 - DNA, 528 bp, Proteus mirabilis
atgttatcaactaaaaatgataatggttatcatcgttctcattggaaaggcgattcaattaccgcactctctctagcaaaagatagtaacggtactagcggatgggtatttattggtgatcattttgattatttattaataagaggtggagataacgcagtaaatattttaagagatcctcttatccaccatgataaattgagcgtagaaaatccagttgaatttattattgataatcaaaagaagcaatttaatgggaaaattaaaataaattataactgggtaactcaaaccgataaagaagcagcactaacttacggttttatatgtaaaaaagatataaacacctgttcactaaaaatagataatttactaccttttaaccatccctttaatgttgaattctaccaatacaaagaaaatcttattggtgccagcacaccaagaatattattacccgttactttggcgctagatatagtcacatctcctttacaattgctgatgatcccaatactaagcaagtag

SEQ ID NO: 299384 - DNA, 297 bp, Proteus mirabilis
ttgaaactggctgaaaggtatgccggggagcaaaaccgtcctcattccgtttcgctgatgcagtgtacgctttatgatgccggatttgcttacggtagattattactatggcaggcggatggtctgatgagaccctggccggcatatttgcttcgccgtttaccggatatcggtcagcggattgatgcagcggtctggcagaaaggctgtgaagccggccaggatgagactgtcactgaatggatggcaatggagatggctgatgaatacctcatcggtattgaactgagcaattaa

SEQ ID NO: 299385 - DNA, 327 bp, Proteus mirabilis; identical to SEQ ID NO: 294127

SEQ ID NO: 299386 - DNA, 417 bp, Proteus mirabilis
gtggtttttttaaatagcacaccaagggattattggaaatatcctgcggttagacctgcagaaaaatttaccattaaactgatccaatgtgatgcaaaatcgttatggaaatcagtgaaaattaaatttaatgggcagccagagccagagatgggggctgaacaacaaaagtaccttacactttcttctggcgttaataaaagtaagttagccattggattaattgatatagatggaaaccaacgtattactttaggtgaaaaccataacggtggaaatggaactcaacttaacgatggcacgatgttgctaacctttaatgcatttgttgaagcgacaccaaaagcaatacaggaaaaaagtgttgtacctggagtttataatgccacggtagaatttgaggtttcttatgaataa

SEQ ID NO: 299387 - DNA, 381 bp, Proteus mirabilis
atggctattgttggtataggtatggatatcgttgagatatcacgtattgaagagataatagggcgttcaggagaacgcctcgcgcgacgtattcttactgataatgaatggattatatatcaatcacataaacaacctgttcgttttttagctaaacgatttgcggtaaaagaagccgcagccaaagcattaggtacaggcattcgcttaggattggcatttaaccattttgaagtcgctaatgatgaattaggtaaaccaacattgcactttttagctgtggcaaaagagatggcgcaaaaagcgggaataaatgctattcacgtgacactggctgatgagcaacgttacgcctgtgcaaccgttattttagaaaaataa

SEQ ID NO: 299388 - DNA, 141 bp, Proteus mirabilis
atggggcattaccgcgatgcacaggcgattgccaccgggatgcagtataagccaacggccagtacgaatgtccgcctgaatgcgtcatggaataccggtggcgataccagtattggtgccgggtttgcggtgggctggtag

SEQ ID NO: 299389 - DNA, 462 bp, Proteus mirabilis
gtgttaaacacctattttaacactaagatcagtgctgattacctattaaccgaaaaattcacacacagttatgacgcagtaatgatgccgggtggtcctaaaggtacagatcgtctatgtgcaaattcactcgtgattgattttattaaacgccatattgcacaagacaaatacatttgtgctctatgctcttccggtgcaaaagtattagcagcacatcatcttcttgaaggtcgttattacagcactggtgataaacttgctgataaatatgatgatggtcattatcttgaccaagatgttgttgttgatgggaaatttatcagtgccaaaggattaggtgttagctttgaatttgcctttacggtagctaaatatttgctcagtgataatgtagaaaaagtagattggcaagctaatcacatttactttaaacattggccgttgtcttaccttgactaa

SEQ ID NO: 299390 - DNA, 438 bp, Proteus mirabilis; identical to SEQ ID NO: 296164

SEQ ID NO: 299391 - DNA, 372 bp, Proteus mirabilis
ttgcttttattaagatcggcagaaaaagcgaccattattaatgttgcttctattgcagggattgttccaagtattgggcaaagtaactatagcgccgctaaggctggaattataggttttactcatacgttggctgcagagttggcaggtaaaggaattcgagtcaatgcggtggcaccgggtatgattgagtctgacatggtcaaaaaagtgtcacgccaagtcgtacgtcatattaaatcggttattccattacaacgattgggagcaagtgctgaagttgccaataccattgtatttttaagctccgaggcatcgagctatattgttgggcaaacattaatcgttgatggtgggatggtaatgcgatga

SEQ ID NO: 299392 - DNA, 276 bp, Proteus mirabilis
atggttcttgcttttgtccgtctggatattggcgagtgtatggatgaagataattttccgccaaacttctggataatcagtgccgttgcagagcaactgggcgtgttatctgtggaggctgattttacccgtccacatcttgagaaaagggtccgcgcagtctgggaatcggcagagcaaacgccttatgcgtctgactttcgtcgtatctacaacgacgcggccaaaaatgcacagtttgaagatccggttgaagcgctgatgtttagtgcttaa

SEQ ID NO: 299393 - DNA, 393 bp, Proteus mirabilis
atgtcacgtcaacaacaacagctttttatggcatgggataaagcttacccaccaacaccgtgggaaagagagcgagataatcgaattgctaacattgttgggcatcataatccctttgttacgggacaaatgaagtggcagttaggacataaaaatagtggtgcaggattaactgcaacatatcgtcctacaactgacaaaatagaaatgcctaaagcgcccacagtctcccaagatgagcagatcaaaggtaatctaaatagtaaaatttatcatttttcacactgtactggttatagaaccatgtcagataaaaatgcggtatattttaaaaccgaaaatgaagcaactaaagcgggttaccgattagcaaataactgtaaagcgctttag

SEQ ID NO: 299394 - DNA, 246 bp, Proteus mirabilis
atgcaatatgtaatcaaaaaagactctccaaactgggtttgttttgattatattaatagcggaatggatatgaattatcctgatttatctctagggacaatagcagcatgggtaaacgtacgtgatgcaattgaatatacaaataaaagaaatttagagttgaggtactgttttggtagaccaacatttgattacaaagaaagatggtgtaaccgttttcctttacaaagagtaatatcaatatag

SEQ ID NO: 299395 - DNA, 246 bp, Proteus mirabilis
ttgttggcggataccaatgcggatcaagatactcatgaattggatatattcagagctaattatcgattagctaatggaggtgaatatggctggattgagacctttcatgataaagatccgatgatgaaagtactcagcatcgataatataatcgtttcaaaaaatattgaaatatctgatgtgaaagctattcaatcgacgctttcggatcactatcctttggttgccacgctaatccttaagtag

SEQ ID NO: 299396 - DNA, 240 bp, Proteus mirabilis; identical to SEQ ID NO: 272469

SEQ ID NO: 299397 - DNA, 240 bp, Proteus mirabilis; identical to SEQ ID NO: 103781

SEQ ID NO: 299398 - DNA, 186 bp, Proteus mirabilis
atggatccatcacatcaaaaatactattctttacttatttctacccaatttacgtttattggcgctatagctagttgtatcactcttattaaagattattgccaaaatctagatgtcctaacgtataagcttacctttctaaaaaaattatttttaataaatctaagaggaacccatttactctaa

SEQ ID NO: 299399 - DNA, 252 bp, Proteus mirabilis
gtgagtcgggtttttcaacaagtcactgatagtaaacaacaaaaatctgctttaaaaataagacaaatattgatgcgattacaagatgttaagttattgcaagagttaggagaatatcatgaaggagataacgaattaaatgatatcgcggtaagaaaacaaaccaagatagaaagctttcttactcaatcctttaaagaaaaagccgattttcaacaaacattagaacaaatgtatgagattaccgcttaa

SEQ ID NO: 299400 - DNA, 204 bp, Proteus mirabilis
ttgttcgcatttgcacctttagccgcaaatgctggatgtgatgaagtcgttcaagatattcaacaaaaaattgaaaataatggtgttcctgcagctaactttaccctaacagtggttgaaaatgatcaagttgcacagactgaaggtaaagttgtaggtacttgtgaaaatgattctaaaaaaatcatttatactcgccattaa

SEQ ID NO: 299401 - DNA, 300 bp, Proteus mirabilis
atgattatcggtcaacaaaaagggcgagatactaaagagaaagtaaaaagaaactttggtatgccatcaccagaaggttatcggaaagcattacgcctgatgaaaatggctgaacgcttccatttaccagtgattatttttattgactccgcgggtgcttatccgggggttggcgctgaagagcgggggcaatcagaagccatagcacgaaatattcttgaaatgtcccgattaaaaacaccgataatttgtacaataacaggggaaggtttttctcaattattaactgttcctatttag

SEQ ID NO: 299402 - DNA, 165 bp, Proteus mirabilis
atgactgaattagaacttggtggtaaaaaattagagaacactatggttccaccttttgaagataagcctatctctattccaacatcagcttatgggaaactctcgtttcaaactattaatgattatggtgccatcacaccaaaaacaatcgtcgacgttagataa

SEQ ID NO: 299403 - DNA, 225 bp, Proteus mirabilis
atgagtattagtcgtcgttcttttattaaggggatgggtataggatgtgttggttgtacggtgggaagtttaccaccaggggccctcgcacttaatccagtaacatctcttaagggtcagtctaaattaacaccaagtttgtgtgaaatattaaaggcaatacagatagataagaattgccttgtccagaggtatgttagcgggttagttcagcataacgactaa

SEQ ID NO: 299404 - DNA, 150 bp, Proteus mirabilis
atgatgatcaaaagcgagagttcaaaacaacagattttgattgatacactagtaaaaatgcacccttacgatacaccagaagtcattattgtccctatagaaaatgggtttcatggttatctagaatggatacatcaaagcctaaattaa

SEQ ID NO: 299405 - DNA, 162 bp, Proteus mirabilis
atgcaacccgttaaggcacttattttgcgctcttatggtgtgggtaatgccccttctcatcccgccttgttatcaacgctacgcgaagcaactgagcgcggtattgtcgtggttaacctaacgcaatgtatttctggtcgtgtcaatatggagagcatttaa

SEQ ID NO: 299406 - DNA, 183 bp, Proteus mirabilis
atggttttacttaacactaatacatcaaggccggtattttgtgccaaaatagacactggaataccaacggcaccaaatgcggtaggtaccgtatttgcgactagtgaagcgacggctgctttaaagggatcaaaacctagtgcgattaaaataccgataggaatagcaactgctgtaccataa

SEQ ID NO: 299407 - DNA, 1113 bp, Proteus mirabilis
atgaaatctcgtgctgcggtcgcatttggaccaggagagcctttaaaaattgttgaagttgatgtgatgccacctcaagcaggtgaggtattaattaaaattagtcacactggcgtatgccataccgatgcctttaccctttctggtgatgatcctgaaggtgtcttccctgccattttaggccatgaaggcgcgggggtggttgttgaagtaggtgaaggcgtcacgagtgtcaaaccgggtgatcacgtgatccctctctatacagcagaatgtggcgaatgcttattttgcaaatcaggcaaaacgaatctctgtgtagcagtaagagcaacccaaggtaaaggcttaatgcctgatggcacaacacgcttttcctataatggacaacctatttatcactatatgggctgctctacttttagtgagtacacagtagtcgctgaagtgtcacttgctaaaatcaatccacaagccaaccatgaagaagtctgcttgcttggttgcggcgtgacaacaggtattggtgctgtacataatacagcaaaagtacaagaaggtgattcggtggctgtatttggtttgggtggtattggtcttgctgtactgcaaggtgctagacaagccaaagccggccgtatttttgctattgatactaatcctgaaaaatttgcattagcgcgccaatttggtgccacagactgcttaaatcccaatgattatgacaaacctattcaagaagtactggttgaaatgactcagtggggtgttgatcatacttttgagtgtattggtaacgtcaatgttatgagagccgctctagaaagcgctcaccgtggttgggggcaatctatcattattggtgttgcgggggcaggacaagagatctcaacacgtcctttccagctcgtcacaggtcgttcatggaaaggaactgcatttggcggagtaaaaggtcgtagccagctacccaatatggttgaagatgcgatgaatgggaaaatcgaactcaaaccttttgtgactcacacgttacctctggaaaaaataaatgaagcctttgacttaatgcatgaaggtaaatcaattagaacggttattcatttcgattaa

SEQ ID NO: 299408 - DNA, 840 bp, Proteus mirabilis
atgttaaaacgattggatgatttcttattagagccaccattaaagcctttcagaggtataaaacgatttattgttgagtttctttttttcggtgtaaaagaggctcgttcttgcttattcgctggttttttcttttttattttattcgcgacacctagtaaaggagtgctgggtataccgcgttatgatgttttgcttattctcgctattgttttccaattatggatggtatggggaaaacttgaaacatgggacgaactaaaagcaatttgtttttttcatgttgtaggttttgtcatggagctatttaaaacatcagcagcgattggctcatggaaatatcctgattttgcttacacaaaattgtgggaagtgcctttatttacagggtttatgtattctgctgtcggtagttatttaattcaagcatggcgttttttaaaagttcgaatagagcattatcctccttattggatggcaactttggttgctctcgctatttatattaatttcttttctcatcattttattggtgattatcgttggtatttaacggcatttattttaggtctttatgcccgtagtgtggtctattttacgccttatgatacagagagacggatgcctctgttactggcttttgttctgataggtttttttatttggcttgctgagaatttcggtacgttctttggtgtatggcaatatccaaatcaaattggtgcgtggtctgttgtgcatgctgggaagtggggatcttggtcactattggtcattgttacatttactatcgtagtacatctaaaacatattaagcatagtattagtgtggttaagtag

SEQ ID NO: 299409 - DNA, 483 bp, Proteus mirabilis
atgcaaaataattatgtgttacgcagtgtgcgttatatgttagatcttagcgatggtcatattgttgatataatgaaactggcggatttcacagccactaaagagcaagtcaatcagtggttaaaaaaagacgatgatcctgcctttgttgagtgtgatgatatggctttggggcattttttaaacgggcttatcttttatcgtcgtggtaaagatgaaaaatatccaactccagaagtcgaaaagcggataaccaacaatattattttaaaaaaattacgtgttgcctttgaattaaaagacatagatatgattaacatttatgaactagcggattttcgcgtttctaagcccgaacttagcgcgatatttcgtaagccaggacataaaaactaccgtaactgtggcgatcaactggtgagatactttttgaaagggttaactgaaaccttacgtggcaaaggcaaagcggtgaagaaataa

SEQ ID NO: 299410 - DNA, 285 bp, Proteus mirabilis
atgagtttcttcaatgatctaaaagcctctttagaagaagccgtagaaattaaaaatggcgataaaaaagcatcgaacgtgactcggtttgaagttgctgatgtaaaagcgattagggagcaacttaacgtttcacaaagtgaatttgcacatgcattagggacaagtatcgatactgtaaaaagttgggaattaaaaagacgtaatccgacagggcttacagcgaaagtacttattgctattcataaaaaccctaatttatttaaagagttagccaatatctaa

SEQ ID NO: 299411 - DNA, 642 bp, Proteus mirabilis
ttgagaaaaatcagcaaaaaaaagggttatgaaccaccaagcttaacccaatggaaaaaacaaaataaaaataaaaaatacattgacttaacacctaatcttcgagctgaaataagagctgaattactaaaagaacaattctatctatgtggtcattgttgccagcagataccgaacattcaagattgccataatgaacatattgagccacagcaaatagcacatcaaagaacactcgattattctaatattattgttagttgtaatagtaaaaaacagtgtggtgattcacataaacattttcttctacccattactccttttgatgatagatgtgaaacagaattgcaattctctattagtggtagagttaaaggcttaacccaacaggctcaagatactattcgaatattaaatttaggtgataacgaaagaacaaataaggtattaatcgaaaaacgtaaaatagctatttctactattttattttcaaatgggataaattcaaatattggattagaggatgatgatttacttaatgatttaattattgaattgtcaaaacctaataatgtaggaaaattagaaagtttttcacctattgttattaatgtattaaaacagtggttatctgatcaataa

SEQ ID NO: 299412 - DNA, 1419 bp, Proteus mirabilis
atgcaaatcagcaaactacgtcttgaaaattatggtgtttttactgatgctgaaattatgttggccacaaaaaatggcaaccagaatggttcaaatattacggtatttataggtaataatggttcaggtaaaaccagccttttagatgctattgcaacaggtttaagttggtttgtagcgaagtttgaggatagagaagctcaaggtgaatttgcatgcaaatctaaaattaatatttcatctgattattgcttaatctcttttatcaaacgagaagccatccatccgacacatcaatataatgatgatctctctttagaattaatcactgccttaaaaaattcaaaaaaatatgcattggggtcatatgctatagattctgatatagctaattacgtatataaccattatagaatttcatcaagacaaacaagatatcatcgaaattatccaataacagcgtactatggcgcaactcgccatacctatgacacaataatcaacaatgctattcagcctaatgatagtcataaatttgatatcttagctggctataaagatagttttgatgctaaaacaaattatgctgatttttttacttggtttcgttatcgtgaagatatcgaaaatgaaacagcacctcatacaagtattatgaaattgctagaaaagcatactgatgtaaatagtgaaatttaccaaagtatgttagcagagcaaagaaaactgcaagataaagcattaacagctgtgcgtgaagcaatcaagattttcttatcggatactgattcagttattgaaaatatctatattgaacgaacacctaacctttcaatgaaagtggtaaaaaatggaacgcatttttcaattgaacagctatcctatggcgaaaaatcactttttgccatggtcggtgatatagcacgtcgtttaacgcttttaaacccaacactagataatcctttagaagggaaaggcattattttaattgatgaacccgatgtacatttacacccacaatggcaacgacgcttaattagtttactggataaaacttttcctaactgccaatttatattaacaacacactcaccgctattaatcagtgaccataaagatatcttagtatatagcattgaaaaaggtcaggttaaaaagataaattcactttacggccaagatatcaatagcgttctgtcagaaattatggatactgactttatcaatcaaaaagttcaaaatcaattaggcgatattcttgatgctattaatgaaggcaatataaagaaagcaaaagattggctaagtaaattagaaaaagagatctccgccaataatattgagttagtgaaagcacgattgttgctaaagaaaaaggaagttcaacttgagaaaaatcagcaaaaaaaagggttatga

SEQ ID NO: 299413 - DNA, 390 bp, Proteus mirabilis
atgatgaaaaaagttttacctatcgctatcgttttaatgggttcactctctttcggtgcaatggccaataattcacatatgaatatgaatatggatactaatgcggcacaaagtaactcccctatgaaccaagagctcatggattcgatgaataaaatgcatgagaatatggcaaaaggaatgaatagtgctaatgcagatgttgcttttgcgcagggaatgattgctcaccatttgggcgcgattgatatggcaaaaatcgagctaaagtatggtactgatcctgaaatgcgcaaattagcacaagctattatcgatgcacagggccctgaaattgaacagatgcaaaaatggttagaaaaaaataataccaatatgaaaaataactaa

SEQ ID NO: 299414 - DNA, 753 bp, Proteus mirabilis
gtgagtaaaaagaaaatcgttatttctttagccataatcgctggattgagtacaccgacagcctttgcgggagaatggtcaatagggggttctgtattatcacaagtaacgccttataagggtgctaaatctaaagactatttattacctgtacctttggttaattatcaatctgaaaatttctattttgcgacattagctgcgggatattatttgtggaatacaccgaaagatcagttatccgttgatgttcactattacccacaagcatttaaaccaagtgactctgatgatgagcagatgaaaaagcttaatcgtcgtcgggatacagtaatgggtggattcacctataaacatcatgagtcatggggaagtttacgagggattatctctggtgatcttttaggtaaaagcaatggcattattgctgatgcagcttacctttatccttttgaattaggcaattggtcacttcaaccgggaattggtgctgtttgggaaaataaaaagcagaatcgttacgcttatgggattagtcagggagaatcgcagcgtagtggtttagcagaatatcgtccaaatgatagctggagaccttatgtcgaaatctcagctaactataagtttgctgaaaactgggatttctttgcgatgggacgagtggatcgcttaccaagcgaagtcaaagatagcccaatggtaaataaatcagtaacagctattttatggacaggggtcacttatactttttaa

SEQ ID NO: 299415 - DNA, 1440 bp, Proteus mirabilis
atgaaaattgataaagtagtaataaaaaactttcgttgttttgaacaacttgaagtgacatttcaccctcaaatgactgtacttatcgcgcctaatggtgcaggaaaaacaactatccttgatgctgtgcgtattgcaatgtggccttttgttaaaggttttgatttaggaagccaaacaggcaaagccgcaaccatacagattgatgatgtcaggttaaggcgttttgaccagaatatggagcctgcattacctgccgaaatagaagcattttctaattcagaaacgaatattttacctatctcttggttgcaaactagagataaaattgctcctcgtacaacaaccaaaggtgatacctttaccactcaattgactaatattgctaaaaaatatcagagcataatttataagtcttcaaaatcaactaaaatagatagcgactctttttctcaatcggtagaaaacatcaacttacctttaatcgtatatttagggacaggacggctgtggtatcaagggcgatatagttcagaagctcaagatcaaaagctggataacagtgtttattctcgattctggggatatcaaaattgtttaactgcaacatcaaattataagcaatttcaatcttggtatagttgggtatatcgtagtcatcgtgagttacaaattacccaattagaagggcaattaaaaccacaagatgaagaagcgcagagaaatttttctgcagcaattaacgtagtacaaacttctattaataagttaacgcaaaagttaacgggatggcatgacttacaatatagggcaagtatgggacagcaacttgtaatggaacatcctgagcaaggctatattcccctttcattattaagtgatggcttgcgtaatatggtggcaatgatctctgatattgcatttcgctgtattaaattaaacccgcatcttggagagaaagccgctattgaaacatccggtattgtattgattgatgaagttgatatgttccttcaccctacttggcaacaaacggttttatcttctcttatggacgcatttcctaagcttcaatttattgttactactcatagcccacaagttatcagtaccgtacattctgatagtattcgggttattggtgagaattatgaaggtaagcttattgcatcaaaaccgttagctcatacatatggaaatccaagcaatcaagttttagaaagtgttatgctcgtagatcctcaaccaccaattaaagaaaaagagatgcttgaacaattaactgaattagttgatcaaggaaaaggaaatagtgaattagcccaatctttgctgacagagttaacgactcttttaggtgatactcacccacaattacagcgcttacataggagccttaatagacaacaatatttgtctcatttagaggggcgcaaatga

SEQ ID NO: 299416 - DNA, 519 bp, Proteus mirabilis
atgaatagagttgtagaaaaatggatgtatcgctctcgttggttatttgcacctgtctatattggcttatctcttggattattggccttaactatcaagttttttcagtcaatgtacgagatcttacccaatatatttgccttatctgaagctgatttagtattacgtttattatcgctaattgatttggcattagtggggggactattgataatggtcattttctcaggttatgagaattttattaccaatatggaaatcgaaggggcgaaggataaactctcttggttaggtaacatggatgcagaatcgctgaaaaataaagttgctgcttctattgttgctatctcttctattcatttgttaggggtgtttatggatttaaaaaatatccccgataacaaactattatggtatgtggtgttacatctcacttttgttttttccgcttttgtgatggggtatttagagaagatctctaaacgaagtaagcgagcaaataaagccaaccaagggtaa

SEQ ID NO: 299417 - DNA, 126 bp, Proteus mirabilis
atgttgatccaacagattgctaagcctgctgatatttatcatgcttataattcaaaactatttatcaattttgcgaactacctcataaaaacgattggtatcacactttttatgcaaactaggtaa

SEQ ID NO: 299418 - DNA, 1032 bp, Proteus mirabilis
ttgcaacagaataataaagagagcgcacaagcaacaatgaaagatgttgcttttgctgctggcgtgtcaacagccacggtgtcacgcacattaatgaatccagaaaaagtatcctcacaaacccgtcaaaaagttgagcaagctgttcttgacgtgggttattacccacataatttgtcaaaaaacctgaaacgtaacgagtcaaaaacgatcctcgtgatcgtccctaacatcagtgatcccttttttacagatgtcgtatgtggcattgaagaaaccgcagctcaacacggctatcttgtgttaattggtgactgtaaacaccaacaaaaacatgaaaatgcctttattaatttaattattactaagcagattgacggcatgttactgcttggctctcatatcccttttgatgtttctaaagaagagcaaaaaaatcttcctcctatgatcatggcaaatgaatttgccccagagcttgaattgccaaccgttcatattgataatctgacagcttcttttagagccacccactatctacaacagatgggacataagcgtattgcctgtattacaggccctgaagatatgccactatgtcgttatcgcttacaaggttatattcaagctatgcgtagaaccggtgtccctctacgcgaagattatattattagaggtgattttacccacgaaagcggtgcagaaagtctgaaaaagttaatttcgttacctgaaccaccgacagccgttttttgccatagcgatattatggcgattggtgtgatgtggcaggctaaaaaactgggcttacaattacctgacgatctctctgtaattggcttcgataaccttgatattacacgctatagcgagcctgcattaaccaccatggaacagccacgttaccaaattggtcgtcaatccatgttgttactgcttgatcagttacaaggtagacctgttgcacccggctctcgcctattagattgtgagttaatagtaagagaaagtgtctgtcggcttaaaagctag

SEQ ID NO: 299419 - DNA, 252 bp, Proteus mirabilis
atgaaaattacaacgccatcaatgttagccgctgcaatacatgacttgcgcaaacaaagtaaattaacccaagctcaaacggctgaacaagtcggtctcaggcaagcaactgtctctgaatttgagaacaacccagaatcaacaaaactcgaaacgcttttcaaaatccttgcctctttggaactggaactacatgtagtgaagcgaggaaaaaacctgagtgagggtaaggtttggaataaggagtggtaa

SEQ ID NO: 299420 - DNA, 144 bp, Proteus mirabilis
atgaaagctcaaatactatctgttgctatgaatggtgatttggttggtaaactaaccaaaaatactgatggtgggatgtcatttcagagactttgtcagcaatatgaaagccactttatcagtggctttgtttttaactggtga

SEQ ID NO: 299421 - DNA, 1152 bp, Proteus mirabilis
atgaaaatacttcatttgattaatttacaagggtttggtggtgctgaacgtttgtttattgaatatttaaaaaatagctcatttcaaaatgagatcttgtgcaccagtaactctttaaataaaaatctgatccctgagcttaagcaattcgatataaaatacgctaataaaatcgcttctactaaaataaaatatcctgcttttttaagaaaatatgtcttaacaaaaaaaatagaagcaagtaaagccgatgtcactctagtatgggatttcgtcccaagattatctagaaaacccaagaacactagcttggtctactatgatcatggttgttcttggcaatatcctatgagtaaaaaaacacaaatcttttttgagatgcttgattctgccattgcggtatctaaagcatctaaaagagtaatggaattaagatttaaaccaaaatttgatattaacgttgttatcaatagattacctcatatagcgtataaagaatcacgtacttttattaaacaaaatataattacattaggtgtggcctctcgacttgttgggttaaaaggtatcgggattgcaattattgctttgaaagaactaagaaatagaaatattccagcaaaactcattattgcaggagaaggagaacaacggagtgatttagaaaatctagtatctcaattaaaccttgaaaattcaattgagtttatagggtatcaatcagacatgtctgttttttactcaaaaatagacatttatttaagtacgccaatattagaggcatttggcctatcatgtatagaagccctatcaaacggcattccagttatatttcctaaactaaatggacaacccgaagcaataaaagataaatattgcggtataggtgttatacctacattatctattgatgaatatcataaattaacaaatttagatatcaactttccctataaagtttatgatcctatctcagatacattaatcttgccaaaattaatatctccccaaaactgtgctacggctataatagaaataatgaataattatactatctttagccaaaatgcgattgaatggtcaagagaaacgactgattacaatctatttattcaagaatttgaaagtacgataagagataatcaaatatag

SEQ ID NO: 299422 - DNA, 1062 bp, Proteus mirabilis
atgaaaaaagtattaattattggttataacttaggtggatttggcggtatggaaactgtttttaaaaaatctataaatatattggcatcgcatgctatccgctcagagtttatcttttttaatgaagggaataataaagttaatgatgattggttagttgattgtaaatatagaagactatcttctaagataaaaaatactaagttaagaagaatgagctatgcagttcagttggcaagaattcttaaacaagaaaaaccagatattattatctcttatgatacggtgtgttgctatattgctaatttagcaagaaaattttccagaagtaatgtttacatttactcatggatacatttttcattgcataatttatataagtctctttatttacataaagctgattatcatttatcgattagctcagggattacacaacagatgtataatttggggatagataaagaaaaaatatttactatttataatccagtacgagaaagtaacattaccataccaagagataattatactaggtttttgtatgttggaagaataattgcttatgaacaaaaaaatattaatgaattattttatgcactttccaaattagatggcgattggatgcttgatattgttggtaatggtaaggataccgattttttaaaaagcttagcactagaattaaagatatccgctaagatcaactggcatgggtggcaaaaagatgcttggtcgtatattaaaaaaaatgttaaatatacttcagcattagtactgagttctacatatgaaggctttccaatggtgctatgtgaagcttcttcttatggtgttttttgtattagttctaattgcccaactggtcctgaagatattataacgcctgaatcaaatggattgctgtatccagtaaaggatgtagatagtttagctaatcacttacaaagtattattgatgggcgtttattacctacacataatgaaataaaaaattctatcattaaatttaatgatgaaaactttgcaaatcgtttgttatctgcattaaagttgggttga

SEQ ID NO: 299423 - DNA, 420 bp, Proteus mirabilis
atgattgagtctattaaaaatattcgacaacatagagaaatacccctatctaagggggttgagtgcgaagttaaatttagcgaatttgatagttttattccttatttcgctttatcagatgattgtgagttattagggcgagaagtttatcaacattgtctttctggatattatggtgacatattaccgccactacctttaacgaatgaagaacttattgcaatagaaaagaatactcaacaaaccctgttacaagaggcattacataatattattctgcttaaagatgcacaagatggtggatatattgaaccggaagatattcctcgtttaattgtttggcaaaaatatcgttatgaattaacaaaagtagatttttctacttacccaaatattcaatggccacagaaaccagaataa

SEQ ID NO: 299424 - DNA, 810 bp, Proteus mirabilis
atgtcgaagaaatcaaaaccggttcgtctttgtgttgaaggggcgacaacggacgggcgtcgagttgatcgcgaatggttaacccaaatcgcgaaaaactttgatcccacggtttatggtgcgcgagtcaatatcgatcactataactattcatgggcaccacgctttggtgatgtggagtcggtgtataccgaggaaattaaagaaggggcattggcgggtaagttggcactgtatggtgtgatcaatccgacgcctgatttaattgaactcaataaaaaacgtcaaaaagtctatacctctgttgaaattgacccgagtttttcagataccggcgaagcgtatttagttgggctggcggtcaccgataaccccgcgagtttaggcactgaaatgctgcaatttagtgctaatgcacaaagtagcccgctttcagagcgcaaacaaagcaaagataacgtttttactgctgcagaagaaaatcactttgaatttattgatgaaaacccgcagagcgagaagccggggctttttagcattattaaagagatgttttctaaaaaacaacacagtgatgatgcgcgatttaccgatgtgcatcaggcggtggagctgtgcgcccaagaagtacaaaccctttctgcagaaattaccgcattaaaaaacgccgaccaatgcgaagcggtaaaagcgctcacgcaacaactcacggaattaaaaacccaatttgaaaatacagacgcctcgttctcacatcgtccgccggccacgggtggcgaaaataatagcgaagtgctgacggattgctaa

SEQ ID NO: 299425 - DNA, 1029 bp, Proteus mirabilis
atgagccgtaaaaataaaaaaagttttaaagcacaacaaacggcaaccgccaataacagcatggaagcctttacctttggtgatcccgttccggtattagataaacgagaaatttttgattatctggagtgtgcgcaaattgataattggtatgagccaccgattagctttgatggattatcaaaactgtttcgtgcggcgacgcatcatagcagtgcgatttatgtcaaacgtaatatcttagtgagtacgttccagcctaaccgttttctctctaagttagactttagccgatttgccctcgacttcttaacctttggcaatgcctatcttgaacgtcgtaataatatggtgggtaacttattaaaactcacccccgttctcgccaaatatacccgccgtggtgttgctgatgatagctattggtttgtgcgctatggctatgactcaaagccgtatgaatttaagcccggtagtgtatttcagttatacgaaccagacttaaatcaagagctatacgggttaccagaatatctggcctccacgatgtcagtgctactgaatgaagctgcaaccttgtttcgtgttaaatattatcgcaacggaagccatgccggatttattttatacgtcagtgacgcctcacaaaaccaaagcgacattgataaaatccgtaacgcaatgcaaaactcaaaaggccccggcaatttccgcaacctgtttatccacgcgccgaacggcaaaaaagacggtgtgcaagttattccattaagcgaaattgcggcaaaagatgaatttctcaatatcaagaatgtcagccgtgacgatatgttagcggcgcaccgtgtaccgcctcaaatgatggggatcattccacagaataccggtggctttggtgatgttgaaaaagcagcaaaggttttctttcgtaatgagttggcaccactacaaagcaagatattacagattaatgattggctaggtgaagaagtgattaagtttgataagtacacattagatgatgagtaa

SEQ ID NO: 299426 - DNA, 342 bp, Proteus mirabilis
atgagaaaattagcatataagttacctgttggtgacctagcttcacgtaatcaagctatcccccaacggcataaaattgaatcaatcattaatgataataatcttgtggaattagatttgagtggagttttttcaatatctgaatcttattcagatgaaatctttggtgttctagttatcaaatttggtaagcaacgtgttttaaatcaattaaaaattcggaatgcttcaccggcaatcctaaaaagtattgcaaaagttatacaacgtcgtgacaatgagattcaattaaagaaagtgtatccagaatataacagagaatattcatgtgtagcttgttaa

SEQ ID NO: 299427 - DNA, 975 bp, Proteus mirabilis
atggggttagggttaaaagatgcgattagatatgtgaatgtttttcatgaaaaaaacactaataaattaaacttatttagaggccattggtatcctggttttatttctgttttagcggcatatattaattatcatcgaataacagaagaaaattgtgatttacctaatttggagtatatgcaagcaattaatttgcatggagctttatggggtactgatcaataccctcaagaacgtataaatgttggtacaaattatagtttagtaacggctctgaaaagtgttgaagctgtagatacagcaacaggagctataaatggttgtgtgaggcgattaacgtttcccgatcgttcgccagaattttatcctcaaggactacttgatctaacccatgttatcggagagcttcatgataatgtttggtcacatggaaaatcaacgggtttttcttttgcacaaaaatatgcagttcctagaaccaatcgagaggagtactaccttgagttttctttagctgattgtggtctcggtttccttaaagagcttcaacgggctaagattccaaatattcgcacacatcaagaagctattgaatggtgtatacagcaaggaaattcatctaaacatgctgatttacaggatgattgggctcaacaactcccccaagactttatgggagggagcatgtttggtgctgacgtcgcaataaaagaaaaagataataaccatcaaggacttggtttatatcatctaattgaattagtaaaaaactataatggagaattgcatcttgcaacaggagatgtatgcttagatgtaattgatggtaaaatgagctatactaagctagattctatgtggtccggtgtcgccatttcttgtcgttttaaaattagtgaattggcgaaggaacatgacaatggagatgatgaccctcagcttatggatattatgagggcgttaggaggagagtaa

SEQ ID NO: 299428 - DNA, 1014 bp, Proteus mirabilis
gtgcagccgcgtattcttgaacatgatgcaatcaagcttttaagtaaaaaatctgtacgtaaattttttggtgtcggtgacgttcccagaacaacttcgccatttcgctatccaggaggaaaggataagctttccacttttttagctatttttttagtttacaacaagctaactaatgttcgatttatcgagcctttctgtggtggtgctggagcttcgctatctttactacttggcggatatgttaaagaaattcatataaacgataaaaactatgcacttttttgtttttgggatcagttattaactaataccgaagaacttcttaataaaatatttgatataaatcctacaattgatgcttggcatacccaaaaagaaatatataaatctagcattgaaggtatgcgcacgtattctcctttggaatatgggttgagtgtgttttttcttaatagaacaaatagatcagggattttaggggcggggcctattggtggcttgaatcaaacaggtaattacaaaattgattgtagatttaataagaaaacaattattaataaattagaaaaaattgtagaacataaaaataatatacatgtttataatgaagactgtaatatttttctagatagattcaaaaatgattcactttttgatgattttatttaccttgatcctccttatgtaaaagaaggtaaaaatatttactctaagaatttttcttttgagaaggaagatcacaagagactcaaaaattatatagtcgagcataataaaaactggttgatctcgtatgatgatcatcctttagtacatgatctatattcaaggcataatactagggctgttgagcttagttatgttatgaatcaagctaaaattggtaaagagctaatggttgcagattctcgattaagaatgcctgagtctctttttacttcacttgaaagtttgattgaggtagatacggacaaaaaacataaacggaaagaaaataaaaaaacggcctag

SEQ ID NO: 299429 - DNA, 1020 bp, Proteus mirabilis
gtggaactattaccttatcctgaaagtcatccaatccaagtaaagttagattggttagaattaatgtgtttaaggaatgaatatttcacttttagagtatctgaactaagaaatattttagagaaccttgaatcctttgagtcttctgatattggagtagaagacgctgccatagaaaatgaaatacaaagaattttagagcagcttcaaatcagaataagtattatgtctgactgttatccatttatatataatgaagaagattgttctattgacctagtacaggatagtatagaacggctacatatatcccagcatatttatctttattgtctttacttttcgcatatatctaagtctcgattactaaataatattcctgaaataaccaatacagatagagatctattacaaatcacagcatctgttgctttagctggtttgactaatggtcaaagtatttcttttggatttcctagacccgatagttcaggattttatcaagcattacaaagagcaataaatttgctaggtgaaggtatactaaaaccatttcaacaggttaatcgttacttacagacaattcctgtaaaagatgcaggaatcgatgttatctcttggggttctcataacgatactgacgaacttcctggtattaagcagattatttttgctcaagtcgctagtggaaataactggcgaacaaaacctgttaaaaatgatatagaagcaatccaacaatactggctagatcagcgtatctacagagttactgatgcaatagttatcccatttgatattgaaaatgatgatatgactgtacataaggatcaattacgagttttaagtaatgaatttggatgttttcttttccgtttaaggctcccgtctttattccgaaaagggttagagctatccatttctaagcctgaattattaatagagcgagtaaattcagttagtcatataagtgattttgttattgaaaaaacaaatttattacgagaagaagcggcctaa

SEQ ID NO: 299430 - DNA, 1116 bp, Proteus mirabilis
atgtctaattcaactccaaaaccatacacaacgagcaaaatagcgcccgaacacctactattggattataaaaatcctcgtttgtttacaggtcatgaatttgatgtaaaagccgagcaatcagagctagttaaatcattagctcgtaccgcagatctagaagagttaataaaatccatatcagaaaatggttatcttcctatcgagccgatggttattattgagcgtgatggtaaatatgttgttcttgaaggaaatagacgtttagcagcaataatgcttctaaaagacaaagggttagctagagagtgtaagattgtaacacccaaagagttaactgatgaagtgaataaatctttagaaaaagtatcagtatatttagtagaaaaagagtctgaagcacgctcttttattggatttaagcatgttaatggtccccataaatgggattctttcgctaaagctcaatttgcatataattggtatatctcagaacgagacaacggattaactatcgatgatataacaagaaagttaggtgatagcaataatactgtgcgctctattgtaagtgctatgtttgtattagaacaagcaaaaagagaagatgtttatgatattcataaagataaaatgtcacctaaattttctttttctcatttatatacagctttaaatagaagtgaatataaagaattcctagaattagaaaaagattggaatataacattatctaataatcctgtcccaactaaaaatttaggaaaactaaaagacttactcatcgggttgtatggttataaaaaagataataaattatctttaattagttctcaaaatcctgatttaaagcattttggagaggttctaaataacgaagggtcatatgatgcatttagagcgggtaatgatagtttatctgaattatataaacaagcaggtgacccacttcaacatataaaagatgcttttctagaaataaacaaacagatggatacaatatcatcagtgctagataggacagattctatagatgaaggcacttcaaattatattagccaatttaagaaaaaatatgaaaaagtaatttttcagatcagtcaaattcaggagtaa

SEQ ID NO: 299431 - DNA, 324 bp, Proteus mirabilis
atggaacagggctatgtcgatattcaagatccaaaaaatggggtgcatattaccggcactcgttttgctatcgtttattggaaaaaacaatttggattaattgaagtcactgtgattgatggtcgtgtgcgccgtgaagtgattgcgtggtatgactctgcggtaaatgtgacggctggcgttgttggtgcacatgtgagtcgtgttattagtgctgaaattaaatctatctctgaattgatagagataatgactcacgttgctaaactgtgcgaaacagccattgaaattattgatccgaagcatttaggcggtgtgcggtaa

SEQ ID NO: 299432 - DNA, 222 bp, Proteus mirabilis
atgtctaaagaaatggatttagcctgcgaacaatcacagttattgcttgataaacaaataaaagcagtaacagggcgttacataggtgtatcagcgtttgaatgtgaagattgcggtcgtgaaatacccgaaaagcgccgtattgcggtaatgggatgcactcgctgtgcagattgccaaacggtgtatgagctgaaatctaagcattatcggagtgtgtga

SEQ ID NO: 299433 - DNA, 207 bp, Proteus mirabilis
atgtctaaagaaagtgatgtaaccgatttaattaatgccgttcgagaagatgaaagaaaatctcgggcggttcttttttctgctcgtttgcgcaaattagcatcaaaagcactgagtgaacgaatggagccttcacaagtatttcaattattagaaggtgaagccgagtctatcgaacatcaagcgcaggaatggaattatgtctaa

SEQ ID NO: 299434 - DNA, 252 bp, Proteus mirabilis
atgcatattcgaatttaccaaaagaacaacgtgacgcatggcgtttatgggttgggctataagatgcaggtgaaacaaattacagagcatagttttatgtatcgcggtttcaccattattaaactgccaagaaaagcagtaacaccgataactcgttatcacgtttggttagatgatcagtcattcggtaagtttgatgcaatggcagaagcaacacattatatcgacttattaaaaggtgatattcaatga

SEQ ID NO: 299435 - DNA, 273 bp, Proteus mirabilis
atgaacaaagaaatgatcaatgtgaaattccctgtaaatgcggtgccactcgcaaagtttgcggaattaatagggaaaggttacgaagccactagatcaatggctaaagcgggtaagttacccattattgaatttcgtgatcctatgaagccagatgctagagccggtgaactatgggtaagtatcacggaatttaatcgcggaatggatgatgcatattcgaatttaccaaaagaacaacgtgacgcatggcgtttatgggttgggctataa

SEQ ID NO: 299436 - DNA, 294 bp, Proteus mirabilis
atggacgtatctcaaaaaattaaagcagtaagacaagcagaaaaagtaacgcaacaacaactatctgatttagcaggaatatcattaagcactttaaaaaaaatagaggcaggatatcaggaacccagtgtcacaacgctttcaaaaattactaaacacccctcatttgaaaaatatgcactttggttaattagtgacaaaacactacctgaagctggccaaatatcaccagccctcgcacacagtgggcaagagaaagaaacattaccccactcagaaaagaaaattggttag

SEQ ID NO: 299437 - DNA, 981 bp, Proteus mirabilis
atggcaattaagaagctcaatgatggtcgttatgaagtggatattcgcccaaacgggaaagatggtcagcgagtcagaaggatatttgatcgcaaaatagaagctacaaattttgagaaatatacaattgtaaacgctaagaaattttctagcgataaagtccaatcaggaagaattcgattaagtgagctacttgataagtggtggttatatcacggacaaacattaaaaaacggatcgatagagaaaaggcatttaattaaaacagtgaatgcgcttggtgatccaacaatgaaccaacttgataagcatgcattactagaacatagaggaatgcgcctttttgatggagtgagtccatcaacgataaatagggatatgtatcgtctatctggaatgataagcgcattaaaaaaactcgaaatatacaaaggtgataacccattgagaggattaccaccattaaaagaaaagccacctgaactcacttttttaagtgatgatgaaatatcgaacttattaaactcattatcaggagactatcgccgtatcgcattactatgccttagcactggtgcaagatggggtgaagctgaaatgttagatagcaagcacgttcatcaaggaagggtaacttttgcccatacaaagaatggtaaaaaaagaatcattccaatttctgactctcttgaaaaagagataaaaaccagaaaaacaggaaagctatttcatgttgattacggaaccttccgaaaaaaactaaaaatagtaaaaccggatttacccgatgggcaagcaacacacgttttacgccatacgtttgcaagtcattttgtaatgaatggtgggaacatcgtagcactgaaagaaatattaggtcatgcgagtataaaccaaacaatggcatacgctcatttagcacctgattatttgcagttagctataaaattaaatccactaaaaggtgatataaaagtttaa

SEQ ID NO: 299438 - DNA, 1044 bp, Proteus mirabilis
atggaaacaatcacagtaactagcccgttatttccaccgttggaagagctagaaccttacttacaagatatatggaagagaaaatggctaaccaataatggttactatcatcaacgccttgaagaggcactatgtaaatacctaaatgtaccttacattagtttatattcaaacggaacattagcgctaattgcagcaataaacgtcttagggctgaaaggtgaagtaatcacaacgccatatagctttgtcgcaactagtcattcattactacatagtcatattacgcctgtctttgtagatatagagccaaatacctataatatagatcccgataaaattgaagcagcaataaccgataagacaaccgcgattttacctgttcatgtatatggtcgcccatgtaatcataaagcgattcaaaaaattgcagataagtataaccttcccgtgatttatgacgcagcccacgccttcggggtaaaagaaaatggtaactccatattaaatcaaggtaaattatctattttaagttttcatgcgactaagacttactctactattgaaggaggtgcgatcatttgccatagcgcagaaatgaaagaaaaattagataaatataaaaattttggttacacaaatgaaacagaaatcgatgagctaggattcaatgcgaaactcaatgaagtacaagctgcatttggtttgctaacattaaattatatagatgtatctggtattaaattacctaatataccaaaagacttaacttggaattattcttactaccctataataatagataaagacaggtatggtaaaacaagagatgaactttatttagagttaaaagaaaataaaatattaagtcgaaggtatttttatccattaataactgatttcaatatttataatcaatataaaacaaaaacccctatcgctgaaaaaatatctgaaaatgttatttgcttacctatccatcatttattaagtaatgatgacttgaatagaataattaatattattaaatatgactataaataa

SEQ ID NO: 299439 - DNA, 1041 bp, Proteus mirabilis
atgactataaataaactaattaatcccttatcagaagaagaaataataaaaaaatgggattctgaagaagttttcgtaagtgtgatatgttgtacatataaccaagaaaaatatatagaagatacaatacttggggtactctgccaagatacgccttatagatatgaatttattatacatgatgattgttctacagattctacatcagacataataaaaaaatatgcagataattatccgaaaataataaaacatattattcctgctaagaatatttattcacaaggattaaaaccatcaattaatgctttttctttttctattggtaactatattgctctatgcgaaggtgatgatttttgggttgatgataaaaaaattaaaaagcaagtggatatattagaagaaagaaaagatattgatatttgtttcagtgccgcatatacgttagagccagatggcaaagaaaatataatagctcgttacaataaaaatattttcgttgcctccttacctgaagttatcaggcaaggaggagcgtatatgccaacagcatctcttttatttagaagaaatgttgcagtagaatttaagaaatattttgaaaaagcacctgttggagattattactatcaaatattaggtagtataagtaacggtgctgtatacttacctgatatcacatgcgtatatcgtatcaatgcattaggatcttggtcatcctcgagactaatcattgatgaaaataaattaataaaagaacttacttcacatgaagagcatcttttgaaattaataaaattaggtgcaaacaaagatgacataaattttgctatttctgacttatacagaataagatctaacgaatgttttttattaaaaaaatgggatatagcaaaaaaactcatagaaaaatcttggttattacataaaaaaattaatcgaaatcagcaaaaactgcatcaatatagaaaatttttatatattcttcactatagagaaaaaataaaaaaaatgataaagaaaataaaattaaggtga

SEQ ID NO: 299440 - DNA, 420 bp, Proteus mirabilis
atgtactactatagccctaaaaaaaatgaattttaccccgaacaacttaaacaagactatttgaatatgggagtatttccacctgatgtaattgaagtttctgatgaagtatggcttgagtttgcggggaatttagctccagaggggaaaatacgaatcgctgggaaaaacggaattcctatatgggaggatgtaccgcctttatcagagttagaaataatcaaaactagaagaaagaaacaagaaatttgtttaaatgaagtaatgtatcatatccagttttggcagactcaattaatgttaaatatgattaatgaagaagataaaaaaaagcttatggaatgggtaaaatatgcacaagcattaaaagatatagatctggaaaacagtgaggtagaatttcctcaaaaacctgaataa

SEQ ID NO: 299441 - DNA, 1455 bp, Proteus mirabilis
atggaaaagaaaaagctcacaacggcggctggtgcaccagttgtagataataataatgtaataacagcagggcctcgtggtccaatgttactacaagatgtctggtttttagaaaaactcgcccattttgatcgtgaagttatccctgaaagacgtatgcacgcaaaaggctctggtgcttttggtacatttaccgtcactcacgatattaccaaatatactcgagctaaaattttctctgaagtgggtaaaaaaacagaaatgtttgctcgcttttcaacagttgcgggtgaacgtggtgcagctgatgctgaacgagatattcgtggatttgccttaaaattttatacagaagaaggtaactgggatatggtgggcaataatacccctgtattctatctacgtgatccacttaaattccctgatcttaaccatatcgtaaaacgtgaccctcgcactaatatgcgtaatatggcttataaatgggatttcttttctcatttaccagaatcgctacaccaattaactatcgatatgagcgatcgtggtttacctttaagctatcgctttgttcatggttttggtagccatacttatagctttatcaataaagataatgaacgtttctgggttaaattccatttccgttgccaacaaggcatcaaaaacttaatggatgatgaagcagaagctttagtgggtaaagatagagaaagctctcagcgtgatctttttgaagccattgaacgtggtgattatccgcgttggaagttacaaattcagatcatgccagaaaaagaggcatcaaccgtgccttataacccatttgatttaacaaaagtttggcctcatgctgactatccactcatggatgtcggttactttgagttaaaccgtaatccagataactacttctctgatgttgaacaagctgcatttagccctgcgaatattgttccaggtattagtttctcaccagataagatgttacaaggtcgtctattctcttatggtgatgcacatcgttaccgtttaggtgttaaccatcatcaaatccctgttaatgcaccaaaatgcccattccataattatcatcgtgatggtgctatgcgtgttgatggtaatagtggtaatggcattacttatgagccaaatagtggcggtgtgttccaagagcaaccagactttaaagagccaccactttctattgaaggtgcagccgatcactggaaccatcgtgaagatgaagattatttcagccaacctcgcgcactgtatgagctattaagcgatgacgagcatcaacgtatgtttgcgcgtattgcaggcgaattatcacaagcaagtaaagaaacacaacaacgtcaaatcgacttatttaccaaagttcaccctgaatatggcgctggcgttgaaaaagcgattaaagtgttagaaggaaaagacgctaaataa

SEQ ID NO: 299442 - DNA, 384 bp, Proteus mirabilis
atggtttgtgttgtaaatgtacatgctgatgtagaaatgccggaagtcgccaataaatatgctaaagcaatagaaaactggaaaaatactggaatattaccagatagatttggaaatgaaggccaatgggaaggtaatgcaaggttatgtggttcatttgtttataagcttcacattcgattgccatcagagccttcttggaagaaaacaaaaccacaaatagataggcattcaaatcattatcttgttttttcaagacattggttgaattacgacaatatacaaattattggcattatgtcaccagatggacacgaaaaggcaaaaacttcttatatggtagaattagagcgacgagctgaagaatttcaaaatagttattaa

SEQ ID NO: 299443 - DNA, 621 bp, Proteus mirabilis
atgacgaaaaaaacaactcagttaaccatagctacgattgcaacaagtttaatggcttcacttgcacctgtgccggcaaagagtatttcacttaatacagtcacgtctgttgaaaaacaggctacacaagaaaaaatgaaagcactggcgtttgaattgtcccatggtcaaatattcttacctttagatgaagcttctgaataccttaataacatcaatatacagcaacgcattctacttgattcgctgaaagagaaacggaaaaatagatgtaaaggtcctctttttactaatgttacgcaagtaaaacgtttgtgtatcgacgggcttgaacgtcacacacaaattaaatctgcagtacagcaggtaatgagtggcaacaatatctataatttatttccagacgatttagaacaacaagccaaatataaaaaaagcctacttcagtttggtttcgctgtggctcaaggcgaatttattttgcgagatatcttatcctgtattgagcaatgttcaatccccgaaaaaactgttcgtttagttgatatgcccgaccaaaaagaagtcagcgcttggattatcgctgaacatagtaaagttggcgttgttgacatggagtag

SEQ ID NO: 299444 - DNA, 1215 bp, Proteus mirabilis
atgaatcaaataaaaaaatcaagtaaactcgaccatgtttgttatgacattcgaggaccggttttgcaagaagcaaaacgtctggaagaagaaggtaataaagtattaaaactcaatattggtaacccagcacctttcggttttgaagcgccagatgaaattttagtagatgttattcgtaatctacctagctctcaaggctatagcgactctaaagggcttttttcggcacgtaaagccatcatgcaacattatcaagcccgtgatatgcgtgatgtgactgttgaagatatctatattggtaacggtgtttcagagcttatcgtacaagctatgcaagcattattaaatgatggcgatgaaatgctagttccagcgcctgattacccattatggactgcagcggtttctctttctgggggcaatgctgttcattacatgtgtgatgagcaacaaggttggttccctgatttagaggatatccgtagtaaaatctcccccagaacgcgcggtattgtgattataaaccctaacaatccaaccggagcggtatatagcaaagagattttgctagaaattgttgaaattgcccgccaacacaatttgattatttttgctgacgaaatttatgacaaaattctttatgatgatgcccaacatcactctatcgccgcaatggcacccgatttattaaccgttacctttaacggtttatcaaaaacctatcgtgtcgcaggatttcgccaaggttggatggtacttaatggcccgaaaaaacaagcaaaaggctatattgaaggcttaaatatgctggcatctatgcgcttatgtgccaacgtaccgatgcaacacgcgatccaaactgcattaggtggctatcaaagtatcagtgaatttattctacccggtggccgtttatacgagcagcgtaaccgcgcatgggaacttatcaatcaaataccaggcgtttcttgcgttaaaccaatgggagcgctgtatatgttccctaaaatagacttaaatcgttatagtattaaagatgaccaaaaaatgatcctcgatttactattacaagaaaaagtcttattagtgcaaggtactgcatttaactggccccaccctgatcatttccgtattgtgacactcccgcgtgagaatgatttagagatggcgattcaaaaatttggtcgttttattgtcggctatcatcaatag

SEQ ID NO: 299445 - DNA, 192 bp, Proteus mirabilis
atgaataaattaataattacctctgttgcaatattatttttatccggttgtgatgagttaaaagaaggctcagctatcgacatgtatcatgatgaccaaagacatgtgacatgctatgtgtataagtcaggttatgcaggaggcatttcctgcatccctgatgatcaactacctaatcatgataagagatag

SEQ ID NO: 299446 - DNA, 201 bp, Proteus mirabilis
atgttgtttgtggtgaggtatggaatgaaagataaatattatgctggactagaaaactacaaagattgtattgagattgaaccgacaataaaagattgctttgttttaaatactccatcttggaatatggatgtgacaaaacaagacttaattgacatcagaaatactattaccgaaatactagaggctgataatgaataa

SEQ ID NO: 299447 - DNA, 237 bp, Proteus mirabilis
atggataaatcaagacagcagtttgaagagtggcgcggtaagaataaatcatcaacgataaatctattcgatgtatggcaagcatcacgcgagagtttggaggttgagttaccggttaaattaccaactatggatgatgattcgtttgaggagggtttgtgtgaaggctataacaacgcgatagatgatttcaagcaaatattaatcagcaacggagtgaaaataaaagatgaatga

SEQ ID NO: 299448 - DNA, 534 bp, Proteus mirabilis
atgaaaattgaacaatctcaagttactaagttagtaataacagatgttgagcgacacgaccctatccatgtttaccttgaggattatggagataatcaaaacggtcgtgtcacaattagcgaatggggcaattcatggtcttgcttttggggctcgatgggtagctcactaattaagtttattcataggattaacaatcactactggataggcaagttagattctaatttaatctatgagatagattgtgataacgatgcaaatgctaaatacgctaaaaagcaagttatcaaactacgcaaagatgatgaaatagataaatacgaagcaagggaatattgggatttaatcgaagcatcagacaatgttaaagatgagtgctgtaatagttttttaggcggtaagttacttagcttgtttggtgatgatgcttggtataacgattggcccactatacctaaccctcaatatctaagaatggaatcacgattaaacgctattcgtgaagcattaaaacaaataaaggtggagtga

SEQ ID NO: 299449 - DNA, 495 bp, Proteus mirabilis
atgaaagacagaatcaagtttaacgatgccatgttagcggctgtcatggatggcagaaaaacgcagacacgcagaccaattgagccacaaccaaaagtaaccgaagatgggttacgctatcttagcgcatggcaagatggttacacactatcagagcaagcatgcgcagcatggcggcatggatttgttgatgttgattgcccgtacggtgagattggcgacattatcaacattgcaaacaaggacggtaatatcaaaggaaaaattgaaattactgatatttggttgcaacaggttcaggaaatatcacagcaagacgcaatgaaagaaggtgcaccactaaatcacgcttccattgacactgtatcgcgtgagtatggtttccctgatttttcgcgttcatggttcgttcaaatatggatagatatatacggaaaagacagctgggtaagcaacgaatgggtatgggttattgagtttaaaaaggtggagtga

SEQ ID NO: 299450 - DNA, 309 bp, Proteus mirabilis
atgagtgaagagataacctgctcaccagttacaggtttatttgtactgtatgcaattgatggtgaatttacatggggtgaggatcgaaacattgtttttgaatccgaaggcgtccctaaaattaaaaacccatatccaatatattttgagtcaggatttgatgataacagagctcgttactggactcgaaatattaatgacgcatatgtatttggtgatttagacggagctgtaaatatgcttataaaaaccaccaaaaagtgctcgccagtatctatcagaaaactagataacccaaacgaagattag

SEQ ID NO: 299451 - DNA, 276 bp, Proteus mirabilis
atgtcactgactatacgttacacctatgcagatatgaccagtagaaaccgaaataatggcacggaaatagcctttcagaatcttaacgatgtccgcattgaaacggagtcattcagagaacttactcaatattaccaaccagagccgtcagaagtcgttgattacatcattaatcagtatgacgaaaagtcactcgcagcagctattcatctctcaggacgaggggaagtagtcgcgaagatactcaatgagttgtatttcaggagggttgcgtga

SEQ ID NO: 299452 - DNA, 165 bp, Proteus mirabilis
atgccaatgttcaaagtggcttgtaaatggaatggcgagccttgggaaaaggatattgaagcagaagatgaaggtgattgcgcagagcatatttatttatgggctgtaattggagcaaaagccaatatcacggaattagatatcaaaaaaatacctcagcagtaa

SEQ ID NO: 299453 - DNA, 321 bp, Proteus mirabilis
gtgaaaaacaataaacatgtcaaacgtaactggcatattgaaatcagcgatgaaaatttcgagatagtaaacagtaatggaaaattagtatgcaccctacttgatcataaagatgtatttagaaatgcaattttagtttccaacatcccatttttactaaattcattagtagatatttttctggagctaaaaaggcttaataaaattgacgggttgaatggtcttaagggaaatacggtgtgggatgataatagtgatgaccttgcattagccagagatttgattgaattttgtcacgttaaaattccaacagaaaattag

SEQ ID NO: 299454 - DNA, 348 bp, Proteus mirabilis
atgtttcgcatagacagaaaaaacaacattagagtatgtgagggattctcagcgtggggttacaagtggaaaatagatgattgttttgccgatactgaatctttccatatagttcaaaatgacatagataaggagattgtttctgtaaacatatctattgctggtttagatggttgtcacatgattatggcctcacatgacactttaaatattacatctaaactactaaataaactaaagaagattgttgatgacaacccaaaaacaaaaacaaaagagctcgagtgcattataaaaaatgccgaatgggtagtaggtgttattaataattcatttgggagtaattaa

SEQ ID NO: 299455 - DNA, 471 bp, Proteus mirabilis
atggtttggttgtttacttggttacttttacttttgtttgttcctgattcggtatctcattttgttaatgggaaaatacacttttttaatatcccttatgtcggcgttaccctaatcctgatccctgtttcatttttcattagctattttttaaagtggttgtggtcttcattaataggtatgcacagaaatataaaagagtcgctaaaattcaggcgaaccaaaatagaaattcaatcactttcagagagagaaaaagaaattatcttgtgtttaattgatggcgatgatatagacgactttgaaaatgatgaagatggtatttatgtgtacagccttatgtgtaaaggtatcattcatgagtatcatgatacctacataactaaatacaaattagattcttactaccgaaacgcaattatcagacttttagttgaagctcatgaggcggaacagaaaatcaacagataa

SEQ ID NO: 299456 - DNA, 312 bp, Proteus mirabilis
gtggaaatttactatcaaccaccaaagaaatttaaaggcaatccaacaccagttagcgttaagaaagttaacagtaactcattcaaggctaggcaatatgctagatatgcatctttcagagctaacaaactgaaagaagaagagattgctaaagctaactcagtgaaagagaaaccagaacgccctgttctctctcttaaaccaacaaagcattatccaagtggagataactgttgcttacctaatgtagcagtattttcaggagttaaaacaaagcagccgagcagtgagttcggggtgacggcgaggtaa

SEQ ID NO: 299457 - DNA, 948 bp, Proteus mirabilis
atgaataaagaactcaataaaaaaactttgtctatagatggcaggatttcctttatcaaaaataaagtagactcattaagtaaatctaactctacttttgctgacaggctgtatctttcttcgttggagtctcacttaagcgatctcaacggaattgctttaagagagtcgctacaccacccttttagggactttcttgagctaaggcttaaaggtgcagtagtagacttaggcactataccattggggattttggctacgttctctagaaatctagagggtttaattcttaaagctaccaacaaaatatcttcggggaaagatcaaaggtcagcccctagcgctttaaagcaaactatagatttaaggctagcaaacataagccacggctctactagattaggcgtttcgttcaactcaaatacagctgataatggcgaaatgttcgagacaacaacaagtaaagctgttaatgatattttcactctattagaatcggttagtgatgatgattttattaacaaaatatctgaaattggctataactcagcagcatcgctgagggaaataattaatgaatgtcgagataatgacatcacatttgatatatcttggactggcccattcagtaacggaacaaaaaaagtcacagttaataaaaaccatatagataggcttcatgacaggcttaataccacccaagtcgtcaaacctagaaaagaaaaaatatctggagaattagcagtcctatccaaatatggaaagtttgatgtactacttgatgatggttcaagaataaaaattgatttcccagtagataagcttgacgaaatacaacaaacgcataaagtaggctcaagaataacacttgaggcagaagtgacagaaatttttaatacttcaatgcatcagtccagacagaactatcgactcatatctataaagtaa

SEQ ID NO: 299458 - DNA, 420 bp, Proteus mirabilis
atgaattgtgaagaaatcaaagagctttgtgttaatgcctttccagaatcaaaacgcaggggtatgttgtataataatttccaagagttactattgggctttaatagaataaatgccgttattcattgtatatcagaaatatgggttgacggatctttcacaacagagaagccagaacctgatgatatagatattttagttgttttagatccactcctgttaaatcagtttcctgaagaatatcacggagctatttcgcaactcctcgatagaagattcgtaaaattaaattataatattgatgtattaccactatacaaaaacacccctgattatgattcaatgagaagttattggcgtggctggtttggttttgatagaaaagaatcccctaaaggtttgataaggatttatctatga

SEQ ID NO: 299459 - DNA, 678 bp, Proteus mirabilis
atggtacaagcagaaaaagtgcggaatgaattttcccgaaggctagcacaggcctgtaaagatgcgggattaaatgaacacggcagaggggctgagatagtaaaagcccttggtgtctcatctaaggctgttagtaaatggtttaatggggagtctttaccgcggcaagataaaatgaacgcgttggcgaaattcttaaaatgcgatgttatttggttgcagcatggtcatgaaaatgtaaataacgctaatgtaagtaaccctagaccttatcgaccagctcctaagtaccctgttattagctttgttcaggcgggtaattggactgaagcttgtgagccatatacgttgagtgagatcgatgagtggtacgaatcagaggtatctgttcaaggttccgctttttggttgaaggttgaaggtgattcaatgacagcgccaacgggtatcagtattcctgaaggatcattggttctagttgatacaggaagagagcctataaatggaagtttggtgatagctaaactgactgaaacaaatgaagcaacattcaaaaaacttgtcttggatggtgctaaatatcttaaagcactaaatcctgcttacccagttattacgatcaatggcaactgtaagatcattggtgttgttgttcagatgatgatgcgttttgtgtaa

SEQ ID NO: 299460 - DNA, 228 bp, Proteus mirabilis
atggatgatttacgtaagccaattactgacattggcgttgccagagtagcaaaggcatgtggagtaagtgagagagcggtttacaaatggattaacaatggttttctaccaaaaacagaattctttggaaaaaccaattatgcaaaaacaatccaatccctatcaaaagggaaagtaaaagctgaatacttactatcagttagccagaaaaaattacttgcaccttag

SEQ ID NO: 299461 - DNA, 327 bp, Proteus mirabilis
atggaatacacaaatacacgcaaacaatttaataaattcatttcaaatcacttgatggcttcggcattacaggcattgagaaataaaactcagtcggtggtcgctaaaacattaggtgttcatgactcaactatcctacgcagaactgaaaaatatcctgagatatgcgagacattagtcgcatcagggatagtcgattttgtgatggaaggtgagaggaaaatatcagaggaagaataccgctttttgtggaaacaaataggtgagctttctcagatgagaacaaaagaaaacgccccgattgttggagcaaccgaggcgcattaa

SEQ ID NO: 299462 - DNA, 687 bp, Proteus mirabilis
atgaatcaattgaataacttagtaaatactggcgaaccaacgatgagtagtttagaaatttcagagttggttgagtcaaggcatgacaaggttaaacaatcaatcgaacgccttgcaaaacgaggtgttatcagactccccccaatgggggaagttaaaaatcacttaaaccagacggtttctgtatatcaaattaataagagagatagttacgttattgttgctcagctatcacctgaatttacagcaagactagttgatagatggcaagagctagaatcaaaacaatctctcattcctcagtctctaccagaagctttacgtctggcggcagacttagcagagcaaaagcaaatagcagaacagaaattagcaattgcagcgcctaaagctgaatttgttgatcgctacgttcaagctactggcttacttggttttagagaggtgagtaaattactaaaagtgaaagagaacttctttagagagtttctactttcaaaaagaattatgtacaagttggctggaaaattaacaccttattcagaacaccttgacgcagggcgttttgatgtaaaaacaggtgagaatcaaatcaatggtcacgcatacacacaagttaaatttacccctaaaggtattcagtggatagcaggtttactggctagagagcaattggaggcagcatga

SEQ ID NO: 299463 - DNA, 711 bp, Proteus mirabilis
atgagcatgatattaatggcgaaagccatgcagttaaaagtaggtaatccatcaaggaagctcgtgttaataaaattagctgataatgccaacgataaaggcgagtgcttcccgtcttatcagcatgtggcagatcagtgtgaaatcagcagaagaagcgttattaatcatattgatgcgttatgtgagcaaggtttggttagaaaggtttatcgcagtggagaaaaaggtaattcatctaatgtgtataagttaaatttagatgatccgatacaggagtcacctagtgaaaaatctgcactaggtatggtgaaagatttgcaccaccctagtgaaaaatctgcaccaccccctagtgaaaaatctgcacccagaaccagtcactcttttgaaccagtcaatgaaccaaagaaaaagggatttgatgcgaagaaggaatctatccctgactggttagatcgtgaaatttggtttaactggattgattacaggaatgaaatcaaaaaacctttcaaaactaaaaagacctttgagttacaggttaagtttttactggaatgcctcgaagagggttattcacctgaggaaataattaatcaatccatagctaatggctggcaagggctgtttaaacctaaaaataaccatcaggcaataacatcacagcaaggtagctggaacacgccggaggcatggagggatttcatttga

SEQ ID NO: 299464 - DNA, 675 bp, Proteus mirabilis
ttgaaaaccaatctaatggctgtaatcaataatcgtgatgcgggcgctttagccagaatgtcacagggagatatcacaaaaaaagtagtcaattcaaacgctgaaaagatggttgactcactattcaaaagtttaaagcaactattccctgcatccgttagtaccgtttttaaaaatgcaagtgatgaaatggacgcaaaacgacaatggatcgccgcctttgcagaaaatggaattactaccagagagcaacttcaaaatggcatgcgacgcgccagagcaagtgataaccctttctggcctgctgttggtcaatttatcaagtggtgcaaggaagaggattatgtagctcttggtttgcctgacgaggatcagctttacgaactctatcgagaatactgcaaaatgcgtggctggcgtgaaatgaaatggccctcaagcgcttgctactggatggttactaaaatttactctgagatgcgaagtaaaagcctaacggatagtgaggttaagaagctttgcgccaaagagttaagaaccatgactgcaagaatcaaatcaggtgaaactattccagcgccagtgcttcaagtcgaacacaagatcacaccaacaagtcgtaataaatcactatcaataatcgccaatttgaagcaaaagcacggcttcagatag

SEQ ID NO: 299465 - DNA, 231 bp, Proteus mirabilis
atgatcaaacacagatttggtaaaccttatgttagacgtttacgtcctgatgatatccctgaatcagaacaagctaagtgggctattagctatataaatcatccacaacaccacttatcaaccactaaagcgtattcggtttgcatgcatgggtttaaaggtgtttttcaggtgtgcctatgcaagagatcactaatgaagttagtaaaaatgacgcagagtgaagattaa

SEQ ID NO: 299466 - DNA, 336 bp, Proteus mirabilis
atgaacacagaaagtttatttgaaaaatgtaaacggctcacagaggaaaacagagagctgaaaacagacagaattatctcaagacaaaaaatatcaaaccaacgattagaaatcgaatcactgcagcgagaactggaaattaaaaacttcgatgtttcttgcatcccaccaatacaaatcaccccacaagttactgaatggcttcttgagtacggaatgccgtgggaagtgttttactgtgacaaatgtaaaagttggtttactgagttagacactttattcccttggggtattgataacagtgggtgccagtgtgataagcaagagggtttttag

SEQ ID NO: 299467 - DNA, 204 bp, Proteus mirabilis
atgaacttactaacacataccgtcaccaaggttttaggtgatccggttcgtcacacttacaaaagcgatgatggaacagaaaatgaatattacctaacgccagttgagtgtgattgctggggtaatatttctaacacgaaagtgatgacaaatactcttgagcaagccaaggcaattaaagtcggctacgagtgggaatcgtga

SEQ ID NO: 299468 - DNA, 258 bp, Proteus mirabilis
atgcagggagctaattgggttaagtgtagtgagacattgccagaactagacgcgccagtatttgctggatggttcagaggtaatggagagtttgtataccacgttttcatgcgttctgatacatgtggagaaggttggatttggtcgcgttcttacagtcattttatcagcgatagtgatgagtttattgaagatgataattacccaataacgcactggatgcctttactactcccaccaatgccagagggtgaatga

SEQ ID NO: 299469 - DNA, 444 bp, Proteus mirabilis
atggaaaacttctgcctacacgaatcaacgaaaaagttatttgatagcaacgtaattgagctgcttaaatcctacccaaaactcagcgtcaccatcaagccttacaaaccaaaacgaagcctctctcaaaactcattaagccatgtttggtacaaagaaatcagcgactacttaattaggtcgggtcgtgagttctgcactgaagcatgggtgaaagaaagcttaaaggccacttaccttggatttgaagtaactgagtacactgatgtgttaacgggtgaaaaaacgcaacgagagacacttaggcacacttcaaaactagataaaggggaaatgcatcacttcttacagagagttgaagcatgggcatcacagttcggtttaatactaactactccggaagatagcgagtatatgaaattgaaaaggaaacaggatgagtaa

SEQ ID NO: 299470 - DNA, 207 bp, Proteus mirabilis
atgagtaaatacgacagaccatgcaaaggcgtgacaatcgatgtgtatgacgttttaaaagcctttgaagtaactaacccagcattgcagcatttaattaaaaaagctctctgtgctggattgagggggcataaagacaaagaacaggatttgtgcgaagtgctgacatcggcaaaacgggctattgagttggagactgagaaatga

SEQ ID NO: 299471 - DNA, 441 bp, Proteus mirabilis
atgacagacgagcaatacaaaaattatgcgaatgtgatagtagcagctcgcgaatttatatcattcaaccataaaactatctcatcagtagttggtttgacacctcaccgctcagggacggttatcagaaaactacttgaatttaaatgtatccgagaggttagtagcgaaagagggtctggtaccaaaatgatccgcaactactctgttagagatgatgcaattactcgactgaggatgcaatttgaaagagagcgtcgagccaatttaccagttttccctaaggttaaaaaatctgaggagaaagagccaaaacagctaaaagagcaaaccgacgactttaaatgtggattaaagtttgccgaaaaggcggatgtctcaggcatgggtaatccaatgttaatgaagtttgattcattattgagtgaggtgagagtgtga

SEQ ID NO: 299472 - DNA, 294 bp, Proteus mirabilis
gtgagctggaaaagtcaaattgaaggcctgaatattgatcagttaaaagattttagggaagcgataggcaaagcaataacgcagaaagagcatgaaaaaatgaggttaatatggcgagtacgcaatcgctggcaaacctttggtgactttcgtgaagatgattatttaggagctgttaaccgtctcgtagaaactgccaacaagctcaatgctgacggtgatacttactcaatgtcactctcaattgagcaatggcggatccctgaatccgaatatgaggattggtttaaatga

SEQ ID NO: 299473 - DNA, 756 bp, Proteus mirabilis
atgaacctagaaagcgctgttaaatatcacttcgccaaaacaacatcaatatcagatgcgcctaactcaacatcgccagatagattaaccggtactgatgttatgggtgcttttggtatgtgtcagagtaaagagtcattcggctattcagcattcttgggtaagatgggaataagccgaaatgacagagacaaagcgatacaacttttaactcggcatgcattgaatcattgcgacaaggttccagccttacgcaagctcgatatgaatgttaagcgaaaggtaatgcaaacactcgcaaaattcgcttatgcagattattgcagatcagcatcgagtgttactgagtgcgtaaagtgcaatggatcaggttttaaggtaaaggcggttaaggttaaaaaagtctttggtaaggaagttcgcattattgatgacaccgagtcatgcgcttgtgataagtgtaacggtaaaggttatgtttcttgtgcgtgcaatgactgtaaagggcgtggtatggcaatagacaaagaaacgctaaggttaaccggtgaagctgtcagtatgccttgtaagcgttgttctggtcgtggttacgagcgaatacctgcatcaaaggcttttcaggctgtgtctcatttagggattacgattgatcaatggaagcgttcagttagtaaattttatgagtctttagcagttgagtgtgaaaaaggagaaagtaacgcagattacatactaaaaaaggtaacaaattaa

SEQ ID NO: 299474 - DNA, 345 bp, Proteus mirabilis
atgtctcatcacttaatagcgaagagcggaataggtcagccgtggattctgaaaaagttaaaacggttatcaaaactgttcttgtcaataatgattgcgccaatactactattcctagtgacgctcttatcaggatgcacgactattcagaaagaatacgtgccagtggaacacatagcgataccggcacacctaaccgctgattgtctattgccctatatacccgaacaaatgacatggggagaatcgttaatgttaaacatctccctgttatcggttattgagcaatgtaattcagacaagaaagcaatacgggaaattgaacaacaacgagcctctaagtaa

SEQ ID NO: 299475 - DNA, 783 bp, Proteus mirabilis
atgattaaaatcgtacctatgaagtatgacgaaactctgatcccgtttaatggggattgctgggttaatgccactgtggcagcaaagatatttgataagcgaactcttgattggctaaggctagattcaacaaaagagtacgcaaaagaaatagggcaagaacttgatatcgaagctataaattctaaaggtgagatttctcaccttttggtcaaagtagagaaaggcagatatggtggtacttggatccatcctgaattagtgattgagtttgctagatggttatcccctaaatttgcccgtgcttgcgacaggcacattaaaaacatgttgatgtcacagaatatgacattaactgaagatcaagtaattgggctactgacatacaaagaagctactgagtgggaaaagagatttcaagaaccctattatagagcgctatcaaagatgtcagggactccttattttggtcatgttggcggttgtccgttattgttcgctggcatcacggctaaatgggtttatggcgttgcattacctgattatgtctatgagtcagtcaaagaaaataaaggcgacagagaaaaaatccaccaatacctaaaaggtgatgctctacttgcggtagaaaagcaaatggttgcagtgacaaacattgctaatagttctgttgactacaaagactttgatgctcgatgtatggcagctttcaatgttaagggacaaatgcaaatgctttacccatcaacacaaggggagcaccatgcaacaagattacaatga

SEQ ID NO: 299476 - DNA, 360 bp, Proteus mirabilis
atgcaacaagattacaatgatcaagtagaaacattctccaccatagttagtgagctatttttgattagacaggtcgccatgcataagcggcctgtttttcgttcatcactaggagatatcaggtttagtgtagaaacattagctaacttcttaaaagggtactatcgggaagatgacaaaagcgatatcgaactaagtatgttgttttttaatatgctgaaaagagaatacctaccagatccaaaagtatttatctcttggtgcataaacgatgagcttactgatgaagcggtaaataaaatatcagaactgttggaaaatttagctcaaatggaattttcggaacagaaaaccaaatag

SEQ ID NO: 299477 - DNA, 195 bp, Proteus mirabilis
atgaataaactaaataaattaactacagaaatgctcttttttaaaagtgagaataaagatgtcaattatttagaaggtggtggtatttttatagaagataaaaacatgtctcttttgtataagaaagtgatggaattagaaattaagcttcaagaattatcacattctatatcacaaaacttaagtcaaaagtag

SEQ ID NO: 299478 - DNA, 1005 bp, Proteus mirabilis
atgaaacagccaagtaatcccatagaaatactcgttcatagtactgttaggatcgaatgcttaaagggtagtaaaggtgcttcgtcgggaactgggtatatattttgtttcttagaagatgaagaaaatgataaatcatgtccatgtatagtaacaaataaacatgttcttaaggatggggttgaagcgatatttcatctaacattgcgagataaggatggtaacccagatttagggaatcacgaagctataagaataaaagatctaaatgattatgtaatattacaccctaatgatgatattgatttagctattatccccataggtatgatattaaattctgcagaagctcttggtaaaaattttcattactcctcttttggtaaaggttttattgtaagtaaagaactacttagtgagttatcccctatggaggatatcgttatgattggatatccgaatggtctttgggataccgctcataacttacctattatacgaaaaggcgttacagcaacagatgttaggttggatttaaacggagagcctgaatttatgatagatgcaggtgtttatccaggttcaagcggctcacccgtttttttagctaatataggtagctatatggataaggatggatgcctttgtgcagggagtcgaattgctttattaggaactgtttatgcagttaatcagtcaccagttttgataacatcaaaagaccaagaccaagaccaaaaccaagaccaaaaccaagaccaagataaagagggctattccaaaactagtattgatggagcattccctaatagcttgggctacgtcataaaagcatcagagctattggcctttgatgatgtgcttttgggttttatagaaaaactaaaagatagagatgctaaaggggtgtgggataagagtgataatgcaccacaatcaagaaattccccttgccactgcggtagtggtaaaagatataaagaatgtcacggcaaattaaactag

SEQ ID NO: 299479 - DNA, 3720 bp, Proteus mirabilis
atggaattaattcatggtgcaaaaggtggtggcggtggcggacatacgcccacggaatcaccagatagcttactttctgaatcaacagctaagattttattggctatctcggaaggtgaaattgctggtggcttagacgatactcgtatttttcttgatgatacgccgattgggaatactgatggcacaaaaaactttgaaggtgtgacttgggaatttagaccgggtagtgaacaccaagaatacattcagggtatcccatcagtagatagcgaaacatcggtagggttggaattaaaagacgatcagccctatgtgcggagcattaataacactcagctatctgctgtgcgcattagactatctgttcctcaattgtttcaacaacacgataacggggatactacaggctatagaattgaatatgctattgacttatctacagatggtgctggatataatgaagtattaaagtctgcttttgatggtaaaacgaccagcgaataccagcgaacacaccgcattgacttacccaaggcaaatacaggttggcagatccgtgtccgacgattaactaagaatcagaatacagccagaattgctgataaggttactatctctgctgttactgatgttatcgatgctaaattgcgttatccgaatacggccctattatttatcaccttcaatgcacgtcaatttaataaccgcattcctaaaattagtgttcgtcctaaggggggattactgatcaaagtgccaactaattatgatccaattaaccggacctattcgggtgtgtgggatggtacttttaaacttgcagcaaccaataatccagcgtgggtattttatgacttggttttaaataaccgctatgggtgcggtgatcgtattaaagcttcgcagattgaaaagtgggatttatacaaaatagcacaatattgtgatgagttagtgccagatggtcatggtggtgatggtaaggagcctcgattcctgtgcgatgtttatgttcaatcgcaagaatcagcataccaagtactgagagatatagcggctatttttcgtggtatgacattttgggctgataacaaggttaatgttgtcgctgatatgccagatagtatttttagaacgtttaccaatgccaatattgttggaggtaagcctgcctattcaggaggtagtcagcaaaatcgatatacgcaagcattagtttcctacacagacaccaataaccacagtaatgatgcgattgaggctgtggccgatattaaactacagcgtcgttacggagtacgcaaaactgaaatatcagcgataggttgcactcgacagacggaggctaaccgtagaggtcgctgggcgttactcaccaatgctaacgacagagttattagttttgcgacaggattagagggggcaataccttctcctggtcatatcattgctgttgccgattctacattggctggaagagataatggtggacgtatatcgcgtgtagaaggcagaaaaataacacttgatcgcagagccaatattaaagctggtgataggttgattgttaatctgccaaacgggcgctcagagggaagaaccgtatcactggttgctgataatatcattacagtttcaacggagtactcacaggagccagagaaaaatgcagtttggacagttgatgctgatgatttagcattacaactttatcgggtcgttaacattactgataatggcgataatacatacactattactggcgcaatccataacccaagcaattacgatcacattgactctggtgccagaatagatgatcgtccaatcaccattgttccaccgggtgtgcaagcaccacctaaaaatattcgtatatcatcctattctcacgttaatcagggcatttcatttactactttgcgcgttgattgggatgcagttgataatgccattacctatgaggctcaatggcggagagataataataactgggtatcaatgccaagatcatcaacatgcgggtttgaggttgatggcatttatgctggtcgttatcaggtgagagttcgtgcgataaatgcatctgaaatatccagtgtttgggctaacgcacaagaaacaacactgacagggaaagtaggcaacccgcctaagccagttaattttagagcatcatcattggtatttggcattaaattagattggggatttggtgaaaatacaggagatacgttaaaaactgaaattcagtacagcaaaaagaatgatggtgaaggcctgatgctgttgtctgatgttccttatccctcaaaaacctatgagatggccggcttagctgctggagtgatattttatttcagggctaggttggtggataaaacaggcaatcaatctgagtggactgattttattcgcggggagtcagaatttgacactagcactatattgccagaacttggcaatcatttcatgacaacagaggcaggcaaacaacttgacgaaaaactgaattggaatacggagtctattgctgaactaactaatgccacctattcgctatctacggatgtattgcgatattccgctaatgcgcaggccggtattactcaactacaacaactccgagtttctgataatgaagcctgggcgcaggatattaaacgcgtctacgcatctattgatgagaatgccgctgaggttaaacgcgcccaaaattctattgtggatttaaacaaagcatttgctgaggatagaaccagagtacaggctcgatttgacgaacaagagggcatgattgaagagaagatgcaggctacgtttgagcaatcaggcgacggtgttgtgacccactcgattaatatcaccattaaacacaatggtgtgagttataacgcagcagggcaagtaattagtgctcaggttaagaacggcaagcttgaaagtttcattggctataacgcgaataactttgcttggtataaccctgtaaatggcaagatggaattgtttatgtatgccaaaaacgggcagttgtttatcaaagaggcgtttttagataaagcgaatgttcgtgaaatggtgttatctgaggctattaaatccaagaattacgaattaggtaaggctggatttatcattgatgccaataccggcaatgctgagtttaataatgcgacatttagagggacgattgatggtgctgatggtaattttaatggaacagttaaggccggtaagttaataggaaatattgtttcaatttctgatgagatttatataaatgacaaatggaaaggtgatggaataaaagagttgtttaaatttaaacaacgagacactccatgttatttgtgggtgagcggatcgctacatcaagaggattatatccctgactggtttggaacaaaaacaccgaacaaggcattaatggggtatatggctccagatatggggtggggcagaggtgttgctgagatttatgttgatgggattcttaatgcaaaaacagtctctgtttggtcaggtaacccaaaaaattctagaaaagatgaatatgtttgcaacgaatttgtcgtaaaaatcccagccggaaagggaacaagtagcattggtataaaaataccttattctggtagtggggagtggacggaatttattctcagggggagagtttttgcatttcctgattcaagcgaagaatttctaattaattaa

SEQ ID NO: 299480 - DNA, 1614 bp, Proteus mirabilis
atgatatacacaacaggcactgttagcacagtgtcagggtctgctattgtctctggcacaggtactaaatggacagttaataatcccgctattcgctcaggcaccattattttaattaaaaatggtaatgctaattttatttacatggtggatagagttaatagcgatacagaattagtcatttcacaaccggctacatttaccgtaaaaaacaccagttacagtattaatctcactgagccgaactcatacagcgacgctaataatcgtatgaccgctattgcatcagatacgacgtattttctgcgagcaatggatcaatggatgatgaataacggtgtggtgacaatagagctatctaatgggcaaaaagtaacgttagatagtattaagaagatgcagggggatattggtaaaaaagctgatttaaaaagtaacgtcgttcagcgatttaaatcaggattacttgcagagcctagtattggcgcggcaaaaggagatatgaggctacttatcgatttaaaagcggataagtttgaattcatatatacgaatggtaacggttggtttggtaatcaacttcctagtaaaaatgggactttgatggttgttggcgattatggtattggtttaaacgccaaaacaggcacatctcaagccgaaagcaccaatgcaaataacttagatactaatggtttttgggcatcaggcgggtctaatagctctaatttttacaacccattcggaccattaatatctttcgctagaggaggaggaaccgatggaactgggcaagtggttcaaatccaagcttccagtaaaaatctagcgtatagaatgcgaaatgttaataattggacttactggtctgagctaatgaatgtgaatagtgatggggttaaatcatcaaaaaatgattttaaaaataatgggttctatacatcaacaaatattgatagtgagaaccctaacacagtttacatgggaataatatcagcacacgcaacacagcctgatggctatcaaacaggtatatttggtagaggtaaaaaactactttatacatacaaagaaaacagtaaatggattggtacttatgaaattcttcatacaggcaatgccaaaccagattctaacggattctacaaaaaagcctctccaattatcgatatcaatcccgacggcacattcaccactaacgacgaatcagaaggtgctacagttactcgagtagctcagggtgaatatcttatcgaaggtgtactcggctttaactcagatgcaggttggggcggtgtcgatgggggtattgaaattccactcgatgttaataaacagccgttgatatgggtagactctgaagttatggaggacggttctatcctcgtgagaacgtatcatcgaactcaccctaacgcacctaaatttgcccgtaatgatattgatggttacaaagacggcgacccaattgatatcccgaatggtcgctttatctctgttcgtgtacagatgcctgagatggaagaagcgcagaaggtggaagaggagcgaagacaaaaagaagaggagatgaaagagcaatacgggctgggtgaaaatgacgcattgctataa

SEQ ID NO: 299481 - DNA, 231 bp, Proteus mirabilis
atgaacctcgcaaacctaactcaagaagaaaaagacaagattaatgtcgatttgaccgcaagtggtgtcgcatacaaagagcgactcaatatgccagttgttgccacagaagttgaacgacaacaaccagcacatttgagagcatactttaatgaacgattagcgttttatcgtgagagaagcaagaagttgccagatggaaaatcggtgcagtatttgaagacagaataa

SEQ ID NO: 299482 - DNA, 531 bp, Proteus mirabilis
atgatgatttattgttatgatgacaaattaagtgaaaataaaatagaacaactcactaaattgttatatagatgtgtccttggcggggcaagtgttgggtataccgacgcagaaactcaagttgatgatatgaggaattattggcttagtgttaatcattcattatcaaaaaataattttaaacttgtcactgtcgagatagataacaaaatcgttggtgttgttggacttgacctatgtactaaaccaaatggtctgcaccgagcggaaatctgtaaattattagtgttacctaattataggggaaaaggacttgcgaagaaattaatgtcagaggttgaacaattagcatggcgtttagggctaacacttttaacattagatacaaacaccaagggtataactgtcagcttatatcgttctcttgggtggcaggttagtggtgaaattcctgggtttgctcaaacagttgatggcgagttagaggctacaaccattatgtttaaacttaagcctgagagtaatagttaa

SEQ ID NO: 299483 - DNA, 1068 bp, Proteus mirabilis
atgttaagaataatacctaatacgagtacatttaatagcataaaaaatattttctcaaaaaacgataccaaggaaaatgctaaatttagtagtattaataatacaagtacaaaatggtatacaaatagttcatatgaaaaaaaatcatctgatccactggttccagaaaaattaaaaaaagtaaataatatctcaagattaccatttaaagaagaacttgaaaggttatatcatcctgaaaattcatctcaatataataaaaataattatcaatatgtacctaattctagatatgatggtagaataccgtattgtaaaaatactttaataacatctgatggagtattattacctgctaataatgtgagcgctgataactctccttatatgactattgcaagccaatatcctcttaataataaagagagtttaaaacattatttcaatatgttatttgataatgatataaatacagtttatatattagcatcgaatgatgatattataagagatcgctcaatactgcttggtgaatataataaaagtaattatgaaaaggacgggtttagatactttagagagaatttggatttaggtaatataaaatctagtcatattgaaaagtgggtgttaaataaaaaagaaacatatttagattgtaaggcatacattaaattagtgactaaagaaaacaataatgaaaagaaaataataaactttgtccatatctataattggcctgatcatacagcaatagacgcacttaaattaagaaataccatcaatactgttggttataatttaaatatgaagccaacaaaagaaaatattgctgtccattgtcttgcgggattaggaagaacaggggaatttattgctttaatggaaatgatgaaaatgatagagacaggaaatacaaaaacaagaagcttagaaagtattatttgtgacttaagggaaaaacgtagtatgcagttacttaaaaagagagaacaagttgatgagctgattaagtttgcaataaataataacattcctttagtcaatgatcatattaaaataaaataa

SEQ ID NO: 299484 - DNA, 1344 bp, Proteus mirabilis
atgaaatttattgatgagctggatttagctatatcactgtggacgcaggatggagttgctcaatccattgaaaaatcaacaccagatagcttgtttatgcttgttgaaactttatactttataacaagaaaccaaaccccttgcccaacaacaaacaatgaaaacttttcttttatcgccaactcatccttaagtggaggaatatctaactgtgctaatttacagtgccgccttaataaattagatgagttggtttctttcgcttctttgtatgctgatgtcatatatataaacaacccatttgaaccactttatttttcatgggaagatttgagcttcaactatataaaaacagaattactaacagcaatatgccagtacttctacttaaaaccctatctttcattaggagttataaaatattcaagtgggtacatgtcactttgctcccatcatcatgaaacattagccaaaccactttctgaaagaataaataaaaaggagcaggaattaactgcgatttttagcgagcattttttatctaactgcactatttcgttagacaaatttgagaatggagaagtattcatcgaagtgcttgataaaaccaatattcttgagcatggaaggtcatatcttcattttgatggaaaaccaaagtcaaaacacttaaggaagttatctaaaaaaaatactaaacatgtattctctcgcaaagaaattgaagaagaaaacatacttccctcacttgtatttccgttagtaaatgacattattgaacaagagtggatttcatatttttataactcctcgcttttatttgataacaaagataaaatcaaagttgcaagtcagctaaatactgaaacaatgtctattaattctaccaccttcactgagtctataaatcattacctacctacaattcattgtcgagatccattagaaataattaaactaagagagcgagaggaagaatcgtttaaagtttatagagataaactacatagactattgcttgacgcaccgaagcaaaagccagaaatattccctgaaatattcagggatacagtcctacctgaaataaatctaattaataaaaaacttaaagactatcaaataaaaaagagaaacagtcttcgtgataaattaatttttggttctggagcggttgcctttgggctgtactcaggcgttttaccttcaaatataggaagtatattagcggctataggtggcggtagtgccatcgtaagttcaatgatagattacaaatcagcttttctcagcaaagatgagatacgatccagtgactattattttttgtggcaactttcaaggtaa

SEQ ID NO: 299485 - DNA, 345 bp, Proteus mirabilis
atgaaggccaagcgcgagcatattgttcctttatcgcctcaagcgttagatattctggaggtgatgaagccaatcagtgctcatcgtgaacatgtttttcccagcaggaatgatccaaagcagccaatgaatactcaaacggctaatgctacgctgaaaaaaattggttatggtggaaaacttgttgcacacggcttgcgttctatagccagtactgcaataaatgaggcaagttttaacccagatgtaattgaaactgcattggcgcatagtgatagaaatgaagtcagacgcgcatacaaccgttctgactacttagagcatcgaaaagagctgatgtcttga

SEQ ID NO: 299486 - DNA, 1017 bp, Proteus mirabilis
atgactgtcagaaaaatggaaaacggacaatggatttgcgatttacgcccaaatggacgtaacggaaaaagaattaggaaacttttttcgaccaaaggtgaagcactaaactatgaaaagtacattttagaagaaactgaaaataaaccgtggcttggagaaaaagaagatctacgccgattatccgatttaattgagctatggtatgacttatacggtagaacattaagcgattcagatagaatgctttcaaaactaaaaggtatatgtgctggattaaacaacccaatagcctctaacttaacggctactgaatttagtttatatagggaaggacgacttaaaggtgaaattccagacattcatggaagattaatgccaataaaaccaagaacagtaaatcacgaacaacgttatctatccgctgtttttggtacattaaagaaacttgggcattggaatttacctaatccattagcagggatgccaacattcaaggttgacgaaagtatggtgtctttcttataccctaaagaaattaaaattcttttagaagcattagaaaatacatctaataaaagtacattaatagtcgctaaaatttgtttagctactggcgctagatggagtgaagcagaaaatctggaaggtagccaagtaacaccatatcgcatcacttttaataaaaccaaaagtaagaaagtccgaaccgttcctatatctaaagaactctatgaagaaatccccaaaaaaagggggagattatttacaccatgccgaaaaaattttgaacgaatagtgaataaatcaggtattgagttaccagagggacaatgtactcatgtattacgacacacgttcgccagccattttatgatgaacgggggaaatatattggtactaagagacatacttggccactcggatataaaaatgacaatggtttatgctcactttgcaccaagtcatttagaagatgctattactaaaaaccctttaaattttattcctgattaa

SEQ ID NO: 299487 - DNA, 606 bp, Proteus mirabilis
atgtctgaaaataatgaaactagagatgctctagatcgcatttgcaaagtttatggatttacatcaagagttcaattagctgtttatttaggaaaaacagccagttatataagtaacaaggttgccagaaattcgtttccatatgaccttgttgttgaatgtgccatgaaaaaaggagtttctttaaagtggttagtttcaggggagggagaaatgtatgaaaatactaatgaaaaccctaataaaaacactaatgaagatattaaagatgacgccatctatatacctacatatatattcaaagaatcatctttatttaaaggtgataaagtcatgtttgacaaggtaatgcttccctcttatgaaaatgaattagctattattattgatagtgacattagatatttcattgatatgactgataaattaaccactgatggaaaatatttaataagatactctgataccatgaatataagagatttaactatcttaccaggcaataaaatccgtattgattggggaaaatatcccatagactgcacaattgatgacataaaaatcagtggaaaagtggttgctacatatatggaacacaagcaatga

SEQ ID NO: 299488 - DNA, 276 bp, Proteus mirabilis
atggaacaaaaaaatactaatgcgacacaaaaaggggctaagaaaatagctccaattgttgcgcgcgatacaattaaaactcaagagaatggcaaggttgtacttaaaacagaacgttttatgccattgaaaaagttttgtgcaattactggtatcaacataagaactgctcgttattggattcataaaggtgatttaaaaataaagccaaaaaataaacctaaagaacgtgtttatgttgattggctgtcttatgacaaagagtggttaatgtaa

SEQ ID NO: 299489 - DNA, 141 bp, Proteus mirabilis
atgaaattaaattcattacagcttcaacaacacaaatataaattatctagtgattcatttaaaaatgaaaataacaattctatttatattgttagcctcattttatttatgggttatttattaatatcagctttaagttaa

SEQ ID NO: 299490 - DNA, 333 bp, Proteus mirabilis
atgtataaagaaaatatgtttgatgagattttaccaggtgcgaaagaacatcaaatagagcgcttaaaaaaattaactgaaaataataatgccgaagtgaaaatagatgtcgattatagtgaaaaccaaaaaattaatgagattttaaatttcatgagaaataaacaatcagagaaaatccattttaaaaatagaatttttgagttggtaaaaaataaattaaataatggtgtgttgagtgtggatgatatcgctgagcaattgactagttttagaaatgagctagttgatgcttatgcagaatcaacagaattcgaagatataccgttttaa

SEQ ID NO: 299491 - DNA, 252 bp, Proteus mirabilis
atgagagcatcaataccagaacccatttttacacctgatttagtgtctgaaattgaccaggtgttagctttagattccatgttggtatttgcacgcaatgaacaaaagcaaatttgtgcagataaatacgcttcgcacattcgcaagttacgtcgccttatcattcaaaacaaaatggattacgccgacgttgctgaactgttggaaagtgaagcgtcagagctagaacgtcaagcgcaagaactggtttga

SEQ ID NO: 299492 - DNA, 201 bp, Proteus mirabilis
atgaaagcgtttgaaaatattatgagtattggtgagtgcccattttgccacgcatgggggttaaacgttttcagtgatactgaaaatgataataaattttttgaaaagtttaatgatggtgatgaggtccattgttcacgatgtttagcaagaggaaaggttataactcattttgatgttcaatctgttgtgtgggagtga

SEQ ID NO: 299493 - DNA, 492 bp, Proteus mirabilis
atgaaaaatataaaactgacattaggtttattgagtcgtctatattttaaacaaataaataatttgttaataaaaacgggtttagctcatgtcaaaaatagagaccttatcgaatctgatgatattacctttataaatagggcgttggggcatgcagaatatttttcgttagagtcaattttaaacgcattggaaacgggaaaaaataaattttttataggtgatgaatgcgagattaatcatattttagattgcttttgcgatcaccttggtatagcaaatacaggtgttagacggtttattttgggaggtgcaaaattttattttgttagtcatgatgattttaaaaagccattatttggcagtctggcgggggatgtctattatgcaatacctcaacaacccaatgatatcgaagcctatttaattgattctttatcatgccatacccgatattacgtgacgaaatatcaaggtttgcgcaataagtaa

SEQ ID NO: 299494 - DNA, 795 bp, Proteus mirabilis
atgtcacagttaaggacgacgtgggtttgcatagccacggaaggcgaaaccgttgatggtcgcgaaattctccgcaatgaaattattgaaatggcggaaacctacgattatcagcgttataccgccatgatttggtatttacatccgccaaatgggaaacacgtcagagagcctggcgagaaacctgtcggagaagttatcgaagttaaagcggaggaagacgaaacaggcacactgcacctttatgccatattgcgtccattcattcgattgttggaaatgaatgcacaagactatggattattcccatctgtggaaatgaatttagatttccaaggtcaagggattacatatttagaaggattagcggttgttgatgaccctgcctgtgtcggaactacgcgttttaactttagtcggaaagaaaataaagggaataaaggtatggcaaagggatcatggcgtaaaaatttcaacattgaagagccagaagcgaaatcagctccaacgcctgaaaatgatgaaaaattacaagcactggctgaggcactcgcacaagcggaagacaaaatcgcagaacttgaagcgaaacttgaccaaacacaacaaaatgttgatgaagtgcaagaggatgttgataccgtcaaagaagtggttgatacagaagatttttcaaaattgcgcgataacttaccaaatatagttaaaaactttagcaagttagactctatttcaacaagaaaacctagcgctaatccgacaggaaataaaaacaaacgttttgattttctttaa

SEQ ID NO: 299495 - DNA, 1032 bp, Proteus mirabilis
atgcaattaaatcaacgggctagacagtatctaaaagcctatgttaatgggttagcagaggcttacggagttgatgatacctctaaatatttttcgctaactgacccaaaagaaacggcactgcgttcggcattaatggaatcggttgatttccttggcatgatcacttgtatggacgtagaccagttacaaggccaagtcgtttctgtgggtaatccaggtctttttacaggacgtaaaaaaggcggtcgtttttctcgtgataccaatgtggatggtaatacctatcaattggttgaaaccgattcaggtgcatcacttacgtggcatttgctgtcagtttgggcaaattcaggcacagaaaatgaatttttccaacgtatgcaagtgtttatcaatgaatgctttgcattagatatgctacgtgttgggtttaatggggagcgtgttgcagatagtactgacccagaagcttacccaatgggtgaagacgttaatattggttggcatgcaattgctaaaaaatgggatggtggtaagcaagttattaccacaccagtcaagctggacgataaaggggatttccgttctttagatgcgatggcgtcagaccttattaatacctgtattcctgttgaacatcgtacagacccgcgattagttgtacttgtcggtgctgatttggtttcagcagagcaatatcgtttatatcaatctgcggacagaccaacggagaaaattgctgctcaaatgttgggtaataccattgcaggacgcaatgccattattccgccatttatgccaggtaaacgtatgacagtcactatgctgtcaaatctccacatttacactcaacgtaatacgcgtcagcgtaaagcagagtttgtagaagaccgtaaggcttatgaaaacaaatacctgcgtaatgaaggttatgcgttggaatatccagagctttatgcttcttatgatgaaaatgcggtcaccattggtgaattaaccgaacctgctgaaaaactggataaagagtaa

SEQ ID NO: 299496 - DNA, 489 bp, Proteus mirabilis
atgacccgactacaaaaattgacggcgttcttacgtgcaaatttgcctgaatccttatttgcgacagaatttagtagcgaaatggatgaacttgtttttaaacgtgctcacagagatttgggtaaagatgagtcgaataaagaacaatatcaaattttaacgcaagaatatgatgcggtaattgcgtggggacgttggccatatcgtgaaatagatacccgttatatccctattttgattgaggcctggtatcaagagttaaaaacagatttaactgaacctgattttgatgatgaaccaccgacgattgatgttgatgtggacgaggatatcgcaatggttgttgtcacccttaaattaagcgacgccattgtgttaaaagaagacgaaaaaggccttgtgccctttgacggtaaacgttggtcattagccaatcctgaagtgttatttgctgaaaatattgatgtgatcccccgtggtgtgaaatga

SEQ ID NO: 299497 - DNA, 333 bp, Proteus mirabilis
atgacactcggtgaaaaacaacgcaagtttacgcgcatgattgcagacttgattatatttgcttatgacaacggctatgagctgacattctcagaagcgtatcgcacaccagaacaagcaaagttaaatgctaaatcaggcagtggtattaaaaacagcttacatactcagcgattagccgtggatttcaacctgtttaaaaatggtgtttatctcacaaagacaactgaccatcagccccttggcgaatattgggaatccattggcggtacgtggggcggtcgtttcaatgacggtaatcactactcattagagcacaacggtgtgaaataa

SEQ ID NO: 299498 - DNA, 1647 bp, Proteus mirabilis
atgaaacccattaatcgactttatttatccggtgatgaaacgcaccttgtcgacgttaaaatggtgctggaattatcgcaatgtggacgtggctttattacggctaaaaccgataccgattacacgggtaaattggtgcgccttgatattggctacactgatttactattacgatatttcacgggttacgtagaacgttcgcaaccgtcacaaaatggttttcaaaaattgtttgtgcgggagttagttggtgtattcgacagaatgtggccgtgctcttttcagcatcctaccttaaaacagatcaccgattatctaaaagagcacagcggattacattttgtgttaccggatgccgaatatgtgaataccccaattccacattacacccataatggcacgggctatcaattattaaatagcctgggaaaagtattcaatattcccgattatgtgtggtatcaaacgcccgatggtgacgtattcgtgggaagctgggcggattcattttggaaagataaagaggtcgaaatagacaatcaattctcttctgaacaacgtgccggtaatcaaatgaccattccgatggtgcaaagtttacgccctggtgtgaaagtgaatgataaacgcctagagcgtgtggcgctggataacgacaatatgacgttaacatggattagccctgatgtgattacaggacgagctgaaaaccgcaccatagcccaacaacaaattgataatgcgtatcctgaactttcggcagggttgcacttaccgaaatttgcccgtgttgaagcaccgacagaaaataccacggcaggggatatttcagacccctttagaccgaaatacgccgttgacgtgcaaatggttgatgccgatggcaatgatgtggcacccgtttatcatgcggtgccgttaccgttacctatggcagggaacgagtcgggaatgtttcaatatccgcctgtgggttcaatggttgaaattgcgtttgaaaatggccgtgcagataagccctttattcgccaagtgttaagtcatggcaataccttgcccgacatcaagccaggcgaacaactgcaacagcaacgccaagaggtatcacagcgggtaacacaagacggcacatggcatcgtcaaactgaccaaaaaatcattgaagaatcgatgcaccgtgaagttaaaaccgacacagaaaatcgcacggttatcgccagagaaaccaccgtacaagccaccgataaaacgaccgtgataggcacaagcacgttaatggcaggtgccattatgcaaattgcagagggtgactttagccaggcaacacaagccaataaggttgtggctgttggcaaaaacatgacggttgatgtgggccaacagttagaagaaaaaatcggggccgtgcgttccagtatcgctggcgcgatgcaaaaaatcacggcaccggttgtttatttaggtaatgaacaattgaatgtgatgcaatgcatgttagataccttagatgtggtgaatgagttagctgcactcactgcaagtcatactcataataacacgggcggtccgttaaatgcctcagccattagcaacacaggcactaaatcaacaggacttaaacagaagtattcacccgttatcggctga

SEQ ID NO: 299499 - DNA, 810 bp, Proteus mirabilis
atgaaaaaagaaataccacaaccagtcatatctatagttgccgaatatgtctctaagaacgaatctcacgctacattgagttcattgtttaggtatgcagatgctcccccagatgaaccccaaggctccaaattagtcaaagcatcagagtggttaatgcaaacaaataagttatcaaaatcaccactcgctattttaggtaaaatcatagagcgatatatggatgctgatttacctaatgaaccaatccttgactggcaaaaagaacaaattgaatttattgacaaaataaataaatcattctctaaatatggattaaattaccatttaggtggaataataactgacggtgcatcaataccgtcattatctctacaagaagctataagacaaaaagatttccctaccattgagatggaatttacaagagcgattgaaaatatatatcaatcacctagagaggcagtttccgcagcaagtaatattcttgaatctacttttaaaatctatattgcagatgaaggcttagttcttccagcaaaacaagaccttcaaagtgtctggaaagtagttagagaatctctggggctaaatacaaaattagttgaagatgaagacttaaaaaaaatattgagtggtctctattcaataactgaaggaataggcacattaagaacacacgctagctcagcacatggcgcaggtagaaaaatttataatctaaaaccaaggcatgctcgactagctattaattctgcacatacactgacaatgtttatacttgaatcttggaatgaaaaaaaaggataa

SEQ ID NO: 299500 - DNA, 741 bp, Proteus mirabilis
gtggaaggctggcaacgtgcatttgttatccatgctcggccttacagtgaaacgagtttattgctcgattttttcactgagaatgaagggcgagtgcgcatattgtcaaaaggtgcgcgcggtcgtcgctctcctttaaaaggggcacttcaaccttttactcccttgctcattcgttggagtgggcgaggtgagataaaaaccctccgtgatgctgaacctatctctttagcattaccattaacaggcacagtactttacagtggtctgtatctcaatgaattactttctcgtgttttggaaaatggcacatcatatagcgcgctttttttcgaatacttatcttgtttgcaaatccttgctgccagtgaaacaacgccagaagctgctctaaggcgctttgaattagcgttattaacgcaattggggtatggcctggactttttgcattgtgcaggaagtggtgaacctgtttctgataccatgacttatcgataccgagaagaaaaaggctttattgccagtttggtggttgatcactatagttttactggatttgaattaaaatcgctggcaaaacgagaatttcctacggctggtacattgaaagcagcaaagagatttacacggatggccttgaaaccttatttaggtggaaaaccattaaaaagtagagagctgtttcggcaatttgcgataaaaaaatgtgcgaaaaaaagcgtattgatagaggataaataa

SEQ ID NO: 299501 - DNA, 207 bp, Proteus mirabilis
atgttattgcgttatttaacattaataacagaagatgagatgtgcgatatagcacaaaaaacacgctttataggaacgggagagcgtatggctactatcaaaaataccaatgcgaaccacattgctattaactacgataagcttgtgtggcaagttgaaacatttaatgttttggaacaatcattacagatctctaatcgctggtga

SEQ ID NO: 299502 - DNA, 636 bp, Proteus mirabilis
atgccaacactgcttaatatgggaacatttgcacttttatcgctaggattagtattaacgcctggtcctaatatgatttaccttatctcacgttctatctctcaaggaagaaacgccggatttatttcgttaattggtgttgctgttggttatattttttatatgctattagcggcatttggtataacggcaattttcatggctgtgccttatgcttacgataccttaaaaatttgtggtgctatttatctactttacattgcttggcaatctattaaaccgggtggacgttctattttccatcctaaaaaattactttcaggtaataccactaagctttttgtgatgggatttatcactaatttgcttaatcctaaaatagccttgatgtatttatcattactcccccaatttatcagtgttcaaaatggtaatgtgttaaatcaatcattaatattgggtagtattcaaattattatcagtattgcagtaaatgcattggttgttgtaactgcgggggctattgcaggattttttattcaaaggcctcgctgggcattaattcaacgatggtttatggcaacaattttgggggcattagccattaaattagccacagaaacgcgagttaattag

SEQ ID NO: 299503 - DNA, 2487 bp, Proteus mirabilis
atgttaattccttattcaccccacacaatatggaacaccatttgtgcgactttgctattaagcttggcgtttttctcacaagcagagcaggacgattctgtggaatttaacattcatatgctagacgcggaagatcgcggtaatgtcgacctttcacgtttttctacctcaaattatatcattccgggtatgtactatttagatattcgtctaaatggtcgcgattttcctcgccaaaatattaattatgttgaagtcgctgataatcattccgtggcttgtatcgaccccactcttttaaaaaagttaacaatcaaccaagaaaaccaaaaatatatcaaagaaatatcaccagattgttttgatattagccaattacccggtatctcgattaaaaatgatggtggtgttcttgatatcacgttaccgcgctcattaatgaaatatgaagaatctgattggacacctccggagctttgggatagtggtgtctctgggcttatttttgattatacactaacaggaacatcaacccgtcctaataaaggtaataataacaacacgttaactggttatggtcaagcgggattaaacttgggtgaatggcgtttacgagcagaatatcaaggcaattattcttctgaatattcgtctaacaatcgatttgattggaaccaaatttatgcctataaaccgttacctgatctcgcagccaaattaacggttggggaaacttatttaaactctcaaatttttgatagtttccgttttacaggggccaatttacaaagcgatgagagaatgttacctccttctctccaaggttatgcacctgaaattcatggcattgccaataccaatgcaaaagtgacagtaacccaaaatggacgtttaatttatgaaacaaccgtacctgccggcccttttgtgattaaacatctacaaaacaccgtacagggtcaactcgatgttagagttgaagagcaaaatggtaagattaatgaatttcaagtgcaaaccgctaacttgccttatatgactcgcccaggatctgtgcgttttaatacctcactgggacagtcatccgtgaacaaccataaaatgcaaggccctcttttctatcaaggggatttttcatggggaatgaataatacatggtctctctatggtggtgctttacttaccgctaaagattataacgcatggtctttaggtatcggccatgatatgggacgttttggtaccctttctggtgatattacacagtcttatagcaaaacctatgataatgaaaaaatcaatgggatgtcttttaaactaaactatgcaaaaacttttgatgagtaccacagtaccattacttttgcaggttatcgtttctcagaaaaaacatttcgctccttttctcagtatattgatgagcgttataacggcatcaataataatggctatgaaaaagaaatgtacaccattaccggtaataaaactttttgggcagatgatgcagagaaatcgaccaccctctatctctcttatcgccaccaaaattattgggataaaaatactcaagagcagtatggtgtcacagtaagtcgcaatttttccattatgggaattgagcaaatcaataccaacttgtcagcatttcgtactcaatataaagggaataccgacaacaccctctcttttaatgtttcattaccattaggaagtggtcgcaatgttggttataacttgcaagataacaatggcaaagtgacacaaatggcctcttatgctgataatcgcgattataataatttatggcgcataagagcaggcttaagctcagataagaaagccagtacggacggttattatcaacatcgctctcagtatgcggaaatcaatgccaatgcaagctatcaacaagataattacttagcagtgggcgcaacgataaaaggtggttttactgctacccgtcatggtgcagcattacacagcagcagtatgacctctagtaccgcaagaataatggtggatacagatggtgttgcaggggtgccctttaatggtcaaagcactaccacgaaccgcttcggtattggtgtattgaccgatttaacgagttataacaatgttgatgcacgcattgacgtcgataagatggatccagatatcgaaacgcgtaaagccattgcatcaacaaccttaacagaaggtgccattggttattacgaattcccggttcgtcaaggtgaacgtttaatggctgtcttacagacaaccgataataaatatcctccttttggtgcggaagtcaccaataaaaaaggagaaagtattggcatggtgatggaagaaggccttgtttatattgcgggtgttaaccttaatgaatcattaaatgtaatttggaacggtaaaacacaatgttcaattaccattcccgcggaaataacagatcccttaaaacatcaatcgctcgtttgtcagggactttaa

SEQ ID NO: 299504 - DNA, 243 bp, Proteus mirabilis
atgatggttgttaaagttttttttgataaggatattgaaggtaaaaaacataatcatcctcatgaacaaatggtttatattttgtcgggtagttttgaatattatatcgaaaatgaaagtaggatattaaataaaggagattctgtatatattggctcgggaaaatatcactattgtaagagtttatcagaaggctcattactcgatatttttactccaagtcgagaagattttctttattga

SEQ ID NO: 299505 - DNA, 1161 bp, Proteus mirabilis
atgaaaccaagaaaacgtatttactatccacctgaacagaaagcgattatttgggacagatataagcaaggtgattctttacatgagatcgccagaatgtttgatagataccattcttctattatgcccactatttatcaaacggggggcttccgtcctcccgtcggtaaacgccacagattatcgctttcgcttgatgaacgagaagaaatatcgagaggattagcagaaaagtgtagtttcagggagatagctaaaaagatatcaagagccccttcaactgttagccgtgagatccgcaggcatggtggattaaccaactaccgtgcagcaaaagcggataaaaaagcatgggataatgccttgagacctaaagcttgtaagttaagtcaaaaccctacattgtgtaaaataatcgcagaaaaaatgcatcgaggctggtcacctgagcaaattgctggctggctaaaacgtaattatccagatgctcaggggatgaatgtgtctcacgaaacgatttataaaacactttttatacaaactcggggaactttaaaaaaagagctacagcaatattttagaagcagaagaacggtacgaaaatctagaaccacatcacttaaaggaaaaggattaggctcaatccctaatgccgttcctataagcgaaagaccatcgactgttgcggatagagcaattccaggccactgggaaggagatctaattcaaggccctaaaaattcttatattgtcactttagtagaacgccattcacgttatgttatgctagctaaaatcagtgataataaaacagcaacggtgatagccgctctcattaaacaggctcagcaattaccctctgaactatataaaacattaacttgggacagaggtgttgaaatgaccaatcatgcagtatttactgtagcgactgatatccaagtctacttctgcgatcctcagtctccgtggcaacgtggttcaaacgaaaatacgaacagattgctcagacaatattttccaaaaggtactgatttatccgttcatagccagcaaagattaaatagcatcgctagacaactcaacgagaggccaagaaaaacgctaggttatgaatcaccagcagaacgatttaaccagtgtgttgcatccaccggttga

SEQ ID NO: 299506 - DNA, 780 bp, Proteus mirabilis
atgaatcaccagcagaacgatttaaccagtgtgttgcatccaccggttgaactcacacttcttgatgttgtccatcgtcgcttcccgatggtgttcctcgacgaaatgcaagatacctcttgggatcaagagtcatcgttgaatagtattttcgatgaccggtcagtcatgcagcgttttggggacatcgatcagaagattctttccgatgaagaacaagctgaattactcacattccctagggttggatatggatgcataagtaccagcaaacggtttggtaaagcaatttccgatgctgtagagtgtgtccgcgtcagtggcgaggctgttgttgtcgagggcgaagatgcccatgctccagtcctcctcctgtacaaaacggatagtgcaaccaaagtggtcgaacgctttggtcgaatcgttattggccatttgagcgaagacaacattggtgcacgagaggttaaggcgatgagcgctcgcaaaaccggtgagagcaacgttgatgcaggtcgtcatcttcttgactactgtccaaaatatggcggagacaagcttactgcaggaccacgctccgaaagtttctggagtcttgtcggggacagtaatggagctttgaaagaaacatcgctgcgttcccgagtttctgacgttcgcagagcattattgcttgttctgcgtgcagctggagcatcgtttgcgcaagacattcatgatgctcgaatgcttccacgagcagcaaaggccgctacgccacagggacaattgataagttaa

SEQ ID NO: 299507 - DNA, 468 bp, Proteus mirabilis
atgacagaactgctctacacgcaacttaaactatatcttcccgaagcactaagcctagaaaaatttaaggggttgagaatcttcgaagatgtaggcgaaaaggaaatactaaacacttccgcctcaaccaagtgtgaaattaatttccagggaagaagcctagatattggactcggtacagttgcaggaatgaagggagaaactcatgccgcatctttaatccttgaatcctacggtggaagcagccgtaaatttgatgttgcactggggctagagtatatttcaggaacagcgaccaaaaagatttcaaagctacctaaaacccagcaggtgcaaatgcgtaacctttatgtagcaatgtctcgaccaacgaaattattatgcctagcagcgaacgaaaaccgtgtttcacaggctttacgtgatgctcttgtgcttaaaggatggcatatagaagatgtgacttga

SEQ ID NO: 299508 - DNA, 330 bp, Proteus mirabilis
atggaatttatgactagtacaatcctctcaggaatcctctatgatggttttgccaaaggggtaaaaatttcgactgagtttttgaaaggaaagttacagggatggctattcgatgatgaattgatagaagagttggcaaataagctaaatatgcttgatttagatgagttaggacaacatgcaataaaaaaacgtattgataataatccagaaataataaaatgcatgcaaaatattaagcaaaaacaatcaattggcatggttaatcaaaaccactacggtactggcgataatgtcgctggaaacaaagttatcaacaatggtaaataa

SEQ ID NO: 299509 - DNA, 3279 bp, Proteus mirabilis
atgggaaagcaaatccatacaggttctggggacaacgttggcaataataaaattgtcaacatcattagcaacatagaaccaaaatatattaaagggtttattgctgatttaatgcaggatatttcgcacagaaaaatatctgatgcagaaaaaaagcttgagtccattgcaaacatagatggtgtagacataaatgttaaatcattattaaatgcactgaagactaaagtagccctcatccaagaagaaaaaggattacaaaatcaaaaacaagaacttcaaaatcttgtgcgaaataaagaattagattacgacactttagacgttgctttttcaatactcttacattttgagtccaaaattcatctagatacagctagggatagatatttttctgcagaggtgagagggccttatacgaatgaggttttttttgagttcttatcaactgccgatgagatagttgaagcatgtaatagtcaatgtaaatttaattacttagaacaagagatattagggttaattcgaggttcattaagaaacaacaatatcaatattgcctacgaccttagtcaatacttaaatgaaaactacccttcaataaattcaacttttttcttacttcactgtgaaacccttaccttcttaaataatattaaaaatagacacattctttcattcagtatatatgaaaaaaaacatgtggataacttaattaactctctcttggataacttttcatcagatatttctcgttttacattgccgttaataaaccagctttatattactgattttacaaatataaaactgatagaacttgccaaaaaaaatactattaatataaaaaaaatcagtcgtcaatgtgcagagattattacaaaaattactagtaaaactgttgcaacaaattcacagttgaaattgccagaagaaataaaagaccttgagacattctccatagttaatgaattgctaacaaatggctcttttaataaaaaatcgcttgccgattggcgacataatggagggaaaattagtactgacgatccttatattaactctttattagaacttcaagtctctgtctggttatgtacatctcaagataaaaagtccattattgatttaacccaacaagctgaagaattcttgtctttagacatgaatcgatataaggaattaaatccttctaatttaatgtttttatgcgaaagatttatgagtttaaatcttcctttaatagcagtaaagtatatagagcctatattacctgacgagccatggttatctccgctacttgaaaatttactgcaagcactatatttaagcgagcagaatgatcttttctttaaaaaactaactttattttcagatgatgttaaaagcgaatcggtatggctgttagaagctcaagcttatgagcgtatacagcaagatgaagaagcaattactgcagtccaagaagcacttaaaattaataataagaatgcttattcatgggatctgctgctatatttgtatcaaaagaataaaggcagtaaagttgacctgactaagttagttgtggggatcccttgtgaggttttttattcctatcatgaaaccaaaattcctttattaaatagcatagcaaaatatgtagaccctaatatagcagaagctattttagtcgactggtttgtggtaaatcctaatcaactggcaaaatatctaatagatatacatcataactctttgatgaatcgtaccgataagcaagactttatatatttaccaaaatgttgcattaagggtattgaatatagtgatgggtttaaaaaatataatcgtatattagtaagagatgtagagaccgaacatcctctgtgtttgaatgttaattcgcctttgggtagaatacttgaaaagttgactgtgggcgaaactgtcgaagatccttacctcggggagatatcgcttactagtgaaactcctgcatttattgctgcatatcaagctgcaataaaaataagggatcaaaataacgatgggtcagatccatttaaattgtttgaattaccttctaatgaagaagaatttcttccatatttcgagaggattttacatcgttactcaaataataaggcgacgcaaaatccttctctccaaaatcctcatattccattatgtatgagaggtaattttacacaccgtggagattatttccgagctgcctattaccatttgacttcttcggacacgacacaatatgtaaaactacatgatgaaggtatcaataacccagacaaagttattattgatctatatacatctatttatctttcgctattgggttttgtttctttaattgctaaaaaagaaattacattaatattaacaaattatactaaggatattttagagaactggataagagatattacgagagaagattatctctcattagatgttactaaatttggcatgcaacgaattacagcagcagatataaagaagaactcttatgactttatacaacaattaaagctgttaattaatatttctcaagaagaaagaatcagaattgttgatacccctgaaaatcttgtgaaaattaaagacattatagatccatcaattttttcaaccatccaactttctcatgctaatgatatcccatggttaagtattgaccatttattatgtatattagctcagaagtctgattttcctgttgcgaatttaaatgattttttgaaagggctcataaattcttcagaatttaaagaaagaaaagaaagtataaatgttagtcttatttgcgggcttcctgttcctattttctacaatgacataataattttaagtggatcaaatgaaaaaaaagatatttttctaaccgctaaatttattgagaaatacaaatgtccaggcagggaaactgcagaaaacataaattttctttctcaaataactagaaatgtgatagtcaaagcatatctggatagcgatattttaaaaggtagtcgagcgtataatcctgtctacgatggctatgaggaatacgtgtttaatacttgttgcaaaacggctatgctatgcgttgaggggaagactgcggaagaaaaagtggcattgctaatctctgaaactttgaagccgttttataagtttcgacccttgcaaaaattggtttttgatttggcgaccttattttcagttggccatttcttaaatatagagtttataaatatagagcttgagagattgctatcatcaactaatacttctgcttaa

SEQ ID NO: 299510 - DNA, 405 bp, Proteus mirabilis
atgaagatgaaaaggcctcacatcgttccgatgtcggatcaggttgtcgcactttttgagtcactgaagcctattacggggctatacccgctggtattcgtcggacgcaatgatcgtacgaagccgatctcaaaggaaagcgttaatcaggtgattgagttgttgggatataaaggaaggctgacggggcatggttttcgtcacactatgagtaccattcttcatgaagaaggctttgactctacgtggatagaaacgcaactagctcatatagataagaatgcgattcgtgggacgtataaccatgcattatatcttgaggggcggagggggatgatgcagtggtacgcggattatattaccagtaacgcaaagcacaacgatgtagcgtctggctatatttag

SEQ ID NO: 299511 - DNA, 288 bp, Proteus mirabilis
atggaattgctggaaacccttcgtcgtatggaaaagcgtggtgcattagaaaagatgtgcaaagtcagacagcgctgcggtgaagtattccgtcatgcaatcgtgaccggacgcgctgaatacaatcctgcacccgatcttgctacagccctcgcaacaccaaagaaaactcatttccctttactgactgctgaagaactccctcactttcttaaagatctggccggttatacgggaagtattattaccaagactgcaacacaaatcattatgcttataggggtatga

SEQ ID NO: 299512 - DNA, 939 bp, Proteus mirabilis
atgaaagtagcagttctcggtgcagcgggtggtattggtcaggcactggctcttcttcttaaaaatcagcttccagctggtagtgaactctctttatatgatatcgctccggttacaccgggtgttgcagcggacttaagtcatatacctactcaagtaagggtaaaaggttttgctggcgaagatccttctcctgcattaaaagatgcagatgttgtcttaatttctgccggtgttgcccgtaaaccgggtatggatcgctctgatcttttcaatgtaaatgcagggatcgtgcgtaatcttattgaaaaagttgcgcaaaactgtcctaaggcacttattggtatcattactaatccagtcaatactacggttgctatcgctgctgaagtactgaaaaaagccggtgtttatgataaaaaacgcctatttggtgtgacaaccctggatattatccgtgcgaatacttttgttgctgaattaaaaggcaaagatccacaaacaactaatgttccggtcattggtggacactcaggtgtcactattcttcctttgctatctcaagtagcaggtgtgtcatttacggatgaagaagttgctgcattaacaaaacgtattcaaaatgcaggaactgaggttgttgaagctaaagcaggtggcggatcagccacattatcaatgggacaagccgctgcgcgctttggtctttcattgatccgtgctttaaatggcgaaaaagatgttattgagtgcacctataccgaaggcgatggtgaatatgcccgcttctttgcacaacccgttcgtttaggtaagaatggtgttgaagaatatctaccaatcggtcaattaagtgattttgaaaaacaatctcttaatggtatgttggatgtattgaaaaaagatataattcttggcgaagaatttattaataaataa

SEQ ID NO: 299513 - DNA, 1569 bp, Proteus mirabilis
atgagtattaaacgaaccgttaaattaggctcttctttactgttattgatttttattctatcgtctgccttatcttcattttttatttataaaatgcaacacaactttactcaagttgatgtcctatctgcacgttacgacgatgttttgacggctcgttatcaactggcgattatgcgttctaatatcaattatctattacaagacaaagacagtcgtgacgctgatcgtaacaagcttattcagcaaaataaaaagctagctatcatggctaaaaacaccctagaaacatgggttaaagagaagaaaatgactgttgcagcacaaaaaaatgctgatgatatttcgacgttattttatagtctggtagatagattagttttagatcctaataaattaccgacaataaagataaaagctaatcaatttgatcaagattttgaacatcttgatcaattatttgaaaagtatattcagactagaaataaaaacagtatctatcttactcataaacaagattcaatggttgagttttctatctactcaacaattatctcattaattattttattaattgttttgtactttgtgcttcagtggatcaataaaacctttgtctctaatcttaatacattgtctgagatattaaataaagtaggcaatgctgacttggttttttctgtcccacaagtaaaaaatgatgagtttggtaaacttttctcccgtgtcagtgatatgcaaaaagcgttaacctcgacaatcttttctgtcaaaaaagaggctatggatataaaagggggagcatttaaaattgcttctggtaatcaagagctttcatctcgtactgaagaacaatccagtgctttacaacaaaccgctgcgagtatggagcagataaaaatagccgttgctaacaatacagataacacaattgaagcaaataatattattaatcaatctactgatattgttatggatggcgctaatgtcatgaaagaagctgttttatcgatgaagaaaatagaacaaggtgcagtaaaagtaggggaaattaatgatgttattaataaattagcaaatcaaactaatattttggccttaaatgccgcagtggaagcagcaagagcgggcgagcaagggcgtgggttcactgttgtggccgctgaggtacggaacttagccgcaaaaagtgctgaagcggcaaaagagattagccaagttcttaaagcatctatcaatgatgttacctatggtacaaatttagttaataaaagcggtgaatacatgcaagagattgtctcttccatttcaaaagtaaacaagatcatgcaagggatcagcttagcgtctgaggagcaacgtcttggtgtcgagcaaattgcggtagcaattaatcaaatggatacggtagtacaacagaatgcatctttggtcgatctcgccgcctcttctaccatgatgttaaatgataaagcacaagtgctgatggataatgtcgcagtctttaatattgacgatctcgaaaaagagccagagcagaaacaagagttaatcaatgaacaagaataa

SEQ ID NO: 299514 - DNA, 1521 bp, Proteus mirabilis
atgagtattgaaagaacagcgaaagtaggctctattatactattagctattttcttagtgacatcagctttatcatcgttttttatttatcaaatgcaggataattttgcttcattaaactcgttaaccacgagattaaataatgtacaagaggcaagatatgagctagcaaccatacgctctcatgttaactttttagtcaatattggtaatgaaaatttagataagcaagaaaccaaagcccgattagtttctgaagctaaagcattagccgctaaatcaacagcgacaattaacgcttggaagatggaaagcaaaatcagtgctgacgcacaaagaaactcagaacaattatcggcactatttatccaactcgtcgatactattattgcgcctattgatacgctagcttatgaagatattgatttatcgaaagatttttctaaacttgctgagttgtttgatgaatatttagtgataacgcaaaatgttaatgatcaaattgaagacgaacaaaaatggatgtttcaactctttatttacactacatgtgttgctttagtgatactgattgggctgctttatttagtgatccgttgggttaataaaacctttctctttaacctcaatacgctctcttccattttgcaaaaagtgggagaagggaatttaaacttctcgttacccaaaaatagaaaagatgagtttggtacactgttttctcatgtcggtgatatgcaaaatgcactgacatcgactattggtttggtgaaagaagaagcattagtgatcaaaagcggttcagcagaaattgcagcgggtaatcaagatctctcttctcgtactgaggagcaagcgagtgcattgcaacaaaccgcagccagcatggaagagataaaaattgcggtagtgaataataccaataatgcggtattagcaaattctatcacagcacaaacgcgtgatttggctatcgatggtgctagcattatgaatgatgccattacttcgatgaaaaaaattgaagtcggtacgttaaaagtcgctgaaatcaatgatgtggtaaacaatattgccagtcaaaccaatattcttgcgttgaatgcagcagtagaagccgctcgtgcaggggagcaaggacggggctttactgttgttgcaacagaggtgcgtaatttagcagccagaagtgcggaggctgctcgtgagattaatcagattattcgagcttctgtggaggatgtcgcacatggtcgtgagctggttaataaaaccggtgagcatatacaagaaattgtcacttctattaccaaagtaagcgatattatgcagggaattagcattgcatcggaagagcaaaaagtgggaattgaacaaatagccgtcgcgataaaccaaatggattctgtggttcagcaaaatgcggctttagtagaacaaggagccacctcaaccatgatgttagatgaaaaagcacaaaatctgaccgataaagtatccatttttcaaattaaagaataa

SEQ ID NO: 299515 - DNA, 711 bp, Proteus mirabilis
atgacagaagttgttgctcgtgaacagttagaagataacgttgttctcggtaccttaatgttagaaaaaggcgtcgttgatggtcttgtttctggcgctgttcatacaaccgctaacactattcgcccaccactacagttaattaagactgcacccggtagctcattagtgtcttctgtgttctttatgctgttaccagaacaagtctatgtttatggtgactgcgcaattaacccagatccaaccgcagaacaactagctgaaatcgctattcaatctgcagactcagcaaaagcgtttggtatcgacccacgcgttgcgatgatctcttactctacaggtaactcaggtgctggcagtgacgttgaaaaagtgcgagaagcaactcgtttagcacaagaaaaacgtccagatctgattattgatggtcctttacaatacgatgcggctgtaatggctgacgttgctaaatctaaagcaccaaactcacctgttgcgggtaaagcaactgtgtttatcttccctgatctaaacaccggtaacactacctataaagcagtacaacgttcagcggacttggtttccattggaccaatgttacaaggtatgcgtaaacccgttaacgatctttctcgtggtgcgttagtagatgatatcgtctacactgttgcattaactgcaattcaagcaagccagcaagaaaatgcctaa

SEQ ID NO: 299516 - DNA, 174 bp, Proteus mirabilis
atgaagaaattaattatttttatactatcaagtttattcgctttttatgctggcgcttattcttgtaataagaaaattaaagataccgtcaccaacggtgggtatagtcaacataatagcaatactcaacaacctattcgctgtgtttggccaccttgtgatgatgactggtaa

SEQ ID NO: 299517 - DNA, 2376 bp, Proteus mirabilis
atgaatgtagcgaataaaaatatattagtacgtttaaatacgttatttgctcgccagttagtgaagcgtgccaataaaggaattgatactattttaaccttggactctcagaaattaccagaacccgctttggaaggaggggctgatgttcctatggattttaatggcgccaatgcactctatttctgggaactgttctattacaccccaatgatggttgctaatgttatgctggaagggcaaaactatgatgaagccagccgttggttacgttatgtctttagtccaaatggctatattgaaaacggcgtttatagtagtcgtgtatggaattcacaacctcttttaatggatagttcgtgggataaagatcaattagattcaaccgatcctgatgcggtggcacaaactgacccgttgcattataaattggcgacctttatgaagtgcctcgatattctaatggcgcgtggtgacagtgcttaccgtatattagagcgtgacacattaaatgaagccaaaatgtggtatatgcaagcactgaaattgctgggtgatgaaacagagttattaggtaataacgtttggtctgcgcctaaattaactgaagcggcatcaaaaacgacacaaccaacacatactatcaatcaagggcatgaaaaggggggatcaccacgcactgccaattcattaacctcgctctttttaccacaaattaatcaaaaattagcgcagtatcgtgacacattaaaaacacgtttgtttaatttacgccacaatttgtctattgatggacaaccgttgtcactgccaatgtatgcaacaccggctgatcctaaagggttacaaaatgcagccgtgaatcagtcacaaggtggcagtacattgccaacggcagtcatgccaactcagcgcttccctgtcgtgttaaatagtgtcaagtccgtggtaagtcagttaatacagtttggtagttcgctagctagcattaccgaacgtcaagatgcccaagcactatctgaattactcacaacgcaaggtagtgagattattctgcaaaatataaagtatcaaacgaaaagtctggaagagtttgcacataacgagaaggcgttaaatgccttacgcaaaggagctaaaaaccgttttgatcactatagcaagttgtatgatgaaaatatcagtacctcggaacaacaagcgatggatctctatttggcttcttctgcattgaatacggcaagtcaaggtttaagtatggcaggtgcagcagcagatttagtacctaatatttatggtttcgctgtcggtggttcacgtttcggagctatctttaatgcaacgtcaatgggtttgcaattatcaggctctgccacccgtattgcagcagatagattaagccaatctgagtcttatcgtcgccgacgtgaagaatggaaacaggcacgtgataatgcgaaatcggagttggaacaaattgatgcgcaacttgaagccttaaaagtccgtaaagaagccacaagtttgcagctaaagagtatgaaattacaacagcagcaaacccaagagcatttaactttcttgcaaaataaatttactaataaagccctgtataactggttgcgcggtaaattgatggcaatttataaacctttttacgacttaaccgtatctcgttgtcgtatggcagaactggcttatcagtatgatttaggtgaaacgcaaacctttattcgccctggagcatggcaagataactattctggattgatggcgggtgaaagcttaatgcatagcctgactcaaatggaaaacagttacctagagaaagataaacgtgtactagaaattaccaagattgtttcgttaaatgatgtataccaaggtttacgtagtggatcgtttggctttgaacaagtacttgacgttattaatggcaaagtcacccaattgggtaccgctgaaaatggtattgcattgaaaaacggccaattagaagcctcaattaagctctctgatttagctattgataaagattactcggctgatttaggtaaattacgtcgtattaaacaaattagtgtgacattacctgcattaactggcgcttatcaaaatattcgtgcggtgttgaattatggcggtagtgcagtgaaaccacgaggttgtaatgcgattgcgatttctcatggcatgaatgatagtgggcaattccaactgaattttaatgatgatcgttatctaccttttgaaggtttacctgtgaatgatagtagtacactcactttaagcttccctgatgctacagataagcaaaaagagatgttactgacactgaacgacatcattctccatattaattacaccattcgttaa

SEQ ID NO: 299518 - DNA, 4332 bp, Proteus mirabilis
atgcaaaattcagagaaattgacttttgatgcgccaagtttaccgaaaggtggcggtgctgttaccggattaaccggcaatatagccgccgtaggccctgatggtgccgcaacttttagcttaccattgcccattagcaaaggccgtggctatgcaccttctttaagtttaacgtataaaaatcaagcaggtaatggcgtatttggttttggctggttgatgggggagatgtctattcgccgtcgcacttcaaaaggcgtgccatcgtatacgcaacaagatgagtttattggccctgaaggtgaagtcattgtaccgattatcaataagaagggtgacattgaaacggcacaacgtaatacattattaggagtcaaacttgcacatcaatatcaagttacaacctatcgttcacgtattgaaaaaaactttagccgttttgaatattggttattaaatgaaacgaatgcacccgttaatatccccaaacagttttgggtgatgttaaatgcaaatggtgatgttcacttatttggttatgagagcaccgcacaaattgtggatagccaaaacagtgcgcatattgcgcaatggaacctcaacgcatcggtttcagcgacaggtgaacaaattgaatatcactatcgtgcagaagacgagcaaggttgtgatgaacatgaaattaaaaatcaccctaatagtaatacacagcgctatttagagcaggtgtattacggtaaccctgtgggagagcgcgctttttcatgtactaaaactcataatacattacctaaaaatgccttgtttacgttggtttttgattatggtgaacgtagcagtgcattagcggcttatcctcaatggcaaagtcattcaacatgggcactgcgtaaagactgtttttcggttttccattacggttttgaactgcgtactcgtcgtttgtgccgacaagtgttgatgtatcaccgtcttgaaagcttagaaaaacaaatggcactagcagaaacaccacaattagtcgccagattaacgctaacttataccgaatctgaggccggtacgattttggtttcggcacaacaatccgcttttaacgacaataaagatacacagtcgttaataacattacctccagtaaaatttgattggcagactgtcggtgcaactaaacaggcacagtggcaagtactggaggatcttgcatcttttaccccctatcaaccttatcaatatattgatctattcggcgaagggattgctggcgtgttgtatcaggacagtggtgcttggtggtatcgcgcgccaattcgaaaagaagataagcgagatcctaatgcaatatcatgggataaagcaaaaaagctcccagttatcccttcattacgaaattcagcgctactcacagacgtcacgggtgatggaaagctggactggttagtcacacaaggtgatatcaatggatattatactcaacataaagctaaagcagaaagttggctaaactttgtgccgctggatgcaatgccagtggaatattttcatcctagagctgaaatcacttcattaactggcagtggttttgctgatttggcgttaattggtcctcgtagtattcgtctttatgcgggttctgctcaaggttggaaaaatagcaaagaggtgatgcaagctgaaggtgtaactttgccgattaagaatattaatcgtcgtactttagtggcatttagtgatgtgttgggttctgggcaacagcatctaattaaagtggattatcaaggggtaacctgttgggtgcatcttggtgagggtaaatttagtaaacccattacgatcccaggattctctgcggatcgccttaaatttaatcctagccaactttatttagccgatttagatggtagtggtaccacggatataatttatgctcaatcgacccatttagaggtttattttaatcaaagtggtaatcaatttgtacgtggtgatgatatcgccttacctgaaaatgtgcgttttgataatcagtgtcaactgcaagtcgctgatgtacaaggtttaggtgttgccagtattttactgacaaagtcttatccaacaccacaacattgggtactttctttacaaaataaaaaaccatggttattaacctctattaataacaatatggggttgattcaaaggttacattatcgtagttctgcacaatattggctggatgaaaagttagttcgccaacaacaaaataaagctcaaggggtgagtcatttaccttttgctttgcatacgctgtggaaaatcaacacagaggatgaaattacccaaagtcagttaacaaagatatttaactatcgctatggtgtatgggacggtaaagaaaaagagtttcgtggttttggttgtgttgaaaccactaatgcagaatccttcaaaagtgaagaaaatacaacggataagaccccaagtgcgttaactcgccagtggttctccaccggaaactctcttgttgatactcaactttataatgagttttggcaaggtgacgatgaggcatttccttatttttcaccacgttttacgcaaggtgaggggagctcagaaaaagcctgcgataataaacaatatcagcaatatgcctattggcttgagcgtgcattacaaggccaattactgagaaaagaagtctatggattagataacgccgtagttgctgatgtgccttatatcgtcactgaacagagaccacaagcgcgtttaattgaaactcaagggcgcgcacctgtggtgatgccttcaatcgttgaaagtcgtgaataccattatgagcgtattgccaccgaccctgcttgccatcaacaaattactttagagcaagacggctatggttttgtttctaaagcggtatctatcgattatccaagacgtgctaaggggatcaaaaatccttatcggcactatgaaagtctgccagaaacactatgggcatccagttatgatgcgcaacaacatgtattgcgtttaggcttatcacgccaaacttgccatcatcttacttatcctgaaaaacaggtttatcagctcagtattacagccacaaatcgtcaagatatttggacatttggtgctgagaaacaaccgacagagggcttaagtgtcgaagtattattagcggctaataatttgctaacacaaaaatcggcatcagtatttgcaggacaacagcaatttgcttatctggatgcagaaggtaatacaacgttaaatgagcctgactttcctatccgtttagcctatagcgaaacggcggagttagatgaacaaacagcaaaagccatttcacaaccttatccacacttaaatctggatgatgtcataaaaaatgcgggttatcagcaaagcgcatatctatttgctgatgagtcagaaaaaaacaaaacgctgtgggtaaaaccattgttaggtatcattcgatatggttcattagcgcaattttataaaccgcttatttatcagcaatctgccctatcttgtaaatataaattattgtgggataagcaattttgtgtgctgatgggcagaatatcccctttaaacatacacgattttcatctcacttatgattggcgttttttagcacctaataccatgatggatgagaaccacaatcttcatcaagtgacgtttgatggttttgggcgagtcactaccacgcgtttttcagggactgaaatgggcaaacaaagtggttatagtaataaaccctttactatgccaacaaagatcgatgacgctttagcattgacatcaacattgcctatttctacgggttttgtttatgtcacagacagttggatgtccacatcatcaaaattacctcctcatgcgttgcaaatcatgacagaccgttatgacagcgatccacaacagcaaattcgccaacaaatcgcctttagcgatggttttggacgcttactgcaaacctcaatcagggtggaagccggagaagcatttttacgtagtgataattcgacattggtggttgatcaaaatcagcaagtacaacaaaagagtaccgagatacgctgggcaatttcaggtgaaaccgaatatgacaaccaagggaatataaagcgtatttatcagccttattttcttaatgactggcgttatatttcagaaggttcatctcagcctaatcgttttgcagatactcattattacgatgcattaggtcgcttatatcgagtgaatacggcaaagaactatcaacgtaataccattgtgacaccctggtttgccgttcaggaagatgaaaacgatacattaaggtaa

SEQ ID NO: 299519 - DNA, 318 bp, Proteus mirabilis
atgttagctactaccccgtcagaaagcgatgctctggcttggatgattatcggtggattttcagcctggggggggatcgtgaggtatttaatggaaattagacaaaaacaaattaagtggtcttggtttggcattataagccaagtggtgatttctgtttttacaggattactcgggggcttattaagttttgaacatggtgcgagtcgctatatgtcttacatgattgctgggctttttggctccatgggaagtacgacattaatttggttgtggcaacgcattttgggaataagcaactcaaaggagcctaaatga

SEQ ID NO: 299520 - DNA, 390 bp, Proteus mirabilis
atgagtatctacaaattaagtcaacgtagtcaatctaatttaaaaggagtgcatcaagatttagtacgggtggtgcgtttggcaatcacattcagtgagtatgattttgtcgtcattgaaggtattcgttcattagcgcgtcaaaaagcgttaataaaagagggtaaaagtaaaacactcaatagccgtcatttaaccggtcatgctgtcgatattgtaccgttagtgaatggagcaatcccttggcaagattggtcagcatttgaggcagtatcaaaggtgatgaaacaggctgctcaacaattaggtatttcaattaattggggaggggattgggcttcctttcgtgatggacctcattatgagctttgccgtgaggtatacccatga

SEQ ID NO: 299521 - DNA, 369 bp, Proteus mirabilis
atgatgatcggcacattattgcgtttaggtgttaaaggggggattgctgccatcatcgttgtaacattgctggtgatccgctatcaatacaaccaaattaatcgacttttagaacaaaacagccggcttgactatcagcagcgaaggttacagacacaattggcacaatggcatcaacaggctgaaaacgtctctgaaacactgaaacatcaacaaaaggagcaacaatatttagaggaagaaaaccatgttatacgccaagaattacgccagcttatgttacaaacgccttgtgctaatgagcttgtgcctgatgctgttatccagttgcagcaaaacgtcattaacaacaacgcacagcgccgataa

SEQ ID NO: 299522 - DNA, 216 bp, Proteus mirabilis
atgctgttatccagttgcagcaaaacgtcattaacaacaacgcacagcgccgataaatttatccctcaacacttattattaccgtgttcagcaccgttattcaatgtgaatgtatggggagattatcctgattatgtcgcccgtttattattggtattagaaaagtgtaatagcgataaaaaagcggtagaaacattgttgttatcaacgagctaa

SEQ ID NO: 299523 - DNA, 2844 bp, Proteus mirabilis
atgactaaattaaatcggcaactttattcacgaacccctgcggtggtggtttatgataatcgtagactggctgttcgcgaaatagaatattgccgtcatcccgattcaattaaccaaaccgatgagcgtattactcgtcatcattatcatgctcgcggttatttagtacacagtattgatgcaagattgtatgaagcacaacactcagatccaactattcaacctaatcttcaacagatactcagtttaggcggtgcattctctttttctcaacatattgataaaggtaataatgtcaatattagtgatattgaaaataaaattagtctaaatattaatgccatgaaattggtcacagaatatcaatatacaaagccagaatttgtttcacaacttattgccattatagagcatacggctaattctcaccctgttttaaaagagcattttatttggggtatggcagacagtaagaatattgctaataacgctgtgggtaaatgtattcgccatgaagatctcgccgggaggacagaatatgatggttatacccttactggaaaaaatataaatgaattacgaataattacggctaatgccgtgaaaatgaatgaaaattcgttgaatacacaagagttaagttttaagacaagcaatttctatgatgcaacaggtaatttattaagacaaattgatgcctcaaatcatcagcgtgaatgggactatgatcgagctggttttttaaaacaaagccgtgtgatattacatggaaccaacaaattttttgtgattaaagccatcagttattctgcggctgggcagaaattacgggttgaacaaggcaatggtcttgtaaccacttatgagtatgaaacagaaactcagcgtttgcttcatgttaaaacgcaacggcctcaggggcatgctttgggaatgcgggttatccaagatctacgttatgagtacgatccagttgggaatgttatctgtttaaaaaatgatgcagaagcaacccgttactggcgtaatcagaaagtagtgcctgaaaatcgttatgtgtatgactcactttaccaattagtgagtgccacagggcgcgagttaaccaatcaacacactcccgcgtcgatacagtctcaaactatcaccaccttggtgaaggatgcacaaagttataccaattacacccgcttatatacttatgatagaagtggtaatttaataaaaatccgtcataactcattacttgctcagcaaagttttacacagaatatttgtgtctctttacgtagtaatcgagcgctactcgaaaatcagcataccgtaataggaaacattgatgaacactttgatgccatggggaatcagcaacaattatccacagaagatctattacagtgggataatcgaggaactttggcacaagtaaagagtaacaatggcaatgtagaacactatacttacgccaatcagtctcaacgattaattaaacaacaggtaagacatttatcagggcattatattacgtcagaaacgtactatttaccgaatatggaaatatggcaatctaaaagaggtgcgcaggttatagaacaacgtgaggtgcttagtcttatggataatgtaagagccttactatggaaaataggtttaccccatggaattaaaaataaccaattacgttatagctataatgatggtatggggaatagtggactagaaactgatggtcaagggcaattagtcagttatgaagagtattacccttatggtggtacggcgatttggtcgagtgaaaatactgtagaagctaattacaaaaccattcgttattcaggcaaagagagagattcgacagggctttattactatggttatcgttattatcaaccgtgggtggggcgttggttaagtgccgatcctgcaggtacggtggatggacttaatttatatcgcatggtgcgcaataatccggtgacattgcgtgatcctgatggtagagctccatcaaaaccaaataattttgcttgggttaaaggaaaagaaggagaaaagcttaattttgcaggaatgtcattgttttcaatgaatactcaaattgatgaaaaagcaagatatctagctaaaaaagggataaaagttgttgtttctttagataccgaggaatatgaaaaaagccgtcaagcattgcttaatttaaatattgactcagttaaatatccaataccagattggacctctccatctatcaatcagctatataaatataatgaattactcgataaatataacgaatacaatcttgcaacccattgttgggggggatatggaagaacaggtgtttttttagcctctcgtcttatacataatcaagaagtacaaagcgcacaagaagcaatggctttggtcagacaacattattcagcgcatgcgatagaaatgaaagtacaatataatgctttggctagatacgccgattcttacgcgttatctgcatcagcaccattatcttcattaaatgtccactgggataatgagcatggtaatgatggtctagagttcgatcctggacataaaggagatccaacgaatattttttatgatgaagcagatatgtttgatctctctctctgccgagatggtgcgtttttggggaaagcagattatgaactatattctaaatatgaatcatcctctgatgaagagtcagaggatgaatttgataccaatttaagctctgatgaaagtacttactcaggggataccattgacgttaaatttttaggcatgttatctgacctaaaactacagtttgatcgaaatataccgacaacctctctttaa

SEQ ID NO: 299524 - DNA, 612 bp, Proteus mirabilis
atgaagaaaaataaacttatggtatttactgcaacattattattatcatctacaggtattatttcaacagcgtcagctgatgttacattaaagcatggctatattgatatcccacccagcagagcttttctttgttcagcaaaaggggagaatctaaataaaaattgtggtccgatacagtatgaaccgcaatccattgaaggggataaaggttttcctgaaaaaggacctaaagatggtgaaattgccagtggtggaaaggcaactttttctgctttaaatgaacaaagtgcagatcgctggcataaagtggcaatgaaaagtggcgaaaatacttttaagtggacattaactgcaaaacatagcactgaatcatggcgattttttattacaaaaccagggtgggatgttaataaaccattgacccgtgctgattttgatttaacacctttttgccaacgaaatgataatgggaaaatacccacagaaaccgtaacattaaattgtaatataccagaacgttctggttatcaggttattttaggtgtttgggatatcgctgatacgggtaatgctttttatcaagttattgatgctgaatttaaaaaataa

SEQ ID NO: 299525 - DNA, 1449 bp, Proteus mirabilis
atgattaatatcgtgattgtttctcatagtaagcatctggctgaaggtattgaagcgttagctaatcaaatgcttaacccaactcattgccgactagccattgccgcaggtgttgatgatgaagcgcaccctattggtactgacgctgttaaaattatgacggcgattgaatcgctcgccgaagctgatgccattattgttatgatggatttaggtagtgccatcctcagcacagaaacggcgatcgaactgcttgatacagaattagcgcaaaaagtcacactatgctcagcaccgctggtagaaggcacattagccgctgttgtcgcggcgtcatcaggagctagcttagaaaaggttctcgaagaagccaataatgcactaacccctaaaaagatacaattgggtgaaaacatcagtgattcagagccaaatgatgtcacaccttctattaaaatgcgcggtacagaagctcattgggtggtaaaaaaccctcatggtttacacgttagacctgcagcgacactggttgagctactgtcaaaatttcgtgctgactatcaattaataaagggagataggcgcattaatccccttagtttaaaccaactttcgcttattcaaattcgtcaaggcgatgaaataaccttaatagcttcaggggaacaagaaaaagaagctattgacgcctttttagcgctggctaaacaaggttttggcgaagcattaccggatgaactcacggagcaaaatttaactggtactctggtacccgcttcccctatcaaggggccggcttttatttggcatgagctagaattagcccctattgaaaatttatctgccccactcgatagcacactacagattgagcaatttaatcaagcgatacaagatacactcaaggatttgaagcactatgctgaaaaagccaatcacacattaggtgagcaaataggcgctatttttaacggccatatcatgatgctggatgatgaagaattacttgccaatgttatcgatcgtattaaaacagataaagttagcgctcagcagagttggacgaatgaaatgaaagaacgcattcaactctaccgtactctcagtgatccttatttaagggcacgggagttagatcttcgtgatctgcgcaatcaagttctttaccatttacaacagaaaaccgcccctaaatttaccccatcacaaccctctattttagtggctaaagagctatttccctctacattaattcagtttgatacgactaaattattagccattaccttagctgaaggagatagttgctctcacagtgccattatcgccacgcagatgggactgcctatgttagttaatttaggcgatggattattaaaaataaaagaagcacaaaaattaacacttgatctcaagaacagtgaattaattattgaaccaataagttaa

SEQ ID NO: 299526 - DNA, 1269 bp, Proteus mirabilis
atggtgaaaaataaaacactctttaaatcactcctcacaatgcccgttaaccaccataaacgtacaacgttaaaatggttaggtggtagtttactacttgccagtatgggcgcaaatgccatcgaaaaaaacaagtgttcaccaacacttcgttatcaacgtgctattaactacttaggaaaacatcaagctggagttatcacgccagaacaaaagcatgcttcatttattgcacttgatttaacagtaacaacccctgaggaagtagaaaaaatttttcgaacgttaactcagcggattgcttttttaacacaacctcgtgaacttaaggaaagccataatcctcatcttccccccgcggaatcaggtattttaggtagccaattatatcctgatgaattaaccatcacagtggcgttaggggatagtttttttgataatcggtttggttttcaagctaataagccaaaacgccttgagccaatgaagccttttcccaacgatcgtttagatcccaaatggtgtggtggtgatctgttacttcagttttgtgccaatagtcaagaaagtatcatttatgcattaagagatattttaaaatatctttctgggcaagtgtatgcacgatggaaaatagatggttttctacctgctcgtgatattgataatcaacaaacgccagtgaatttatttggttttaaagatggcacaggtaatgcccctgctactgatactcatttaatggatgatttagtgtggatcaccgataaacataatgaaccacagtggtgcttaggaggtagctatcaagcggtgcgactgattcgttttgccttggagttttgggatagaaccccccttgaagatcaagaaaataactttggtcgtcatcgtgcaacaggcgcgccgataggaatgaagcaagaaatggactcacctgaatttgcgcaagatcctcatggcgacaggatactctttgattcccatatgagacgagctgagcccagaacccccgaacgttatagtgccaaactgcgtcgtcgcagttatagctactcattagggctaacgccgtcagggcaattagatatggggcttgtctttgtctcatttcagaataaccttagaaaaggctttattgatacgcaaaagcgtttaaatggtgaaccgttagagcgctatataaaaccttttggtgggggttattacttcgtattacccggtgtcacacaagcaagcgatatattagctaaaggactatttacttaa

SEQ ID NO: 299527 - DNA, 1266 bp, Proteus mirabilis
atgaaattaagaaatgcaataataattggcgtaatatacacaccatcaatatgccaggccgtagtacagactgactacgaatatgataaacattattctaatcttgtttttattaataaagattcttcaacaacaattaaacccaatgaagctaattctaatcaagcagaaatattaatagcaccaaaaaattccaaaggtatttcttataataaatatgatgaatttcatgttaatgataccggcgttaccttaaataataaagaagttgccgctgagattattattaatgaagtggtcgatgaaacaacgtcattcttagcgggtgatatcgcgataactggcaatgcagctcatgttattatagccaacccgaatggtattgaatgtcagagttgtagcttttcaaatacattatctgaaacattagtaactggaaaacctattattgataatgatgaattaattggttaccaattagaaacatcaatctcttccgtagataaaagagcttttggtggtaagccaattgatcatattggcaaaattgtattcagtaacgaaaataatcgtagtgctaatcgttcttttaataaaattaatatcatatctaacaacattaatttaatagaagatgttatattttctgaaggcgatataaatatttattctggtaaacaaatcgtaatagtcaaagaaggtgcaaagatcttagaaaacggtatgcgcacacatgaatctaaccataacttacccagccagataatgttaggtgataaaaagagtgatcctaaaaaacaaggtttaatgtctgctaaaaatatcattatcaatgcttctgatacaactattaataattatggtcatttagaaagtagtagaagtaatagtaaaaaagcaatccaactgaatctcgataacacaagatttaataaccatggatatattctcgccaaaggcggatatgtaaatctgcaaaataattctttgttaaataatatgaaaaatggaacaattggaatgcaatattggcttgatgatagccatgctaatagtaagaacagtagtgtatatgtagggacaattcccaaagacacgattaagccaatgaaaaacttaactttagatattagtgaggatagccaactgataaatcatggtgctattacggcgatacgattatacactcgcgataagaatatgaataatattcaaaataatagagaagatatcaagttttatactaaatcactcaaaataaaataa

SEQ ID NO: 299528 - DNA, 1296 bp, Proteus mirabilis
atgaataaacaaattatgcctatcatgctgtctaatgaacctgcagcggcatgttggggagaaaaagcactaattagcactaacgaaactggcatgaccgttcacttaacggaagaaaaccgtttaggggccattcagcgtggtggacgcaaaattgatggtcaaggtattcgtaatgtggccctagttggtgacggctgggatttagaacgtagttgggcgttctggttaggttttagagcacctaaaggcgcacgttcaatcgaatggccacaattaagtgaagcggacaaaaaagaattagagtcgcgtatccgcattgttgattgggtgcgtgacacaataaataccccagcagaagaattagggcctgaacaactggcacagcgtactgttgatctgttttgtggtttagacaaagaagatatcagctataaaatcaccaaaggtgctgatctccgtgatcagaattatgcgggaatttataccgtaggtcgaggctcttcacgtgatcccgtctatttagcattagattttaatccaactaaagatgccgaagcccctatctttgcttgtcttgtcggtaaagggatcacctttgattcaggcggatatagcatcaaaccttcttcttccatgaattctatgaaagcggatatgggtggtgctgcaaccttagcgggtgctttggctttagctattacacgaggtttaaataaacgcgtaaaactattgctatgtattgctgataatatggtcagcggtaatgcctttaagttgggagacattatccgttatcgtaatggtaaatcagttgaaatcatgaatacggatgcagaaggtcgtttagttttagcagatggtttaattgatgctagcaactttgctcctgaattgattatcgatgcggcaacattgacaggtgctgctaaagtggccgtaggtaatgattatcactctgtattgagttttgatgacaaattagcgaatgaattattagcaagtgcagaccaagaaaatgaactgttctggcgcttaccattagctgatttccatcgtagccagttaccatcaagttttgctgatctcaataatattgcagcaccttcacataccgcaggtgcaagtacagcagccgctttcctttctcactttgtgaaagattataaaaaaggttgggtgcatatcgactgttcagcaacttacagaaaatcatcagtagagcaatgggctgctggggcaacgggatatggtgttcgctctatcgccaatctattattaacaaaagcaaaataa

SEQ ID NO: 299529 - DNA, 672 bp, Proteus mirabilis
atggaaaacacaaccatagagacactcttaccgagagaaaaactgctgttgcatggtgtagaatcgttaacagatgcagagttattggccatttttttacgtacaggcacctatgaaaaatcggtattggaattagcagactttttacttagaaagtgtggttctctctatcatgtgattaatgcggattatgaaacattaggctgttttaagggaataggcgtaggtaagtttacccaattacaagctattaatgagatggctcaacgctttattaaaataaagtttatgcataaagatatcctctcttcatctgcagaaaccaaaaattatttgcaaaaacgacttaattggcgtgatagagaagtatttgtcgtgctatttttagataaccaaaatcaaatgatcgcctgtgaggaaatgtttaaaggaacggtggatcgtgttgaagttcaccccagagaaattattcgccagtcgattaaaaagaacgcagcatcaattattttagcccataaccacccttcaggtctgtctgagccaagtcttgccgataagcagataacagaaaaaatttttacagcctgtcaattagtcggtataaaagtgcttgatcaccttgtggtagggcatgataactgtgtttcttttgctgaacggggttggttatag

SEQ ID NO: 299530 - DNA, 1686 bp, Proteus mirabilis
atgaaaaaaaaagttgttttattaacactattaagctgtttttctaccagtggattaagcgcaaatgaaacagaaaacttaggctcaataggtgaatcaaggcgtgcattgcaagatagccaacgtgcaattaaccaattaatagaacaaaatcgctatcaccaactgcaagaaaaagccgtaaatatttcacctaccccaaccctaattactgagtcagaacattgtttgcctataaatggcgtttatattcaaggtattactttacttactgagaaggatctcaattcattatctccgttgcctgagcaatgtattaagagtgctgatattaatcgcctcgtgaaagaactcacacagcgttatcttcaacatggctatattactgcacgtatccaatttttacgtcctaaccaacatggcgaattaggtctgtatgctatcgaaggttttgttgaacgtattgagggaggtgatcggggtgttaacaccacactactatttcctcgaatcaaagggcaaccattaaaactcgctacactcgatcaaggtttagatcaagctaaccgcttgcaatcaaataaagtcacggtagatattcttcccggcacaaagttgggaggatctgtcattaagttgtctaatcaacgtaaatcaccttggcatctcaatatcgctagtgataattatggacagaaaaattcaggccgctggttaatacgaacgaatgctagtttagatagcccattaggtttatctgactttgtgagcttaaatgccaatataaccacagataacccgaatacccgttttaatcgtgcttatactttgctctattcaattccttatggtggttttacttttagctcttttggtagttattcggagtaccaatttcaccaaaaactacaaacacgtactgtcaccttatatggcgataccactcaagtaggtattagaggcgattatgcttttagccgtagccaaaaacaaattgataccttaaatattcaagtcactcataaacgtatacgcaactactttagccaaattcgtttagatctcagtagccctaaattaaccactattgaattagggattaatcatttgcagattattccaaatggcgtattgagtactaatttgagtgttgaaaaagcagtcggctggtttggcgcagaggatacgccctatatcgctaacggtaatggtaacgactatcgctttacaaaagttaagctatttaccaattggtatcaacgcttttctctatggcattctacatttttattcaatagtactcttttaggccaatacagccacgacacactccccggcgttgaatggctaagtttaacagataaaaacgccattcgtggttttgatcaaagcacactttctggtgataacggtggctatttacgcaataccctctcctatccctatcggcttaacaacttttctatcacacctcgtataggggtagatatcggccaagtaaaacaacatggtaactacaaaggatggcaaggtggttacggcctaagctccggcttaaatgttcaatatcaacaagcacagctcgatcttgaagttgcaaaaggcgagttactgtatcaccaagcaaattccaataaaaccaaagatcctactcaactactggttaaattttcatacttattttga

SEQ ID NO: 299531 - DNA, 618 bp, Proteus mirabilis
atgcaagaatataatcaaccactgcgtattggtgttggtggccctgttggttcaggaaaaacagcactattagaagttctttgtaaagctatgcgcgatagttaccaaatcgccgttgttaccaatgatatatatacacaagaagatgcaaaaattttaactcgtgcgcaggctcttgatgctgatcggatcattggtgttgaaacaggaggatgtcctcatacggctattcgtgaagatgcttcaatgaatttggctgccgtagaagagttggctatgcgccataaaaacttagatattgtttttgtcgaaagtggcggagataacttaagtgcaacctttagccctgaattggctgatcttactatttatgttattgatgttgcagaaggtgagaagatccctcgcaaaggggggccggggatcacacattctgatctgctggtgatcaacaagatcgatcttgcgccttatgtgggggcgtcattagaagtgatggaagcggatacagccaaaatgcgtcctgtaaaaccttatgtttttacaaacttaaaagagaaagtaggtttagagacgattatcgattttattattgataaaggtatgttgcgacgttaa

SEQ ID NO: 299532 - DNA, 714 bp, Proteus mirabilis
atggcgattggtgtttacacctataaatgggtaactagtaatctactacaaatggagaaagatatgaaatcaattgcggtaattttaagtggttgtggtgtctttgatggcagtgaaattcacgaatcagtgctcacaatgcttgctttaagccaaaataaagctgaggttcattatttttcacctaatgattttcaacctactgtaattaatcatattactggagaagaaaaaacagaaaaaaggaatatgatggaggaagcttcacgtatttctcgtgggaaaatatcgcctttatcagatgctaaggctgaaaactttgatgcggtaattatccccggaggctttggtgcagcaaagaacttatgtaatttcgccacgaaaggtgttcagtgtgaaattaaccaacagctcttaacttttgttcaaaagatgcatcagcagaaaaaaccgctaggtttaatgtgtatcgccccagttatgttaccaaagatgttaaatgccccagtaaaactaaccattggtaatgatgcaaaaacggcagaaatgatcaccgaaatgggggggatacatattaattgtcccgtcgacgaaatagtggttgatgatgagtatcgggttgtgaccaccccagcatatatgctggcagaatcgatagcacaagctcaggtggggattgaaaagctggttaaaaaagtactagaaatggcataa

SEQ ID NO: 299533 - DNA, 2337 bp, Proteus mirabilis
atgaaattgctcaaagggcttgcccaatattatgtagatttaatgatgaggctagggttaatccgcttctcattattgttagcatccgcattggttgtattagcgatggtcgtacagatggccgtgacattcctacttgccggtgatgttaccagtattgatctcgtacgctctatcttctttggtttgattattaccccttgggctgtctattttctttccgtggtggtagagcaacttgaagaatcacgacgtcgtttatcgcggatggtcgataaattaggcgtaatgcgacagcgagacttagagctgaattcacaattaaaagagaatattgagcaattaaatttagagatccaagagcgtgaaaaagtagaaaaagcccaccttgaactattggaaaaactcaaaagtgaaatgaagcgtcgtgaattgacgcaaattgaactagagcaacaatcttccttgttacgctccttcttagatgcctcgccagatctggtctactatcgcaacgaagataatgaattttctggttgtaaccgtgctacagagctattgaccggtaaaagtgaaaagcaattaattggcttaacaccactggatgtgtatgacgaagatatcgccgtcaaagtgatggaaaccgatgagaaagtctttcgccataatgtgtcactcacttatgagcagtggttggtgtatccggatgggcgtaaagcgtgttttgagttacgcaaagtgcccttttatgaccgaattggtaagcgtcacggcttaatgggctttggacgtgacattacagagcgtaagcgctatcaagacgcgttagaaaatgctagccgtgataagaccacctttatttcaacaatcagccatgagctacgtacgccgcttaatgggattgtgggattaagtcgtattttattggataccgaattatcaccagagcaactcaattatttaaaaactattcatgtcagtgccataacgttaggtaatatttttaacgatgtgattgaaatggataaaattgagcgcagaaagatccagcttgataaccaacctatcgactttactgaatttatctctgatttagaaaacctatcgggattattagtccaacctaaagggttaaaattcaccttagaagcgcaagaaacgttgccgcataaaattactaccgatgggactcgtttgcgtcaaatcttatggaatttaattggtaatgcggtgaaatttacccaagaaggggaaattaaagtacgcatttggcaagaagcgcccgataagttgttctttgaggtgaaagatagtggtattggtatccctcaaggtgaacttgagaaaatcttcgccatgtactatcaggtcaacgacagtcaaggtggacgttctgcaacgggaacgggtattggccttgctgtctcaaaacgcttagcacagcatatgggaggtgatattcatgttgagagtgagttaggacatggttctatctttacgctttccattgtcgctcctgcgattaaagagcaaagtgattttgaagaggatgatgaattattgcttcctgcacttaatatcttactggttgaggatattgagctaaatgttatcgtggcatgttcagtattagaaaaattaggcaacacggtagatgtggcgatgacagggcaagaggctttgcaaatgtttaagccgggtgaatatgacttagtgctgttagacattcaattacctgatatgaccgggtttgatatttcaagaaaattacgtcaagagtttgatagtagtgaattgccgccattgattgccttaaccgcgaatgtcttaaaagacaaaaaagagtatttagacgccggaatgaatgatgtgctcagtaaaccgctttctgtggatgcgttgaccgccattattaataaattctggggagatgaagcggtttctgtgacatctagtgagtcacctcaattgttgagtaaaaatgaagagttacttgatatcgacatgctgaatcaatacatcgaacttgtcggacctcaattaatcactgatggtttagatgtttttgaaaagatgatgccaacttacctgtctgtccttgaatctaatctgacggcacgtgatcaaaagggcatcactgaggaaggacataaaatcaaaggcgcagcaggctctataggtttaaaacatttacagcaactggcaaaacagatccaatctccagaattgcctgcatggtgggataatgttcaagaatgggtagatgagttagaaagagattggagaaaggatgtagaaagtttaagaaactggttggcagacgctagaaaaaaataa

SEQ ID NO: 299534 - DNA, 4458 bp, Proteus mirabilis
atgctctatcaaaaaacagcggaaaaagagaattgtggttttgggttaatagcccatattgaaggtaaagccagccataaaattgtcagaaatgcgatccatggccttgcccgtatgcagcatcgtggcgcgatcctttctgatggaaaaaccggcgatggttgtgggttattattacaaaaaccaacgcgtttttttcagttaattgccgaggaaaatggctggcatttagcgaacaattacgcggtaggcatgctgtttctaagccaagataatgctatcgctgcacagtgtcgtcaaattgttgaagaagaattgcaacgagaaacactctctattgtcggctggcgtaaagtaccgactaacacggatattttaggcagtatcgctcgctcttctttaccgtcaatagaacaaatttttgtcaatgcccctgccggatggcgtatcaatgatattgagcgccgcttatttatcgctcgtcgccgaattgaaaaacgtattaccgataatgatttttatatttgtagtctttctaatttagtgacggtctataaagggctgtgcatggcaattgatttgcctcgcttttttaccgacttggctgatttacggatggaatcgtctatctgtctttttcatcaacgtttttccaccaataccaccccaaaatggccactcgcacaaccttttcgctatcttgcccataatggtgaaatcaataccattaccggaaatcgtcaatgggcaaaagcaagagcctataaatttcatacgccactgatccccgatttacaaactgcggctccttttgtaaatgagagcggctcagactcaagttcactggataatatgctcgaactctttcttaatgggggaatggatattgtccgcgctatgcgcctattagtgccacccgcatggcaaaataatccacaaatggatgatgatctacgtgctttttttgattttaactctatgcatatggagccttgggatggaccggcggggatcgtgttatctgacggtcgctacgcagcctgtacactagatagaaatggcctgcgtcctgctcgctatgttatcacgaccgataatattattacctgtgcttctgaaattggtatttgggattatcaacctgatgaagttctagaaaaagggcgagtcggccctggcgaactcatggtaatagacacttatcaaggtcgcattttacattctgctgaaactgacgaagatttaaaaagacgacacccatataaactttggttagagcgtaatgttaaacgccttatcccttttgaacaattgcctgagccacaagccacaggagagcgcgcttttgatgatagtttactggcgacataccaaaaacagttcgcttatagccaagaagagctggaaactattttgcatgtactggctgaaaatgggcaggaagccaccggctcaatgggagatgacacgccctttgccgtactttctcagcgtccacgcttaatttatgactattttaggcaaaagtttgcgcaagttaccaacccgccgattgatccattaagagaagcgcatgtgatgtctttagcaacctgtattggtcgcgaaatgaatgtctttagtgaagcggagggacaagcacatcgtctcagttttaaatcgcctattttgctttatagtgattttcaacaattgctcaatcaagaaagtccttattattcatctatcacgctagatatcacctatcaacccactgaaaataatttagaaaccgcactacacattttatgtgaaacggcacaacaagcggttaatcgcggcgcggtattattggttttatccgacagaaatatcactcaaacacgattacctattcctgcgcctatggcggtaggcgcggtacaaaaagccttggtagataataacttacgctgtgatgcgaatattattgttgaaaccgcaagcgcccgtgatccccaccactttgctgtactattaggttttggcgcaactgctatttacccttatctggcttatgaatccttagcgcaacgagtcgataaaaaaatattgtcgggtacttatgcgcaagtcatgctcaattatcgtaatgggatcaataaaggtctgtataaggtaatgtccaaaatggggatctccaccgttgcctcttaccgttgctcacagctatttgaagccgtagggctgcatgataatgtcgttaaacgttgcttcgatggagttgataatcgtattaacggtgcagattttagcgattttgaacaagacttatttaatctatccaaacgcgcttggctaactcgctatccactagaagctggcgggttattaaaatatacccatcaaggggaatatcacgcctataatcctgatgtggttcaagcactgcaaaaagcggtaaatagtggcgactatgctgattaccaacattattcccaattagtacaacaacgccctattaccaccttgcgtgatctattagctctcaataatacaacgccgattgcgattgaggatgttgaagcagaaagtgaactgtttaaacgctttgataccgcggcgatgtcaattggcgcattaagtaaagaagcccatgaagcccttgcgcaagcgatgaatgccttaggcggattttcaaactctggggaaggtggtgaagatccggcgcgctacaacaccaacaaagtttcgcgtatcaaacagatagcttctggtcgtttcggtgtcacgccttcttatttgatgagtgcagatgtattacaaatcaaagtggcacaaggggcaaaacccggtgaaggtggccagttacccggtgataaagtcaccccctatattgcacagttgcgttatgccgtaccgggagtcacactgatttccccgccccctcatcatgatatttactctattgaagatttagcacaactgattttcgatttaaaacagattaatccccgtgcgcttatttctgtcaaactggtctctgagccgggcgttggtacaatcgccaccggagtcgctaaagcctatgcagacttaattactattgcaggttatgacggcggtacgggtgctagcccattaacgtcagttaaatatgcaggtagcccttgggaattaggactagtagaagcgcaacaagcattagttgccaacaatctgcgtcataaagtgcgtttacaagttgatggcggattaaaaacgggggttgatattataaaagcggccattttaggggctgaaagttttggtttcggtactggaccaatggtggcgttaggctgtaaatatctgcgaatttgccatttaaataattgtgctatgggggttgcgacccaagatgaaaccctacgccgccaacattttcatggtttacctgagcgcgttatcaactatttccgctttattgcccaagaaacgcgtgaacttatggcacaacttggcgtaaggaaaataaccgatttaatcggcagaacggacttgctttcttgcttagagggaataaccagtaagcagcaaaaattatcactcacaggattattagaaaccgcgacctctcctacaggtaaagcgctctattgtcaggagcacaatgatacttatgataaaggagaattaaatcaacgtattgttgcgcaaaccatcacgggtgtcgaacaaaagataagtcaaacccactattttgccattcgtaatacagaccgttcagtgggagccacgttatccgggatcattgccaaaacctatggtgaaagtggtttatctgctacaccaataaaacttcactttacgggtactgctggtcaaagctttggcgtttggaatgcgcaaggcgtggaattaaccttagtgggcgatgcaaatgattatgtaggaaaaggcatggcgggtggacgcattgttatttcaccgccagtaggttctgcatttaaagcccatcataccactattatgggaaatacctgtttgtatggcgcaacaggtggaaaactgtatgcatctggattagccggtgagcgttttgcggtcagaaattctggcgccattgcggttgttgaaggggttggggataatggctgcgaatatatgacaggcggtattgtctgcattcttggtaaaacagggattaactttggtgcgggtatgacggggggctttgcctacttgttagatgaagatgccacactatcacaacgtatcaataacgcctctattgagctacttcccgtggctaattatgcgattttggcagagcatcttcgcggtatgatcgcagagcatgtccggctaactggctcccaacaaggggagagactgctttcccaatgggaatattggtcacaacactttaaattagtcaaacctaaatcgagtgatgtacatgccttattaggccatcctcgccgttcagtcgctgaattacgcgttcaggcacaatag

SEQ ID NO: 299535 - DNA, 1158 bp, Proteus mirabilis
atgttgaagtttatttatgatttagtaaaaagtgttggttttggggctaaagtagccacacttgaagtgtatgaatggaatgaatatgatgtaaaaaagaagagactagctaataatacccagtggggtaatgttgccgtccagcatggaaatttggaatttaaattattgagtttgacccatgctataattaaaacggattttttgattcaaaggaatttgaatttttatggtattgcgtttctgatgtcatcgcatgagcttataaaaatatcaaagaatggaaatcttaggcttattgatgatattgatggatttttaaatgatgttaccttaactagttttattggtaggcttggacaagggattacattattaatagcgcatcgcttaggctatagctatgtttgtcatttggcatctgatgctaaaataaaatcaattatagcatcttcagcggggaaaaatggtactaaaaaagaaaagattgccgattttatttttgagaataacaataaagatagaacgataatcgaatctaaatgctcatattcaattcaagacttttctccctcagatatcaaaagaattttaaaaccagctttaaatgaacaagtaaatccatgggttaataataaaatagccaatattacgaatggatatgtggtgcattctgcattaaggtcaatcggtcaaactaacaactcagctattacatatgttgatcctcccgcaaatgttaatatccctgatttcgattttccaattgaatgggtgaaggctaaaaattatgcagcatggctttctttctgtggttttcataaaatggcatctggattatttagtgatataaaggcaaatctacaccttgtcaatttgaaagttataagtatttgcgattgtgattttgcaattctcaattcgtcacatcgcacgagtggcaaagctatgctggctggaatagatgtaaaaataatgttggcattagctgattattgtaaagatgatagtcgtttattaaatagttatgagggtgttaacattaatatagtcgagcaagttggggagacaatcagcatcttccctgatggcacattattaggaatgatagataactctcagtttcccgttaaggttcaatccttttgggttttatga

SEQ ID NO: 299536 - DNA, 1953 bp, Proteus mirabilis
atggtgcttaatacatataaaataaatgaaaatcttaaacttacattgtcccaaaatgctcttgatcatgttctccacggtgaaatcactgataagatatttgaaactgataatgggcgtattgctaaaaaagtaatctctggaggattacacacctattcaggatggcagtcttatttaagtaaagtttccgggctgaaaaatattttattctatgataaccaagtcaatgacggatggtactacgagcgagaacttcaaaatggaactattttgttaaagttaccagagtcagttttcacctctaaagcagcaaagatgacattatttcctgagaaaaattataaatcgggatttctctggaaaacattatttccacagacagttggtgaaagcgaggttctcgatttactgaatgacgctttgttgaacatcagcaagcatgaaagccgtgatggtgagttaatttgttattataaaatagacgagccgttgaattgtatgaggatcgctgttctatatagaaatggtcaaattaattcattctatcctacatggtctcaaccaaatactgggaataatggcaaacctttctcattttttgataacattgggcatgttatttcagagtcttcatttgttaataaatcggaaattattgatattacagatgtggggctgttttcgaagttatctactcttgaggaaattcaagatgtgacgcctgaattatttcttagtcggggtgcagtaacccagaatattcaggaatgggacgacaaacgaattgactcaataaatttatttgcggggaattgtagcctcactgagatactggagttatataactatttgaacgatgaaggaatatttaagtatcatgacatagtttcacagaatgcgtactcccatttcttaccaaacattaaattgtcagttggctttttcaatgcaataagtttcaatcaaaatatagttgaaggaattatggctttgtttttttacgatcaaaaaaataaatcaaagctatatgccaataccgttttgcatttaattagtagtatgtttacatccccacttatggatatgtgggctaaaaagagaattcattacctaattgctagtcttactttaaagtatcatgatagaaacttccctgcggagtatattgattgcctttcaaaatcgccaactcgtagagagttctattcggaatatttctatgaaagtcataataagaaaaaagactataactccattgaggcctatgaagaaatcgctaccctttttagtataatattagcccctccgcagaatgaatcagtaagctactcacattttttacattatttttcagataatttaggtgaatcttattcgaccaactttactgacgaggaaaggactgtttttgtacttaaagcctacccgggtgattactatgaacattatgttcaggatagtcttaagttctttaatcaaacagttttcactcactccagctttattctagaagaatatttggaattttttgctaaagaggatgtagcaaaaccaatcgagctccatagagtaatatatgaatactataaacttcaagtcgctcaacgttacaggattaacttgaattactccgaatattatgagattcccgaggtggttacactccctatcaagaaatatgatgtttacgccactatattaaagcatgaaagaaattctaataggttcatgacggacactattatagaatctgttaagaaatatctattggttattgaagatactaatttatcgaaggtcttaaaagatattgaaaaagtggatagaaaacagactccgagatttccgattccatacaatttgattgttgagatggtaaaaagtccggagtcagtaaatgttaatcacctaaaggctttaagagtatcaggggtagacgcaacgatttaa

SEQ ID NO: 299537 - DNA, 291 bp, Proteus mirabilis
atgaaaaaacttatattgatagttttattatttccattttttatacaagctgaagtttcagaaaaagattttattattgatacgattaatatagcttgtgcggaacataaagatcctgagttttgccgttggcaggtagaaaatataagtgctatatcaagtataaacacattaacttattacagatgtaagcttgataataaaaaagacaaagagtgtctaaatgcagtagagatgtttgattatatacaaggaaagtatgataaaaatatgaacgatatgaataaataa

SEQ ID NO: 299538 - DNA, 390 bp, Proteus mirabilis
atgtttttaaagaaaaaagaatttacttatagtgataacactattgagttgtttgagttatcagcattacagcgtattgaatactttgattttttggtcgaacaatctcaaaaaaacgaagatgttgaaaaggctgaaggcataaaaaaaacagcactcattattcgtgcaaacacagaatcgaatgcctggttagtgtctcgatcattagcacacggtgaaacgcgtgatattgagcaggtttatcatgaagtgctttcgctgtggccaccagaggcgcttggcaaagcagcaaaagaagtcctagtcattagcgggatggctcaaactgaaaacacggaaagcgaaaaccatcaaggtgatgttcaggcagagccactggaaaagtag

SEQ ID NO: 299539 - DNA, 141 bp, Proteus mirabilis
atggctagtcaaggttttaagaaccccaatcaattcagaaagcaattagatgaacaattacaggataagtatttaaatcctaacgggtatcagacaaaggataagattaagaatcctatgcccccaccaaagaaaccttaa

SEQ ID NO: 299540 - DNA, 222 bp, Proteus mirabilis
atgccagtacccaaatatagatacacagagattggcttgactgggcgtttcagagttcgacggcaggctattacggggttatcaataatgcaggttgaaactgaattaaggcattcacgctatcctgtgcagattcccgaacctgattgcagagtaacaactcgttggcgagatgcaacttatgaagaggccatacgaatacagatagattacggcggttaa

SEQ ID NO: 299541 - DNA, 1740 bp, Proteus mirabilis
atgaaaggcttgcaatttcaacgtctagttctgctgtcagattcaaaaaaatcagcgaatcagttcgagtttccgaagagattcaatctcgttacaggaaaagacaatagtattggcaagtcaacattagtaaaaagcttatattgggcaattggctgtgatcctaaatttgataaagaatggaaatcaaatgatgttaaaacgatcctatattttaaaataaaccaacaagaatatgttgttagccgttatgttgatgggatctatttcggaaagaaagatactcctttacagttttactcaaaaataacaggtcaatttgctatagattttgcaagagaagttggttttgatttattacttgcaagtaaaaaaaataacttagagtgtccaccacctgcattttattttttaccattttatatcgatcaagaaaaaagttggaacgaaccatggaatgggtttgaaaacttacaacaatacagtaattttagaacaattcttataaaatatttctgtggttatttatcgagtgcacattttgaactcgaggaagaaatatttgcacaaaaagagatagaacaagaagctatacataaaattacgaggattgaagaagcagtaagtgtacttgaagaagttgctccagaaacaacaacagtagcaattactcaagcagagttggattatattcaagcagaaataaatgacgaactcatgagattttctgatgttcaatctagtttatttgaacagcaatcaattttagccaatgagattcatgagttagaacaacagcatctaattgtcagtacttcagcgagagagctagaaaatgattatatttttgcagtagaaaatgtgccttcagattctcttgaatgtcctttatgtggtgttttacatgataattcattacttagtcgtgcaggatttttagcagataaagaaaatttagagaaagaagcagataaaattaatcatcttcttaaaaataaatatcaacagagagctgaattaatagaaaagttaaattttgtttcttctgaagttgagagaatcaatgataaatatttaaaagaggaagcatctgaaaataattcagacgaacaatgtagttatgaattagctttgtattcaatttctcagaagaaagttaataataatatacttaagaagaaagaaaaatatattgctcaatcgaataatgctaaagcaaatcaaagtgacataaagaaaaaacaagctaagcttcttaaaaaagaagataagaagacattaaatgagctatttattgggagtttggttgaaaatatagagattttagctgcaacaggggtaaaccttaatggagttaaatccccaatggattataaaaaaattcttggaggtggtgcagcagaaggcactcgtggaacattagcctatcaattatctattcttcggcagattgattatatcaatcactgtcaaatagcgccttttgttatagatactccaaatcaacaagagcaagctaaacatagatataaacaagtgattaatgctgttatgaataatgttcctagtgggtatcaagtgattttgtgtgcaatgaatgataatgacattttatctaaatataagaaagatgctcatgttatagaactagataataatcggttattgcaacctaaagcttatgaggaacttcgtagtgagtttgaacgagtcattttagccaataaaattagtcattaa

SEQ ID NO: 299542 - DNA, 1110 bp, Proteus mirabilis
atgaataattcatgtttacttggtgtagtgtatatggcaaataacccacttgctgaagtccagcgtgaatcagcaggagcaagtactttcggaaagtataattttcaatttcattgggcattatgtgagattattgaaaagcacaaaaaaaatcaggaatatgctttattaattgaatatcaggaagatgttgtaattgctaatagtttagatccaaacaatgcacagtttgaattttatcaagtaaagaatcagatagctaagtatacatcagcatctcttacaaaaagggataaaggtaaaaataataagcttaaaaactctgtgcttggaaagctacttagttcttgtgttaatacttcatatgaaaatagggttgttaagattgggctagtttcatcaagtggatttagcctaaatattgataaagatcttaaactagatgtaatcaagataggtgatttagcaaaagatgatttagctagtttaactaaagatataacagatgaactagggattagtgttttgcctgaacatctgcaatttattgttcctgaaatacagttaaaaaaccaagaagattatgtattatctcgttttgcataccttgttgatgctatatttcctggggcgctatgtaatccagtaaacatatatcgttctattgttgatgaaatggggcgaataggtcgtattgaatatgattataaagattggataagacttattgataaaaaatcactcacctcgacagatgttcacaaagtgattactcaatatacaagccatccttgtattgatgatttaaaaagtaattttgatgatttggccactgatttaggttggagatctaagaaaaagcgcatttttaaaggtaaaatcacttcactagcactacgtagagctggttttatgagtgctttagatattgatattacggagtcatttaagcaatcttatctcaaagttgatgaagataaatatgatgatgatgctacatatatagaagctttataccgacaagctgttgatgatgatttacttcaaaaaataaataataatgaagacgagttattgttagaagtcatctactgtttattaaaggcttaa

SEQ ID NO: 299543 - DNA, 207 bp, Proteus mirabilis
atgacatccaaaaaatacttacttgtatatgaagcattcgacaacacaaatgtattcttattaaaaggaaacgctgccatagagatagatgcaggaaaaggtattgaggaaacattaaatatttttactgaaatcgccagctctgaagctagaaaaattgataaatatgctagacgagtgacaatagtaagcgtaatcgcgctttaa

SEQ ID NO: 299544 - DNA, 828 bp, Proteus mirabilis
gtgggtatttctgcctcaatgaatgaaccttatgataataccattatcggggaagcaccttcaccctaccacactaaaaaagggggaagtgatgatattaaaggcaatttcctgacgctgcttatcacgcagatgaaaaatcaagatccgacaaacccaatgcagaataatgagttaacgtcacagttagcacaaatatctactgtcgaagggattgaaacattaaataaaacagtaaataccattgttgggcaaattgaccaaagccagacattacgtgcatcttcattagtggggcacggtgttatggtttcgggaaataagattgctgtttttcggtctaatgatggaaaagatgccacgacagataaacccgatgatggtgatataacaaatcccaatatacaagatgaaaaaacacgtcagaaaatgggtatgtataaagcagaaaatacagattctgaacctgctgacgataaaccgcttttttcaacaccatttggtttcgaattacttagtcctacggattctcttacgataaccattaccaacgccagtggtgcggcagttcgtacgatccagatggataaaaagatgctgccagatgtttatgacttctcatgggattgtaccgatgaagatgataatcctgtagcagaaggaagttataactttactgttaacgccacgcttaatgatgcagccgtccccgttaagacactgaattatgcggtggtgaatagtgtgtccatggtcaatggttctgctcgcctagatattggcttaggcaatactgtttcattggacgaaattcgtaaagttttttaa

SEQ ID NO: 299545 - DNA, 1197 bp, Proteus mirabilis
atgaaaaaaaactcattatttactgtttcactgttatctgcgtttatttcattatcttgttatgctcatcaagatgttactttaaacgctgattcattatcagatgctcgcgtatctgttagtgatgacacaggaaaaacacaagttgaagtgataaatactaatcaagataatatcgcccatatctattatgatcgttttgatgttagtgaagatggtttattattaaaaaatgataaagcagaattaattattaatgaggttgtttctaaaaagcgctcaatgctagatggtgaatttgagttacaaggaaaaaaggcgacagtggttatagctaatcctaatggaatatcttgtaataattgttctttttctggttttactgagtctaatagtattaagttaattactggtagcagtacagggaaattttctaagcaatttactttaacagatgagcttattgattttagatttactgataaaataactaaaaatgaattttcgcatatcaatcgtcactataaagatatttcatctagaacgataaatattatatctaataatatatcattggaagaaggtgattttaatgctgaatatattcgttttgatcttggtttaacaagatttaaccttaaagataaaaataaatataataaaagtgcatctttacatataggcaaagaggctaaattaaatagtcggaatttaataatagcaggatataattcctcggttagtaatagtggtgatattaatacgttatcattaattgcagcggttgattactgggacaacaatgatcgcgcatcgatatctctaaataccgatgataatttatatagaacaccttatgatgatagaaaaaaatcaatgttaattgtatcgggctattatttgggtggttataaatcatcatttgatattaaaaacagtaagttagatatttatgcagatactatgctttttgataaaaatgttactatctttaatagcgatttaacagcatatggaaaatctttcgatatattagacattatgttaatagatggctctcttaaagttaattcagataatgagataaatatttggggtaaaatcaaggggatgggtcgtgttgaattacaaggtaaatatggtaattttaatagcagcgataaagtagagttaacagaagaagagctgctggattag

SEQ ID NO: 299546 - DNA, 396 bp, Proteus mirabilis
gtgtacacctttggctgggtagggatgcgactggtgtctgagcacagcagcgcaacgccatataccacggtttatcatgcttacaatgaccaaagttatacccctctagcccgcattgaatgcacggataacccgcttaatccgcaacgggcgatttattatacgcacagcagtttaagtggcttaccggaagcgctgaccaacagtgacggtgaaatagtctggcaagggcaatacagtgcgtggggacatttacagcgtcaaacccgccccacaagcacgtttaaccgtgaacagaacctgcgttttcaagggcagtatttcgacaaagacaaatttgtcgggaacaaatttgaacagcgcttgcgctggcccgtaggacgagtatcaggatga

SEQ ID NO: 299547 - DNA, 408 bp, Proteus mirabilis
gtggatccttggggttgggctgaatttgatgttgatagttatgaaaatttgagagcagcagtaaaaggtggaaatactggtttagatgcccatcacgctggtcaaaaagcaataatggcagatcttgtttcaggatatgaccctaaaacagctccagctattctagtttctaaatcagggaatacagtatcaaaagagggagtaggtattgtttcacgcagtaaaataaattcctcgacaggtttgccgtttaaaaatgcccgagaattattggcaagggatattagggagttacgacgtgtatactcagatattcctaatagcgctcttaaagaactgatcgcaaaaaataaagaaatgtaccttgagatgagaaaaacaaataatacgacgataaagggatgttag

SEQ ID NO: 299548 - DNA, 411 bp, Proteus mirabilis
atgaagcaaatcattattagcgaaggttatcttgttagcttttgggtacctatttgtgaagggtatattatccctgaaaaatacagaggattaaacttaaataatcatgatagtgctgtgaaacttattaatgattacttagtccctatggctaggaaatacaaatcaaaatcatggcattatttttttaaagaaacattaagatatgctataaatttttggagtaacgaacgattaattaatatttatatggaagtgttacccgaaatacctccacctcaaagtaagtatattagaatgaaagatttttatttgttaatttggacaggaatgtaccctaatgaagaatgtgttgtatatacacctgaactttataaagaagttccttccgtagaaataggctcattctag

SEQ ID NO: 299549 - DNA, 2115 bp, Proteus mirabilis
atgcgctctctgtttgccagcacaggccgaggtctggaagaattattaaaaactgaacttgaacaccttggtgcccagtcttgccagattacgcaaggtggtgtctatttccgtgctgatgataaaaccatgtatcagtctttgctctggagccgtttagcttctcgcatcatgcttccgctaaatgaatttaatgtctacagtgatctagatttataccttggtgtgcaagcaattgattggagcgaagtatttacagttaatcatacttttgctattcactttaatggcactaatgatgtgatccgtaatagccaatatggtgcattaaaagcgaaagatgctatcgtcgattcattccaacgtaaaatagggcaacgaccggatgttgctaagcaatcaccggatattcgtttaactatacatctacataaagaaaaagcgtcattatctttagatctcagtggcgatggattacatcaacgtggttatcgtgacttaacagggcaagcaccgctaaaagagaatctagccgcagcgattattatgcgttcaggttggaaaaccgatacaccattaattgatcctatgtgtggctcaggcactttacttattgaagcggcaatgatggcgacggattgtgcccccgctttaaatcgagtccattggggttttcgtcattggttaggacataatgaagcgctatggaaagaggtcacccatgaagcatttgcccgcttccgtgaaggtaaaaagaatactcaagcgcgtttttatggtttcgatgtagataaacgcgtattagatatggcaagagccaacgcacgccgtgcggatgtggccgatttaattacttttacccaaggtgatgcagcaaaactgactaatccagtatccacgggtgttaaagggacgattattagtaacccgccttatggtgaacgtttagaaagtgaacctgcactcattgccttgcatagccagttagggagagcggtaaaagcccatttcccaggatggcgattatcactttttagtgcctctcctgaattattaagctgtattcagttacgtgctgagcgtgaatttaaagctaaaaatggcccgttagattgtgtacaaaaaaactatttattatctgaaacaccctcgacgattaatacacgattggcggaagattttgctaaccgtttacgtaaaaatgagaaaaaactcgcaaaatgggcaaaacaacagcaaattgaatgttatcgcttatatgatgctgatttgccagaatataatgttgcggtagatcgctatggtgaaaaagtggtgatccaagagtatgcgccaccaaaaaccattaatgaacataaagcacgccagcgtttgtttgatgtgattagtgccaccatggaggttttagcattacgctctgatcaactaattttaaaaactcgtcaacgccaaaaagggaaacaacaatatgaaaaaatggcagagaagggggatttctttttagttgatgaatttggtgccaaattctgggtgaatttaaccgactatctcgatactggactgtttttagatcaccgcattgcacgcaaaatgttaggtgaaatgagcaaaggaaaagactttttaaatctctttgcttataccggtagcgcgtcagtccatgctgggctggggggcgctaaaagtaccacaacagtagatatgtcacggacttatcttgaatgggctgagaaaaactttcaagcaaatggattatcaggtagacaacatcgtttaatgcaggccgattgcttacagtggctaagccaaagtaatgaacagtttgatgtgatttttatcgatcctccgacgttctctaattcaaaacgtatggaaaatacctttgatgtacaacgtgaccatattgaattaatgaaacatctaaaacgtttgttaagaaaaggcggaacaattatgttctcaaataataaacgtggtttcaaaatggatcatgaagcattagcgaatattgggttaacagcaaaagaaataacacaaaaaacgttatcgcaagattttgcacgtaaccgccaaatccacaattgctggctattaaatcatgctagtgaggaataa

SEQ ID NO: 299550 - DNA, 1305 bp, Proteus mirabilis
atgcaagtttctgttgaaacgactcaaggcctagggcgtcgtgtcacaatcaccgtaccagccgctgatatccaaaaagctgtagacagcgaactgaaaaaagctgctaaaactgttcgcattgatggtttccgtaaaggacacgtaccaatgtctatggttaaacaacgttacggtatgtctattctgaatgatgttttgggtgatttgatgcagcgtaatttcatcaacgctatcatcgaaaacaaagttaacccagtaggtgcacctgattacaaaccagagcaatacaaagaaggtgaagactttgtatactctgtagaattcgaagttttcccagaaatcgaactgaaagatctggaaagcattgaagtggtaaaacctatcgtaacagttaaagacgaagacgttgataacatgttagaaactctgcgtaaacaacaagcagagtggaaagataaagcaggtgaagttgcggcagaagatcgtgtaactgttgattttaatggttctattgacggtgaagaatttgaaggcggaaaagctgaagatttcgtactggcaatgggccaaggccgtatgatcccaggttttgaagaaggtcttatcggtcataaagcaggtgaagaattcactatcgatgtgactttcccagaagattaccacgctgaaaacctaaaaggtaaaaaagcacaatttgctatcaacctgaaaaaagtggaagagcgtgaactgccagaattaactgaagagttcatcaaacgcttcggtattgcagatggttcagttgatggtttacgtgctgaagtacgtaaaaacatggaacgtgagctgaaaaatgcgatccgtacacgtgttaaatcacaagttatcgatggcttagtgaaagctaacgaagttgacgtacctgcggctgcggtagatagcgaaattgaagttctgcaacgtcaagcagcacaacgtttcggtggtgatgaaaaacaagctctgcaattaccacgtgaattgttcgaagaacaagcaaaacgtcgtgttatcgttggattactgttaggtgaagtgatcaatagtaatgaactgaaagcagaagacgagcgtgtgaaagcgttgatcgacgaaatggcttcagcttatgaagatccatcagaagttgttgagttctacaataagaacgaacaactgatgaataatatccgtaatttagcattagaagagcaagcggtagaaaaaatcttagcaactgctaaagtaacggaaaaagaaactaacttcactgaactaatgaacgaagttcagatgggttaa

SEQ ID NO: 299551 - DNA, 624 bp, Proteus mirabilis
atgtcatttaacgacacccaggaacaattcgcacctaatatggctttggtgccgatggttatagagcagacttcacgaggtgagcgctcttacgatatttattcacgtttattaaaagaacgtatcattttcctgactggccaagttgaagatcatatggccaatctcattgttgctcagatgttgtttttagaagctgagaacccagaaaaagatattaacctgtacattaattcaccgggtggtgtgatcactgctggtatgtcgatttatgacacgatgcaatatatcaaagcggatgtcagtactatttgtatgggacaagcttgttcaatgggtgcatttttattatctgcaggtgcaaaaggtaaacgtatttgtctacctaactcacgtgtcatgatccaccaacctttaggtggataccaaggccaagcgacagatattcagatccatgctcaagaaattttgaaagtgaaatcacgcatgaatgagttaatggctcaacatacgggtaaatctattgaagaaatagaaagagatactgagcgtgatcgtttcttatctgctaacgaagcgttagaatatggtttagttgataaagtttatacacaacgcagctag

SEQ ID NO: 299552 - DNA, 1788 bp, Proteus mirabilis
atgacgataaataataataaatccattaaaacgttattgccggccttaaaaagattattagcttatggcaaaacctatcgcaaaccgatgacattaggtgtggtgatgttatgggtggctgcgattgcagaagtgggtggacctctacttattagttattttattgatgctaaagtagcgactcatcaagttgaatggcgaggcgcattaggtcttgcgggtgtttttattctattacaaattattgcagcactattgcactattaccaaacaatcgtctttaattatgccgctgttggggtagtacaacagttacgagcagatgtgatgagtgctgcgctaaaacagccattaagtgcatttgataatcagcctgtaggacaactgatttctcgtgttaccaatgatacagagactatcaaagatctatttgttaacgtctttcctgctctatttcgtgcaatagcattggtggttgtaatgttaatcgctatgtttttactcgaatggcaaatggcattagtagcgatgactattttcccggcggttattggtgtgatgatgctttatcaacggctaagtacaccgattgtacgcaatgtgcgtcattatcttgccaatattaatgatggctttcatgaagtgattaatggtatgtcggttatccagcaatttcgtcaacaagctcgcttcggtaagagaatgtcagatgatagctggcaacattatcaagcacgtatgaaagcactaaaacttgacggattgttattgcgcccgttactcagtatgctctctgcattggtgctatgtggtttattgatactgtttggatatcaaggtagtgccgtgattggtgttggggtaatttatgcttttatcagctatttaggtcgtcttaatgagcctcttattaccctgacgtctcaacaatctctattacaacaagctgttgtttccggtgaacgagtctttgagttaatggacgcccctgtgcagcaatatggcaatgcaagctataccattaaccaaggagatattactattgacggtttgtggtttgcgtatctaaaacagcagtgggtattaaaagagattaaccttgatatacctgctcgccactttgtcgcttttgtggggcatactggcagtggaaaaagtaccttagccagtttgcttatgggaaattatccatggcagaaaggacatatctacttagataaccatccattagaaagttattctcatcaggcattaagaagcggtattgcgatggtacagcaagatcctgttttattatcgggtaccttgcgtgacaatattactttagggcgtagttgctctgaagctcacttatggcaagtattagcaacagtacaattaaatcgctgggtaaaagcattacctgatggtttagaaacccccttaggtgaacaagggagtcgcttatctgcgggacaaaaacagttattagcattagctcgagtattattatttccaccacgaattcttatcttagatgaggcaacggcgaatatcgactcgggtacagagcaagctgttcaaaaagcacttactgaaataagagaaaaaaccacattaattgttatcgctcatcgcctttcaaccattattgatgctgacgaaattgttgtgcttcatcgtggtgagattgttgaacagggtaaacatgcacaactattggcgcaaaaaggtcgctattacaatatgtaccaattacaacaagttaaagagtcattacaagttcaagagcctaccgctgttgagtga

SEQ ID NO: 299553 - DNA, 993 bp, Proteus mirabilis
atgtcctcttcttctcctcaattaagtattgtggtggcggtttttaatggtgaaaaatttttaccacagttttttcgttgtttgcttgcacaacaactggaaaactgggaacttattttagttgatgatggctctactgataactctcgtcagatcttagatgaatgggaaaaacactttcccaatgtcactattttaacacaagaaaaccaaggtgtttccgttgcgcgtaatacaggttttgctgttgcaaagggggaatacgttgcttttcctgatattgatgatgtgatagataaacgaatgtatccccgattacttgaaattgcccaagccgataatttggatgtggcaacctgtaatgggaattatgtttatgatgataaaaaccgaccaacacgccctatctttccttcaacgcgtttaacaacaacagaggtattaactgggcctcaatggcttgaacgtgctcttgagtcgaaaaagttcttacatgttacatggttaaatatttatcgacgtcagtttttactagagcatggttattactttgagccgggtttgcatcaccaagatattccatggacgacagaagtgttattaacggcgaagcgggtaaaatatattgatgagcgttattacgactattttattcattctggatccgtgtcgcatacgacacccgatgatcgtattcatgtaagaacaatttataactatatgaaaatacttgagatgttggatgcgattaatcaacgccatgctgaaatagcaaaaacgatcaatgcttgctattggcaaatagccaaagaaggtttagggattattcactctattgatgcgattagttcaccagaaaccaaaaaacagatagttaaagtattttttgagcggggaatttgggcattaatttggaaaaatgcgaaagactttagattaaaatggcggttaggtcggcgttattttcgattgaaaaaaatattagcagaataa

SEQ ID NO: 299554 - DNA, 1371 bp, Proteus mirabilis
atggaaaagataacgttacaagcttttctcaatcaagaatggagagatattgccatcataaattttcctaatgatgaacacctagcattagaaaaccaatatgatatcacttatccaataactgaacttgcttatgaaagtgactattcaatagattatttatttcgcgatgatcaccatgctgtttctcttaaccatcctgtttctttgttttttgatgataaaggttcacccggttggtgtaagtttttagatgatattgttcccagtggtgctagtcgaagatattgggttcaatatcttgatattgctgggctatctattgcacaacaaaattatcaattattacgtcatggtactatttctcctattggtaatttacgggtaaaagaatcattacctcatctatctactttaaataacgatcttttttttactattgatgaggttaagaaccgctcaagtgatttcctagaatatgcgcaacgaaaaggagctgctgcaggtggtgcaacaggggctggtggtgaggcacctaaactattattaagatgtagtcatgatgaaaagatttggattgatacatatcaaaatgatatttctaatcatgatcgttactatttagtaaaattccctaggggacgtcgaacaagtgtagactgcaatattctaagaactgaatacgctttttatcatgaacttactgctatgggatttaatactattcccatcgaagggatgcgcttagaagaaggagataactatccttctttatggttgcctcgttttgatatccaaatagaaaataatcaagttattcgcttagcaatggaatctgtctattcgatattaaacaaagcatcaggtactacgttatatcatgaagccgttattagagagataattgaaaaaattaatcaaagtaatatggtaaccgaatttggtttccaatttaatatcactaactttatcattgaatgggttagacgtgatctactaaatattatctttggcaatagtgataaccatggtcgtaatacctcttttataagaaaagataacgctatttatctagcgcctatttatgacttcgcacctatgaaagcagatcctgaaggaatagttagaacaacaaaatggcaatcttatgaaatgggaggagaatttgattttattggtattgcaaactctctagctgatttaattcctcaagaacagttactcgaagccttaagggaaactgcattacaactactcgatttaaaagaaagattaaaagaacgaggggtgccagaacaaattctaacaatgcctacatttggctttgattttatacctgataagctagcacgctggggattgttaccatga

SEQ ID NO: 299555 - DNA, 363 bp, Proteus mirabilis
atgaataatattgacaacaagataactaaattacctttaagagcatcaaataaccgctcattaattgctactattgatagaaaaaaaacgattgaaaaaatcatgctgagcttattacttgaagaaatttcccaaggaaaagcattaaaaatattaagactcaatattctcggtttaaaacaagatgcctatgctaaattagttaatatttcacgtaagacactatctgatatagaaaatgataaggggaattactctattgatattattaataaagcttttaaaccttttggattaaaaataggcttggttccagcaactagtcatatgttgctatcaatactaaaaaaccattaccaatga

SEQ ID NO: 299556 - DNA, 783 bp, Proteus mirabilis
atgagtctaccagaaattcccatcaatcatcatgtcagccaacctatcacattaaatgatcaggtgaaaaagctgaaaaaaacgttattaaaagatattcaacgttccgcgtatgtttatcgtgttgactgtggtggttgtaatggttgtgagattgaaattttctctgcaattacacctgtttttgatgctgagcgatttggtatcaaggtggttgcttcacctcgccacgctgatattttgttatttactggtgccgtaacacgtcaaatgcgcgtaccggcattacgtgcttatgaatcagcaccagatcccaaaatttgtatctcttatggggcttgtggttgtggtggtggaatattccacgatctctattgtgtatggggagggagtgaaaccatcgtccctattgatgtgtggatccctggttgtcctccgacacctgcggcaactatttatggttttgctgtggcattaggcttattagatcaaaaactaaaagggcaaaaccacactgaagtggataatgagcaagcgtcactgttactgccgtcgatccctcttgatactcgcgtaatgatagagcgtgaagctcgtcgtcttgctggttattatcaagggcgacaaattagtgatcatttcctgaccttacttgatggtgccacagtacaagaagtcagtgggcgtgttgatgaatggttacgccaagcgaatgatcctcgtttagcggaaattgtaaaacgactggtacattcattaaaccaaggaggcgttcatgtctga

SEQ ID NO: 299557 - DNA, 720 bp, Proteus mirabilis
atgaaagttaatttttatgcaacctgtcttggtgatgtgctaaaagcagattcagcacgagataccgtattattactcgaaaaattaggttgcgaagtattatttcaagagcgccagggttgctgtggtcagccagcacttaacagcggttatgttaatgatgcaaaacccgcaatgaaatcgttaattgagacattagaagttaatgattatccaatcatttccccagcaggctcttgtacttatgcgattaaaggctatcccagttatcttgccgatgagcctcaatgggcgcaacgtgcccaaggtgtagcagatcgtttaattgatcttaccagctttatcgtcaataccttaggtgtggttgatgtcggcgcccgccttgcgggtaaagcggtttatcacccctcttgtagtttaacgcgaaagttaggggttgttagtgaacctttaaccttattaaaacatgttgaaggactcgaaatgttacctttcgccaattcagaaacttgttgtggttttggtggaacgttctcagtaaaaatgtcggaaatttccggtgaaatggtgacagagaaagtaaaacatatcatggaagtcagccctgattacgtcattggtgcagataccagttgtttaattaatattcaaggccgtttaagtcgtgaaaagcgtcctgtcaaagtgctgcatattgcacaagtgttaatgagtcaataa

SEQ ID NO: 299558 - DNA, 705 bp, Proteus mirabilis
atgttaaacgaacaaaaccgcgctgagtttctgcaaactattgctcaaaaattaggacgtgaggtgacgcatacgccaaaaccacaagatccccctattaataatttagcgaaaacacgcttaacaagtttaacccaagatgaattatgcaaagaatttactgattttgcacaaacccagcaggtaagatgcgttatcactaaaccagaacaagtgataaatagcttaatagcgctttgtgaaagctatgattgtcgaggctcagtgataataagtggtgatgaacgcttaaatgcactgggtgtaacacaagctattagtgaaaaatatgaaacttatatttgggagcctaagctcggtcatgaaaacattattcatgctgagcgctctcaaatagggattgtctttgcggaagcgggattaacagaatctggcgggattgtgctgttttcttctccggagaaaggccgttctgtcagcctgttacctgaaacctcaattgttattttacgcaaaagtgacattttaccgcgagtggctcaacttgcagagcgtttacacaaaatggcacaaaatgggatcaggatgccttcatgtatcaatttaattggtggtgcaagctcaacagcggatattgaattaatcaaagtatggggagttcatggccctgttcatgccgcttatcttattattgaagattgttag

SEQ ID NO: 299559 - DNA, 813 bp, Proteus mirabilis
atggcacgcattattgttgttacgtcaggtaaaggtggggttggtaaaacaacttccagcgcggccatttctaccggcctcgctcaaaaagggcataaaacggttgttatcgactttgatatcggattacgtaatcttgacctaattatgggttgtgagcgtagagtcgtttatgactttgttaatgttattcaaggtgatgctactttaaatcaagccctgattaaagataaacgtacagaaaacctttatatcctccctgcttcacaaacaagagataaagacgctttaacccgtgatggtgtagagcaagtgttagatgaactggatgaaatgggttttgattttattatttgtgattcacctgcagggattgaaagtggtgcacttatggcactctattttgcagatgaagccattatcaccaccaacccagaagtctcctctgtgcgtgactcagaccgtattttaggtattttagcctctaaatcacgtcgcgctgaacgaggcgaagatccgattaaagaacatcttctattaacacgctataatccaggccgagtaagccgtggtgatatgttaagtatggaagatgtgctagaaattttatgtattccactgctgggtgttattccagaagatcaatccgttttacgttcatcaaaccaaggtgaacctgttattcttgatagtgaatctgatgcaggtaaggcctatttagatacagtaaatcgtttattaggtgaagaacatccattccgttttattgaagaagagaaaaaaggcttcctaaaacgcctttttggggggtaa

SEQ ID NO: 299560 - DNA, 702 bp, Proteus mirabilis
atgtcaaacacgcccattgagttaaaaggcagtaattttaccctctcggtacttcatttaaatgatggatcaccgaaggttattcgtcaggctatttcagataaaattgcccaagcgcctcaatttctgaaaaatgcgcctgttgttatcaatgtctctgctatcgcagatcaaacgattgattttaaaaaactgaggcgaatagtagaagatgctggcttacgtgttgtgggaattagtggtagtcatgacgctcaacaaaaagaagcgataattgccgcacagttacctattctaaatgaaggtaaaataactaagccaacagctcaggcaaataacgataaaacgaatgaagtaccgataaatgtacgacaaaaaaccaaaatcattcatacaccagtgcgttccgggcaacgcatttacgccccaaatagcgatttagtcgtgttaagcaatgtcagtgctggcgctgaattaatcgcagacggcaatgtacatatttatggtgtattacgtggacgggttcttgccggtgcatcaggcgaccaagagagccatattttttgtacacatttatctgcagaactagtttccattgctggtcaatattggctaagcgaccaaattcctacagattttgttggcaaatcagtccaacttagtttgcaagagaatgaattaacaatcgagaacttaatttag

SEQ ID NO: 299561 - DNA, 582 bp, Proteus mirabilis
atgaagtcaataaacataacatttttaattcctctattattactatacttcccttttattgctttatctaataatagaggcagtttaccaccgccaataagttgtgattttggcatacctaataacattaaacttagaaatatacgtcctaattctttccctagcaataatgcaggaaccttagctaatgacagatattctaaaaggattgcagtggtttttagtcgttgttcagaaaataatactaaaataactttacgtattgataatgtaaatattgattttaataatggttaccttatcaacgatgtaacaggctctgaagcaagtgataatgtgacattccaattgattgataatgaaaataatcctattgatttaaatcagaaaaatacattcactgaaactattaatgacagtggcattgcttattttaatttctttataaattatgtcaaaaaagataatcttcgcgcaaagccaggggctatattttctcgtattacgttcatcgtggaagcgaaagatcagattgttgaagatagtaatgaatttgctggtgtagaagaaagaatactgtag

SEQ ID NO: 299562 - DNA, 573 bp, Proteus mirabilis
atgaaatcaatgaaaataacatttttaattcctttattattgctatacttcccttttattgctttatctgaaaatagtaaatctggttcaccacagccaatgagttgtcatattaacatgcctaattccattataatggaagatataagtactgatgattttggtgatccaacatattatttttatggtgggaggttagctgatgaacgctatactaaaaatattacactatcttttagtaattgttcagtaagtaattcttcaataaccttatatattgataatgaaaatattaattctaataatggttaccttatcaatcatgcaactggtcctacagcaagtgagaatgtgacatttcgattaatttctcctgaagatccccagcactattatttattacacgagaaaaatgtattctgtagaactattgataaagatggtcaagcttcttttcatttcgatgtaaattatgtcaaaatagatgggggcagaccaaagccaggaaatgtaattgctcatattgcgttcacggtaattcttgaagataccaatatacttatagtagactaa

SEQ ID NO: 299563 - DNA, 1725 bp, Proteus mirabilis
atgagtaagcaaacagttgcaacctatattgctaaagtgctccataatgcaggtgtgaaacgtatttggggggtgacgggcgattcattgaatggattaagtgatagcttgcgcaaaatgggtaccattgaatggatgggcacacgccatgaagaagtcgcggcttttgccgccggagcagaagccgctatcaatggcgaattagccgtttgtgcgggctcctgtggaccaggtaacttacacttaattaatggactttttgattgtcatcgtaatcatgttcctgtgttagctattgccgctcatattccctctgctgaaattggtagtaattactttcaagaaactcatcctcaagagttgtttcgtgaatgtagtcactattgcgaattagtctctaatcccgaccagatcccgcaaattcttgctatcgctatgcgcaccgctattttgaaaaaaggtgttgcggtggtggtattacccggtgatgtggcgttaaaacctgctccagaagatgcccatgaaaattggtatccactacaatcaccactgattatgccgaatcgttttgaaatcgagaaattgtctgaggcactgaataacgctaaaaatattaccttaatgtgtggtgccggttgtgcccaagcacatgatgaagtggtgaaactggcacaaaccttaaaagcccctgttgtgcatgcactacgtggtaaagagtatcttgagtggaataacccatgtagcgtgggaatgacgggtcttatcggtttttcatcgggttatcacgcaatggagaatgccgatactttagttctgttaggcactcaattcccttatcgcgctttctatcccgccaaagctaatattattcaaattgaccttaacccaagtagcattggctcacactgccatgtggatatggcttttgttggggatgtcaaagcaacccttaatgcattacaaccacgactaaaagagaaaacagataccgcacatcttgatgcctcgttaaaacattatgctaaagcacgtaaagatttagatgcattggctcaacctagtgagcgtgagttgatccaccctcaatatttagcgcgtcgattaagtgagttagccaatgatgatgcggtgtttacctgtgacgttggcacgccaacagtttgggctgcacgttacgtgaaaatgaatggtaaacgtcgcctaattggttcgtttaaccatggctcaatggcgaatgcgatggcgcaagccattggtattcaagcactggacagaaaacgtcaagttgtggcgatgtgtggggacggtggttttaccatgttaatgggagactttatctcattggctcaaatgaacttaccggtgaaagtggtgatttttaataacagcgtattaggttttgtggcgatggaaatgaaagcgggtggctatttgactgatggcaccgatttacataatcctgattttgccgctattgccaatgcggcgggaattaaaggtattcgcgttgagaaaggcgaagatcttgatgaagcattaaaaacagcctttgaacatgatggccctgttattgtggatgtggtaaccgcaaaacaagagctttctatgcctccggaaattaaatttgagcaggctaaaggttttagcttgtatatgatgaaagcgattattaatggccgtggcgatgaaatagtgcaacttgctaaaaccaattggttacgctaa

SEQ ID NO: 299564 - DNA, 1503 bp, Proteus mirabilis
atgaaattgaagaaaaaaagaaataaaccattaagaatcaatgatataaccattattgatgatagcaaacttaaaaaagcgattactgcggctgcattaggtaatgcaatggagtggtttgattttggtgtatatggctttttggcttatgtattaggccaagtgtttttccctggtgcatcacctggcgtacaaatgattgcagcgcttgcgacattctcagtccctttccttgttagaccattaggtggggttgtatttggtatgttgggggataagtttggacgacaaaaagtcttatctgtcaccatcattattatggcattaagtacttttgctatcggtcttattcctgggtatgacaccattgggatttgggcgccaatcttactgctattagcaaaattagcccaaggcttctcaattggtggtgaatactcaggtgcggcgattttcgttgccgaatattcgccagatcgtaaacggggctttatgggaagctggttagatttcggctctattgctggcttcgttatgggggcgggtgttgttgtccttatttcaactattatgggtgaagcggcattccatgagtggggctggcgtattccattcttcttggcattacctttaggtctgattggcttatatttacgtcatgccttagaagaaaccccagcattccaacaacatgttgatgaaatgaacagcgatgatcgtaaatctatcgaaaatccgccgcgtgtttcattacgagaaatcgcttccaagtattggaagagtttaacggtatgtgtgggcttagtgattgcaactaacgtcacctattatatgctgctaacctatatgccaagttatttatcccataacttaaattattccgccgatcatggggtcttgatcattatcgcgattatgatagggatgctatttgttcagcctgtcattggattactgagtgataagattggtcgtaaaccttttgttatcgggggtagtgttggactgtttatattggcatatccggcatttatgatgattaacagtgatgaaatcggcttaatcttcttaggattattaattcttgcggttttattaaactgttttactggggtgatggcctctattttaccggctattttcccaactcatattcgttatagtgccttagctattgcatttaatatctcggtactcattgctggtgccacaccaactgcagcggcttggttagttgaagcgactggcaatttatatatgcctgcctattatctaatggtagttgctgttgtcggtttgataacgggtataaaaatgattgaaactgccaacaaaccattacgtggtgcaacaccggcagcatcagataaatcagaagcgaaagagattttatctgagcactatgacaatatcgaacaacgtgttgaagatatcgaagcggaaattgaagcattacagaaaaaacgccaagcgcttatcgatcaacatccaaaattagattaa

SEQ ID NO: 299565 - DNA, 1659 bp, Proteus mirabilis
atgtctagtacttggtggaaagaagccgtagtttaccaaatatatccgaagagtttttttgatagtaatggtgatgggatcggtgacttattggggatctgcgaaaaattagattatatacaatccttaggcgccaatgttatctggttatgtccgatttttaaatcaccgatgaaagataatggttatgatattgccgactattcagttgtcgatcctattttcggcgataataaagcgctagataatttaatcagggaagctaaaaaacgtgatattaaaattttactcgatttagtattaaatcatacttcaaatgaacatccatggtttaaatccgctcttaacgatcccaatagcccttatgctgattattatatttttaaacagtgggataaatcgataccaccaaataatttacgtacctattttgattgctctgtttggagtcgtgttgaaaatactgatcgttggtactttaattcgttcggtcctgaacaaccggatttaaattgggagtctccacaattacgccaagatattatcgatatgataaacgtctggatcaaaaaaggtgttgctggatttcgcattgatgctattggtaatttaaaaaaatcacctgaagcattgtcggtacatcacttcgaacctgataaagatgatggtagcgcttcattagtaccttgggtattgaatcaaccggggatagataaatttttaactgaattagcagaaaaaacgtttaagcccgccgactgtatgacggttgctgaaattgatgtaccagaaaaagatctacaggattatgtaggggaaaatggctatttttcaatggtatttgatttcagtattgctgatctggatatttatcatcaaaaaccattcacgacagcgcctattactggtgaaaaattaaaacctgtctttatcaaaagtcaattagacacccaacgtgtaggctggggagcaccttatcttgaaaatcatgatcaaccgcgttcattaaataaatttcttcttaaagaggcgattgaccctatcagtgccaaaatgttagccacttttttattaatacaacgtggtactccctttatttatcaagggcaagaaataggtatgacaaattgtcctatgacgcttcaagaacataacgatctgcatgtagccaaattatatgaatggggtaaaaatttgggttatagcgatgaacaaatgatggcatattttaatgctcgtagtcgggataattcaagaaccccttttcagtggaataataagaataatgcgggctttactgcaggaaaaccatggttaaagataaacccgaattataaaaaaattaatgcagagcaacaacgtcaagataaaacttctctttttgcttattaccaacaattaattacattaaggcgtcattcagaaatcagcgatattttaatttatgggacattcacaccacttactgctcctgataatgtgattgcttttaagcgaacccatcaagaaaaatccgttaatatttactgtaattttagtcaggaagaaaaagcattgtcgataagtatcgaacacctttatctgcataacagtccaatagtgacaaataaacaaggtgatcttgttcttcagccctatcaggctattattttttcttag

SEQ ID NO: 299566 - DNA, 996 bp, Proteus mirabilis
atggccatatctgcctcatttaattttcaaggattgtctcccgatagtatttgggatgcgctaattaatattgggttttatcctgattcagggctgacggaattaaacagctacgaaaatcgtgtttttcagtttatagatgagcacaaacaacgttatgtggtgaaattttatcgtcctcaacgttggagctattcacaaataaaagaagagcatgaatttgttttagcgctaaaagaggcacaggtttctgtcgcagcgcctatcgaggtaaaaggcgaaacagttcatctttctaatgaagggttttattttgcattattcccaagtattgggggaagagcatatgaaacagataatctatttcagcttgaagaggtggggcggacattaggacgtattcaccaaataggtagaaaaaagagctatcaatatcggccgacactgtctgttgcggactatttggtcgcaccaaaattagaatttgaacaaagtgatttagttccaaggcaattaaaatctcaatttattgatgttattgataaaattattcatgaagtgagtcctaaattatcagactcagcatggaaaaaattacgactacatggggattgtcatcccggtaatatattgtggcgtgatgaagtggttatggttgattttgatgattctcgtatgggaagtgcaattcaagatttttggatgttattaaatggatcaaagcaagatcagcttatacagctagatacattgctcgagtcttataatgaatatcaagattttgatatgagagaactatcattaattgaacctctacgtgcgatgagaatggtgcattatatcgcatgggtattaaagcgctggaaggatcctgcttttccaagaacctttgtttggtttcaagagcaagacttttggtttaaacaactcgctttatttaaagggcaagtggagcaattaaatgagccacctttacaacttagcccaatgtattaa

SEQ ID NO: 299567 - DNA, 765 bp, Proteus mirabilis
atgctgaaaatattagtgagtaatgacgatggtgttatggcaaaagggatacagacactcgcaaaagccttacgccagcgttatgatgtacaaattgtcgcaccggatcgcaatcgtagtgcagcatccaactcattaactattgatagaccgttgcgtaagcagcaacatgaaaatggtgatattgcgatagttgaaggtacacccacggattgtgtttatctcggtgttaatcatctcgtcagaccgcgtccagatattgtggtgtctggcattaatcatggccctaatttaggggatgatgtgctttactcaggtactgttgctgcagctactgaagggcggttcttaggtttacctgcgattgcggtatcacttgatggcgaaacgcattttgacacagcagcccaagtgacttgtgatgttttagctatgctacaacgagtacctttaagagctgggaatattttaaatattaatgtgcctgatatcccgttagcggagatcaaaggttttcgtataacacgttgtggaagtcgccatgcttcacaacatgtttatacacaaacagatccgaaaggtaataccctttattggatcgggcctcctggtgaaaaaaatgatgtggggccggatacagattttgcagcggttgatgcaggttatgtctccatcacaccattacatgttgattcaacagcgtataaagcgcttgagttattaaaagattggttaaataaagcagaggtcgaaaaaacatgttaa

SEQ ID NO: 299568 - DNA, 1053 bp, Proteus mirabilis
atgagtgatttaccagaacttcattggctacatggcaaaccgacagcgacagggcgattaaaatcgacaccagaagattttaaagtcagcgaagatctcggctttaccttagatggtgaaggcgaacacgtgatggttagagtcaggaaaacagggtgtaatacggcttttgtggctgaaaaattagctaaatttgccggtattcatcctcgagatactagttatgcagggctcaaagacagaaatgcggtaacggaacaatggttttgtttacgcatgccgggtaaagagatgcccgactttagtcaatttacgttagaaggttgcgaaatattagcaaccacccgtcagcaacgtaagctacgtattggtacattaaaagggaaccatttcaccttagtattacgtgatatctccgatgtgacatcggtggaaactcgtctagtagagatacaaaaacagggtgttcctaactattttggcgtgcaacgctttggtcgtaatggtgacaatttacgccaagcatggcgttgggcaaccaatgaaattcgggtaaaagagcgtagtaaacgtagcttttatctctctgctgcacgtagtgcgatgtttaatcatctggttagccaacgacttgagcgtaatatttatactcaagtgctttgtggcgatgcgatgcaattgcacggtaaaagaagttggtttgtggcagaagaagcggaacttgcccaaacacaaacacgctatgaagagcatgatatacatattaccgctccattgccggggaaaggtgacttaggtacacaagctcaagcactgatatttgaaacggacaacttagctgactacgaagcattatggtcattagcacaacaagaacgagttgataccactcgccgtgcgattaatttgctaccagaaaatatgtcatggcattggctagatgatagcacggtttctttatcgttctttttaccagcaggaagttttgccactagcgttgtacgtgaattgatattattagggaacattgatgctgaaaatattagtgagtaa

SEQ ID NO: 299569 - DNA, 1458 bp, Proteus mirabilis
atgggacttgcagccatcaaaaccaaccaactgatcgccggtgaaatagcacaatcaggtggtgtggaaaattatttaaaaacacagcagaacaaagggttattacgttttttaacctgtggcaatgttgatgatggaaaaagcaccttaattggtcgcttacttcatgatacacggcagatctacgaagatcagctctccaccttacaaaacgagagtaaaaagattggcactcaaggtgaaaaattagatctcgctttgctggtggacggtttagcagctgaacgagagcaagggatcaccattgatgtagcttatcgctatttttcgacagccaaacgaaaatttattatcgcagatacgccgggacatgcacaatatacccgcaatatggcgacaggagcatcaacgagtacgctttctattctgctgatcgatgctcgaaaaggggtacaagaacagactcgccgccatagttttattagcacactccttgggatccgtcacttagtggtcgcgattaataaaatggatctacttgattaccaacaagagatcttcgattcgatccaacaagattacctgcactttgcacaacaattaccgcgcgatctcaccattgaatttgtgcctatctctgcactggagggggataatgtggtctctccttcattaaatatgccttggtatacaggaaaaacactgctggcattacttgaagatgcgccggttaaatttaaattaggggctaaatccgaaagattgcgttttcctgtacagtatgtgaatcgccctgatttagactttagaggctacagtggcacagtttcatcaggctctctttatcaaggacaacagatcaaagtattaccttcaggacagcattcaaccattaaacgcattgtgacttttgatggcgatttgactcaggcacaagtgggtcaagcgattacactggtgttagcggatgaaatcgatattagtcgtggtgacattattgttgatgctaacgataccactgctaatgttagcaatcatgcgttagtggatatcgtatggatgtcagaacaaccgttagtacagggacaaacccttgatatcaaagtagcgggcaaaaaaagccgtgccaaaatagaaaatattcactatcaagttgatgtggataatctcactcaacaagtgaccgaaagtttagcgctaaatgccattgggcatgttgaagtgttatttgaagagccattggtgctggataactatcaacttaatgcacaaacagggggacttatttttattgatagattaagcaatgtcacggttggagctggtcttattcgagaaatttgcgacaacgtgcaatccacaacctcccaatacgatgcgtttgaaattgaactcaatcagttgatccgccgccattttccgcattggggcgcaagagatttactgggaggaaaatag

SEQ ID NO: 299570 - DNA, 1422 bp, Proteus mirabilis
atggattacctacccttatttgtggaattaaaacagcgcccagtattactgattggcggtgggcatgtcgctgcgcgtaaagcggtactgttattaaaagcgggcgctcggatacgtgttatcgcgccacagttatgtgatgaattgcatcttgcttatcagcaaaatcaaattgagtgggttgctgggcaatatcaatcagagcatctatttggcatgatgttggtgatcgtggcaacggacgataatgcattaaatcaacaagtttatcttgatgctcaagctcgtcatatttttgtcaatgttgtggactctcaacctcagtgctcttttatctttcctgccattattgatagaaacccgatattaattgctatttcatcagcgggcaaagcccccgttttagttcgtatgatacgggaaaaactagaagcattattacctacctcattagggactattgcgactattgctgggaaatggcgcaataaagtaaaacaaaaactgactcatttttcagcacgttgccgcttctgggagcaagcgtttagcggcaaatttgcctcattagtcgcaagtggtcaattaatacaagcgcaagcacagcttgaacaacaactatctcatccagatagcccacaaggtgagcttgttttagtgggagctgggccgggtgatgcaggattattaaccttacgaggtttgcaagttattcagcaggccgaggtggtgctttatgacagtttagtcagtacagacatcttagaactggtgcgccgtgatgctgatagaatttgtgtgggtaaaagagcggggcaacacagtacgttgcaagaagaaatcaatcaattgatcgtgaaatatactcagcttggtaagcgagttgtcagactaaaagggggcgatccttttatttttgggcgcggaggagaagagcttgaaattgcggtacaacatggcattccttttcaagttgttcccggtgtcaccgcagcaagtggggctagtgcttatgcgggtattccattaactcatcgtaaatatgcgcaaagtgtcacttttatgacagggcattgccaatcagggggtatagagccagcttggaaagctttagcgcaagctaatcatacgttagcaatttatatgggaacgacgaaagcagaacttattagccagcgtttaatagagcaaggtcgttcaccactcacacctattgcagtaattagttgcggtacacgtcatgatcaacagatcttaacgggaaatttaacacaattagcgcaattagctaagcaagctcccaccccggcattattaatagttggagaagttgctgcattacatcaccaacttgcgtggtttggtgatagacaaactcaacacacctctgccatccactcatctttggttcattttgcctaa

SEQ ID NO: 299571 - DNA, 732 bp, Proteus mirabilis
atgagtcgattatcactttctcagttggtgttgctatcggttgaagagcaacgacaggcgcttgatgaaatcaaccaacaattagagcaaaaaacggcgatagagcgagtggtttgggctttagaacatctccctaaccagtttgttttaagctcaagttttggtattcaagcggcagtttgtttgcatttgctcaccagacaatatcccgatattccaattattttgacagacacgggttatctctttcccgaaacgtatcagtttattgatgagttaacctcttcactacaccttaacttaaaagtatatcgcgctgaaatatcttcatcttggcaagaagcacgctatggcaaactgtggttgcaagggattgaaggtatcgaacgttataaccaaataaataaagttgcgccaatggaaagggcattaaaggagctacaggcgaagacatggtttgcagggctacgacgtcagcaatcaaaaagtcgagagcatttacctgtattatccatagcgaaaggtgtttttaagttactaccgatagtagattgggataataaacaaatttatcaatatcttaaacagcacaatttaccttaccacccattatgggagcaaggttatctgtctgtgggggatacgcatactacacgtaaatggcaagagggaatgagtgaagaagagacgcgattctttggcttaaaacgtgagtgtggattacacgaataa

SEQ ID NO: 299572 - DNA, 1731 bp, Proteus mirabilis
atgaaatcacaaactcaagcgcccttagtggttgaaggaaaactatctgatagtgaacgtatgaaaaaagagagtaatttcttacgaggcactattagtgatgatctacaaaatggtctaaccggtggttttgagggcgataattttttattaattcgttttcacggtatgtaccaacaagatgatagagatattcgtgccgagcgggcacaacagctactagagcctcgtcatgccatgatgttacgttgccgtttaccgggcggtgtcatcacaccaaagcagtggttaagtatcgataagtttgccagtgaaaatacgctctatggcagtattcgtattactaatcgtcaaacttttcaatttcatggcattttaaaaggtcatgttaaaccggctcatcaaatgctagcatcaacaggtcttgatgcccttgcaaccgccaatgatgtcaatcgtaatgtgctatgtacctcaaaccctgaacaatcttcattgcatcaagaagcttatgagtgggccaaaaaactatccgagcatttattgccacgcacccatgcgtatgcagaaatttggttagataaagagaaagtagcgaccacagatgaagagcctattttaggtgaaacctatttacctcggaaatttaaaacatcggtggtgatccccccttataacgatgttgatttgcatgccaatgacatgaattttattgctattgcagaaaatggccatcttgttggttttaatgtgctagtcggtggcggccttgcgatgacccatggcgataaaaaaacctttccgcgtttagccagtgaatttggttatatccctattgataaaacattagccgttgctgaagcgattgtaacgacgcaacgagattggggtaatcgtactgaacgtaaaaatgccaaaaccaaatacaccttagagcgcgttggtattgaaacatttaaacaagaagttgaacgtcgctcaggtgttatgtttgatgttatccgaccgtatcaatttactcaccgtggagaccaaattggttggttaaaagggattgataacaaatggtatctaaccttatttattgaaagtggacgattaatcgataaacctaatgcgccgctaaaaacgggggttgctgaaattgccaaagtgcatcttggcgattttcgtctcactgctaaccaaaatttgattgttgctggtgtgccagaggcacagaaagagcagattgaggcgatagctcgtcaatatggtttaattaatgataacgttacaccactgcgtaaacatgccatggcttgtgtctcatttccgacctgcccattagccatggctgaagcggagcgttttctccctgcttttaccgatactcttgataatatcatggctaaacacggtgtcagtgatgagcatattgttgtacgtgtgacagggtgtcctaacggttgtggccgggcgatgttggcggaagtcgggctggtgggaaaagcacccgatcgctataacttacatttaggagggaaccgcatcggtactcgcattcctagaatgtatcgtgaaaatatctcatcacaagaaatcattgaaattcttgatgctttaattggtcagtgggctaatttacgtcaacaacatgaaggttttggtgattttcttattcgcactgaggttatcaaacccgttattaattctgccattgatttttatgacgtgcaggaggtgatatga

SEQ ID NO: 299573 - DNA, 1815 bp, Proteus mirabilis
atgagcaatcaacccccattattatcaatgcttccattaacacaggagcaattgaataaattacaggatgtgacgaaagacttaacgccagcccaatttgcttggctttccggctatttttgggggcaattaaatcagcattcatccactaaagatgagctggtgaatgtacaaaaccgtgttcctcaacaagaaacaatcaccgtgatatcagcatcgcaaactggcaatgcacgccgcttagctgaacaattacgcgataaattggttgataatcaacttaatgttgaactctatagtgcgagtgaatataaatttaagcagatccacaaaacgacagccttaattattattacctcaacacagggggaaggtgaacctcctgaagaagccatcgcattttataaatatttgcactctaaaaaagccgcgccaatgaagcaaacggcttatgctgtactgagtctaggtgatagtacttatgaacatttttgccaagcgggtaaagattttgatcatcaactggcacaacttggcgcgaccagcctattagaaagattagatgtagatgttgattatcaagctgacgctgataaatggataactcaacttactgatattttaaaaatacgtatacctgagcaaaacactcaagtattacaacaaacacaatcaggaacaaccgacagtgtcgacaccgcacgttaccatcgtgatgcaccttttagtgctactttattaactaatcagaagatcaccggtcgacattcagataaagatattcgtcacattgaaatcagtctagcaggctctgaattgcaatatcatcccggagatgcgctaggggtatggtttaagaattcggaagagaaagtggatgagcttattaccctgttatggttaacgggagatgagcaggtaaatgttaaatcacaaacactaacgttaaaagaagcgttattacatcatgttgaattaactcaaaatagtgcacccattattaaagcgtatgcccaattatcccgccatgaagagttattatcgctggtggctgataaaaacaaacttcagcaatatgcgcaaacctacccaattaatgaaatggtacgtcaatatagtgcgcaacctaatgctcaagagtttattgatatattacgcccattaactccacgcctttactccatagcgtcatcacaacaagaagttgatgatgaagttcatcttaccttaggtgttgttcgttataacgtcgatcagcgtgcttatacaggaggtgcttcagggttcttagctgatcaacttcaagaaggcgatacagtgaacgtttttattgaacgtaatgatcattttcgtttacctaaagataatcaagcccctgtgatcatgattggcccggggacggggattgcgccttttagagggtttatgcaacagcgtgaaagcgaaggcgcgacagggaaaaactggctcttctttggcaatcctcactttgtagaagattttctttatcaagtggaatggcaacgttatgtcaaaagcgggttgttaacacgtattgacttagcgtggtcgcgtgatcaagccgataaaatttatgtgcaagataaattacgagagcaaggtcaggaaatttggcaatggttacagcaaggtgcttatctctacgtttgtggtgatgcatcaagaatggctaaagatgttgaacaaacattgttagaaatagtaatgacccatggcaataaaaatattgagcaagcagatgattatttaagtgagctacgtttagcacgtcgttatcagagggatgtttattaa

SEQ ID NO: 299574 - DNA, 1182 bp, Proteus mirabilis
atgacgcaaagtaataagtgttttaatactcaagcaatacattatggctactctccgttagattatcagggggcattagtgcctcctgtttttcaaacgtccacttttgcatttcccacagctcaatatggtgctgattgttttgctgggaaagaaaaagggcatttttatactcgtatatctaaccctacattagatttattagaaaaacgattagctcagttagagcaaggagacgcctctgttgtcttttcttcgggtatgggagcaattacatcaacatgttggtcattattacagccaggagatgaactcattgctgatatgaccgtttatggttgtacttttactttctttaatcatgggctggctaaatttggtatcactatcaaacatgttgatttaaccgatcctgaaaaattagcagaagcaattacagatagaacaaagcttattttctttgaaacaccggctaatcctaatatgcgagttagtgatattgaaaagattgctaatattgcgcaccaacatgatgttttagtcatggttgatagtacttactgttcaccttatttacaaaagccattaaccttaggcgcggatattgtcgtacattccatgactaaatatttatcaggtcatggtgatgtgatggcgggcgcaattatcactaattatcaattagcagataaaattcgtgttgagggtttaaaagatatgacaggagcttgcttatcacctcatgatgcggctcttgtcttaagagggataaaaacgcttagcattagaatggaaaaaatctgccaaaatgcacaacttattgcgcaattccttgaaaatcatcctaaggtggcaacgatttcatatcccggattaaagtcttttcctcaatatgaacttgccaaaaagcagatggctttacctggtggcatgataagtatggaattgcagggtggaataaaagctggcagagaatttcttaatcgcttaatactttttactcgagcggtgagtttaggtgattgtgaatcattggctcagcatcctgcgactatgactcatgcgacatacagtgcacaagagcgtcaacggcatggtattagtgatggattaattcgtttatcaatcggtcttgaagacgttgatgatttaattgctgatttaacccaagcgctcgcttaa

SEQ ID NO: 299575 - DNA, 786 bp, Proteus mirabilis
atggcgaaaaaaccgacttattcagtacgttttgtagcaggtcaacctgtagaaaggattgaacctagtctacctttaggccaaatagaagagacgctaccgattgggatgccgctatatacagaaggcactttaaaaattgctgtttggaatatttacaaacagcagcgagtcaattggcgtagtatgttggaaacgcttgccactgatactcagctattacttttacaagaagcgcaaacaacacctgaattagttcgttttgcgggtaaaaaccatttaattgctgatcaagttcctgctttagcctttcaacagcaccctgcgggtgttatgaccttatcaagttctcatcctatttattgttgcccattaagagaaaaagagccttttttgaggcttgctaaatctgcattaattacggtttatccacttattactggtgagcatttaatggtgataaatgtacacgcgatcaattttagtttcggtgttgatgtttatcaaagacaattaaacagcttatcgactcatatcatcgatcataaagggcctgttattttggcgggggattttaacgcttggagccgtccaagagttaatgtgttaaagcgttttgctagaagattaaaacttaaagaagtgatctttgcgaaggatttacgcactcgcgcttttggtaagccacttgattatatattttatcgtggtttatcactaaataaagcggaaatcttaatcacagatgcatctgatcataatcctttggtggcgacattttcttaa

SEQ ID NO: 299576 - DNA, 888 bp, Proteus mirabilis
  misc_feature (213)..(222): n is a, c, g, or t
atgtttttttcaaaaaaaataaaccaattttttgccgtagccatcaaccaaagtttggtaaaagcagcagaaaaaattaatgttacaccttcagcgctacgccatgggattaatgaactggaaaaaaagttaggtaactcattggttaagcgaacgaaagaaggcatgatactgacgccggccggaaaaaagttatatgaaaacttatatccnnnnnnnnnntatccttattatgaaaaaataaaaaaaattgaaaatcaactaatagataattatacagaaaaagacacactttctattaaattagatggcctttattatccagacttaaaaactaagctattggcgattaaaaaagaacatagccaatataggttggctttaactgacggttttgttgataaccttgagaaagaattatttgatgaagaatttgatctggttatttcttctcttgatttttcatatacaactcagaatattcaagccatcactttatgtacacagaaaattggtttattagttaataaacatgtattcgaaagatatgctgacaaaaagaccttttttgctaatgaaacactggtgcaacgcaacagtgctttgcaaaacccaatattctctaatatttttaataaattaaaaaaaagtggttatcaataccatacattaggattaacagatatggctgatgtcttacattatattgaaaaaggtgccggttactgttttttacctaataattttgattatatttcaaccatcacaaatgataaggttaaatttatatcttcacctttttgttccgacatttttgtgcatcaaaaagtctattttaaacaagacaataataaaaacttactcaatattgccatgacacttcgttaa

SEQ ID NO: 299577 - DNA, 996 bp, Proteus mirabilis
atgaacttttctcattttaataaggtagtgtttgctgcctctctttttgctactggcttttcttatgcggatagcgatcgccctctgctctctttaagtgtaagccaatctggcggcactgcgttaaatagcgaaggttcgttagatactcgtacgcctgcaagccaatctcgtgtgttacctatttggggtgatgaagctcgcgcccgtggttatgatttaccagaaccatttggggtaagctataactatatgaatctacgtcaagatgtgattgtggataaaattgggtttagctcagatacagcttctggacaacaactactttctcttgttggtgtcgatgctggccacactcgtagtagcaacaaatctcatatgctgaaattagatagttggattcttcctttcttgaatatctatggggtctacggtaagacaagaggtagttcccaagctcagctaaactctgtgtcattaggagggcaacgttttacagggggcttaccttttaatcttgattataaaggtaactcttacggtgctggttttaccttagcaggggggtataaccaattttttggtacatttgatttaaattacaccaaaactaaccttgatattctcgatggtgatattaaagccttagtcattaccccccgtgtgggttacgagtttgtttttcaacctttaattgcaggacaaggtaatactaaattacaagtatggacaggtgccatgtatcaggatattactcaacgttttaaaggtgatgtgagtcgactgagtttaccggatgaacttgatggtttaatgaatctattaccaccatcatatatgggtaatattaaattcgatgtagaacagcatcttgctcataaatggaataatactattggtgctcgtttagaagtcacccgtaactttaatatcatcactgaagtgggctttaataatcgtaatagttttcttttctctggtgagttccgtttttaa

SEQ ID NO: 299578 - DNA, 729 bp, Proteus mirabilis
atgatgatctctttgaaagtcatttctctgttattggattaccccagcgaagagctctggggccatcgtaatgagatcattgatgcattacaggaagctgacgagcttcctgtcacgcaagtcgcaaaattaatggcgtttattcgtgaactcacgcagcaagatctgctcgatgcacaagcgaattacagtgagatttttgatcgaggtagggcgagatcgctattgttatttgaacatgtacatggtgaatcgcgtgatcgtggtcaggcaatggttgatctgcttaatcagtatcagcaagcagggatcaccttaagtagtcgcgagttgcctgattacttacctacttaccttgagtatttaacgctattacctacggatgaaagtattgaagggcttaataatattgcccctattttggcattgctgagtgagcgtttaaaacagcgaggcagtgattatcacgctctttttgatgtattgctttgtctctcacaaagtgagttagacgcttcacaactggcggctcaagtagagaaagagcctgtagatgatacaccggctgcattagatgccgtatgggaagaagagcaagtgacgtttctaggtgaaagtgcgcaatgtggtagtaacaaaatgagccagcatcagcggcgttttgcgcaagaaacgccagttcaatatctcaacgtcggtaattcgctggatatgggagcacaaaaatga

SEQ ID NO: 299579 - DNA, 1830 bp, Proteus mirabilis
atgaaaatgcacaacattcaatggcattatcgcttttcaattattaatcaaatcgctattttaatgttgcttttcacactatttggtgtggtaggtatggctatttctaaccacattattttaagcgtacaaggcaatgcccacgccattaataaatccggctcactgcgcatgcaaagctatcgtttactctcagccttaccccttgatgataagctccgtgattatctacaagaattagaaaatgatttagatagcaaagagttacgtcaagtattaagcacctcatcactgcaatcacaatatgcacaactgactcattactggaaagagacattaaaaccgaccttattagcagccaaacagcgtaatgatgcgaaacaagaagttatcttttttgtttctcaactcgatacattagtatcaagtattgaccaacttactgaacaaaaaatccgtctagtcgcttatacccaacttatctttaccgcccttaccttattactgctatttggttctgtttggcattttcgtcgtcgcttattacttccttggcaacaattaatggccatggctaattctattggacatggtgatttttcaactcgttttcggcctcgtcctcaccatgatgaaattgctaccttagggattgcacttaacaccatgtcagaagagctatcgacgctttacagtgaattagaacaacgagtcattgaaaagacccatgatttacagcagaaaaataaggttctctcttatctttatcactcaagtcaacaactgcattcccaagcgccgctttgcgctcgcttaaggcagatccttgcagagctacagcatattattcctgatagctatttgcagatccgtctatatgaagataatcaacatacattatttaatgagataagcttagccccttcctcacgccctgaatattgtccaacgccagactgtgagcgctgcaatgaagatgccagcatcactacaccgttaaataatcgcttattacattgggaattgaccgatcagatccaccgctatggtttattcgtgatgcagttaccggaagatagtgtacttactgacgaacaaaataatttaatgctcttattgactaagcaaatttccgcaatgcttgccatggagcaacaaaatgaacagcagcaacagctattattaatggatgaacgttcggcgattgcacgtgaattacatgactcgattgctcaatcgctatcatgtttaaaaatgcaagtcagttatctacaaatgcaatctgaaaccttgccagataactgccaaaaactgctcaaagagatgcgagaagagctaaatgtggcttatcgtcagttaagagaattactgaccacatttcgcttgaaattgactgagcccggcttattagccgcattagaaaatacattaaatgaatttaatcaacgtttagggtttactatccattttgattatcagttacctgcaaaatgtgttaattcacatcaaagtattcatgtggtgcaaattgttcgtgaagcattaaataatattctgcaacatgcgaatgcaaactgggccgaagttgcattaacacttaataatggcatcgttgaactgcaaattaatgataatggtgaaggcattgcgcctaatcccgaaaagataaatcactacggactgattattatgcgtgaacgggcgaatagtctgaatggctcttatagtataaaggttcgcaaagaaggtggaacgcaagtatttgtcacatttccgttaatcactacccataaagatcctatcgaaaagggagcaaatcataatgaataa

SEQ ID NO: 299580 - DNA, 1746 bp, Proteus mirabilis
atgataacaactaaccaaaagcaacgagtgaagcatcgagtgttgattgctaacagaggtgaaatcgcagttcgtattattcgtgcttgtcaggactatggtgcaacttccattgctatttatgcagatgatgatattgatgcattacatgtgcgtcttgcagatgaagcctatggtttaaagggtaactcaccgaaagaaagttatttagcgatagataaaatcattgaaattgctcataaaagtaaagcaaccatgatccacccaggttatggcttcctttctgagcgagctgatttcgctaaagcagtacagcaagcgggactcctttggattggcccagatccgcaaactatcgaagtattaggggataaagttcaagcgcgaaaaattgcacaatccgtaggtgcgccattggtgaatggtaccgcagatccggttagtgatgctaaagaggttctagattttgcaaaacagtatggcttgcctatcgccattaaagctgcatttggtggtggtggacgaggtctaaaaattgcccatcatatggcagaaattgaagagctctaccattcagcggtaagagaagcagtaaccgcatttggtcgtggtgaatgctatgttgagcaatttcttgataagcctcgtcatattgaggcacagattattgctgataaattaggccatgtagtggtagtcggtacacgagattgttcattacagcgtcgtaatcaaaaacttattgaagaggcccctgccccttatttaactgatgaacaacggcaacgtattcatcaatcagcaaaagatatttgtgctaaagccggttatatcggtgcggggacggtagaatttttattgagtgcgaacgggacaatctctttccttgaagtgaatacacgtctacaagtagagcatccagtaactgaagaaacagccggtattgatttagtgattgaacaattacgtattgctgagggattgccgttaagtattaatgaaacccctgagcctcgtggtcatagttttgagtttaggatcaacgcggaagatccggcaaaaggctttttacccacacccggtttgattagccaatttagtcaatcggctgggccgggcgttcgagttgatagtggtgtggtggaaaataaccaagtatcacgccaatttgattcaatgatggcaaaactcattgtgacaggggcaaatcgtgaacaggctattgccagagcgcgacgagctttagctgaatttaacatcgcaggcgtagccagtgtattaccttttcatcgcgaaatgatggaacatcctgattttattgataacttcagagttcatactcgttggattgaaagcgattttcaagcaaaaaatagtcattttcctcgtagtataccagcagaaaatgaaccactagtacgtacctttattgaaatagatggtcgtcgtcatcaattagcactacctgcacaattactttcactctcggccgttatacccacgactattagcgagcacaaagagtgtcagacgcgggaaaatgcggtcactgcaccgatttcagggatattacatagttggttattatctgatggtgataaagtcaatcaaggggatgttattgccattatggaagcgatgaaaatggaagtacaggtagttgctacctgtcatggtgtattacagcaaaaggcgaaagccggtgactatttttcagcagacagtctattagctgagattaactag

SEQ ID NO: 299581 - DNA, 660 bp, Proteus mirabilis
atgcagaaaaaaacatcaccacagatcctttgccaaaaaatcgctgatattattcgccaaaaaatcactatcggcgaattacctccaggagagagactttcagaagcgactttaagtgagcagcttgaaatatcgcgtaatacattaagagaagtatttcgtatattaacccaagaaggcctattaacctataaaccgaatcgtggtgtttttgtttctgtaccagatatggcatcaattatggatatttatcgtgtaaggcggctgattgaatgtgatgctttacgacatgcctatccaatgcatcctgccatctcccacatgcaagataacgttaatcaggcaaaaatgtttcaacaacaaaaagattggaatagcgttggaacttgtaatatgcatttccataccgctatcgccgagctttctgatagccctaggttatttaaacaatatcaacttattttagcagaattacgattggcctttggtttactcaatgatccccagttattacatgctccttatattgagaagaatgagcatattttaacgctactaatggatgggaaagcacaagaagcggcaattgaaatggaaagttatttagaaatatccgagcgaaccgtattagcggctttttctcgtcataacatctgttaa

SEQ ID NO: 299582 - DNA, 627 bp, Proteus mirabilis
atgatttctttatggatagcaattggtgtacttggtgtactagggcttatctttggcctgattttggggtattccgctcgtcgttttaaagtggaagaagatcctattgttgaaaaaattgacgccatattaccacagagtcaatgtggtcaatgtggtcatcctggttgtcgcccttatgctgaagcggtcgcaaataatggagaaatgattaaccgttgtgctccgggcggtgaacaggttatgttaaaaatcgccgaactaatgggggttgatccacaaccgcttgatggtgatgaagaagcattaaatccggtgagaaaagtggctttaatcgatgaagacaactgtatcggatgcacaaaatgtattcaagcatgcccagtggatgccatcgtcggcgctactcgtgcaatgcataccataatagaagatctctgcacagggtgtgacttatgtgttccaccttgtccaacagactgtattactttagttcctgtgaaaatgactacctctaattggaaatgggatttaaatactatccctgtgagaaatattcctacagagccagaagaaacacccgaagatgaaccgtcattaaagacggaggataacgctcatgtttaa

SEQ ID NO: 299583 - DNA, 582 bp, Proteus mirabilis
atgactgattacttgcttttattcgttggtaccgtcttggtgaataactttgtactcgtcaaattcctcggtttatgcccatttatgggtgtatcaaaaaaattagaaaccgcgataggaatggggtttgcgacaacctttgtcatgacgattgcctctattagctcttggctaatggatacctttattttagttcccttagacttactctatttacgtacactcagctttattttagtgattgctgtggtggttcaatttacagaaatggtcgtaagaaagacgagtccaacgttatatcgtctattggggattttcttacctttaattactaccaactgtgccgtattaggggtcgcattactgaatatcaatcaatcacatacctttatgcaatcagcagtatatggttttggtgctgcggtaggattctcattagttatggtgttatttgcagccattagagaaagactggctgtcgccaatattcctgcacctttcaaaggctcttctattggcttaattactgcgggtttaatgtctcttgcctttatgggttttagtggtttggtgaaactgtaa

SEQ ID NO: 299584 - DNA, 468 bp, Proteus mirabilis
atgaaattaaaacctcagacaagcgttttgccccagcaatcccctaaagcccctattacgggttggttacttgcccctttggcttatttgctattgtcgatagtgggatcaggtttaatgtctgttttatatttaatgcgatatttttcagatttttcgattatccaccagctaccttttcatgtggtatcaagctggtatctttcagtgttaacaacatgggcgatgtttgcatttaccgcttacttattaagacagtttttttaccgcgctaaaaattttcctcgtttatttattatttggttattaattaacttattgttggcgataaaaagtttcggttttgcccctgttgatgatcagaccgcggttaagtcactattatgggccgttatggcaactgtttgctttgtgccttatatcaaatatgctaagcgtgtccgtgaaactttcacacaagatcgataa

SEQ ID NO: 299585 - DNA, 1044 bp, Proteus mirabilis
atgacaaaaaatttaaacgtggggattataggctatggttatgcgagtaaaacctttcatgctcccctgatccgtaccactgaggggttaacactatcagccatttcaagctctgatgaaagtaaagtcatcgctgattttcctaatattacagtgtatgcaaacccacaacgactgattgatgatccaaacatcgatttaattgttattccaacacctaataacactcactatacctacgcatcacaagccttaaaaaacggtaaacatgttgttgttgataaaccctttactttgacacttgatgaagcagaaagattggcacaacaagcaaaagaagctaagagattactctcagtttttcataatcgccgttgggacgccgggtttcttaccgttcaaaaattactcgcggataacacattaggtgaagtgagtgcctatgaagcgcacttcgatcgttttagacccactgttcgccaacgttggcgtgaagatgccggacttggtggggggctttggtacgatctggctcctcatttactagaccaagcggtatgtctttttggtcaaccccacgcaatcactgctgatattgcccaattgcgccctaatgctaaaaatgctgactactttcatacaatattagattatggtcatctgaaagttattttacatgcctctatgttggttgcctcatctacgcctatttttgctattcatggaacaaaaggcagttatgtaaaatatggtttagatacccaagaagatgcattaaaagcggggtatcttccgacggaaatgtataactggggggctgatcctcaagagggtgaattaacattatcgacagagagtggtgagttagtaacaacaaagttaccgactctatcaggtaattattccgcttattatcagcaaatttatcgtgcgattgcatttggtgaagatagccctgttactgtgtcacaagccattaatgttatgcgtttaattgaagctgggagcctttcaaatcaatcaaaaaccacaattaagctataa

SEQ ID NO: 299586 - DNA, 987 bp, Proteus mirabilis
atgtcttggtggcaaaagctaaaaattgactcttttttaatgattatgatcttggtggtcatactcgcaacactattacctgcacaaggtgagattaaagttatctttcaacatctcactacggctgcgatcgccttattattttttttgcatggggcaaagctttctagagaagcgatattgtcaggacttggtcattggcgcttacatttagtggtttttgccagtacttttgttttattcccgttactagggttgggactacagtttatggtacctgactggatgtcacctaccgtttatatgggatttttatatctttgtgctttacctgcgacggtgcaatccgctattgcctttacttctgttgctggtggtaatgtagctgcggcaatctgtagtgcatcagcatcaagtattttaggggtatttttatccccagtgttggtgggttttttaatggaaacacaaggctctgctgagcattttgataccgcaggggcgatacaatctattttattacagttgatggtgccttttattatcggtcatttatctcgtccattaattgggcgttgggttgataatcataagatgttagtgaatagaaccgatcgctcttctattttgctggtggtttatgttgcatttagtgaagccgtcgttgaaggtatttggcataaaattgacggttggtcattattaactatcactattgtcagttgtgtattactggctattgtacttgttattaatatttatagtgcaagatggcttggttttaataaagccgatgaaatcacaattgtattttgtggctcgaaaaagagcttggcgaatggggttcctatggcaaatgtactatttcctgcagcaacggtaggaataatgctattgccgctgatgctatttcatcaaatccaattaatggtttgtgccatattagctcagcgttatgctaatcaagctaaaaaacaccatcagtag

SEQ ID NO: 299587 - DNA, 447 bp, Proteus mirabilis
atgatcgaaactaataataaaggtttagtgcatgtcactcgtgcattactaccctcaatggtcgaacgcaatatcgggcatattattaatatcagctcaactgcggcttcttggccttatatgggaggaaatgtgtatggtgcaaccaaagcctttgttaagcaatttagcctaggcttacgtgccgatcttcaaggtaaaaaaatacgtgttactgatattgaacccggtcttgtgggtggaacggagttctcattagtgcgctttaaaggtgataccgataaagtagaacaaacttatgcaggggcagatgcacttacccctgaagatgttgcacaggcggttttctggacggcaacattgcctgcacatgttaatattaatacgcttgagatgatgcccgtcagtcaatcttttgctgggttaagtgtgcaccgacaaaattaa

SEQ ID NO: 299588 - DNA, 1686 bp, Proteus mirabilis
ttgcttacccgtattcatgaagcaggcattgctggattagggggagcgggttttccaacagccacaaaattaaaaggtggtggtgatttagttaaaacgctcatcataaatgccgctgaatgtgagccttatatcacggcggatgacagacttatgcaagagcacgcagatgaagtgattgcgggttgtcagatattaatgcatatactgtcaccggatgaagtgctgattggtattgaagataacaaacctgaagctattgccgccttaaaacaagcattagcgacccatacaaatgaaaaacgtatttttattcgggtgatccctaccaaatatccatctggaggagctaaacagttaaccaaaatattaacgggcaaagaagttccttctggcggccgctcctctgatattggcgtattaatgcaaaatgtggggacagtagtggcaattaaacgtgccattatcgatgatgagcctttaattgaacgtgtcgtcaccgtgacaggacaaggggctaaaaccccaggcaacttttgggcgcgtttaggcacacctatttatgcactcataaaacaagcaggctttgttgcgggctctgagcaaatggtcattatgggggggcctttaatgggcttcaccttacctgacttaaatgcccccgttataaaaattactaactgcttattaattccctctccagaagagatggatacagataatattgaagaggcttgtatccgttgtggtcaatgtgttgacgcctgccctagtggtttactgccacaacaactttactggtttagtaaagggaaagagcatgagaaagcgcaacaacataatttatttgactgcattgagtgcggggcttgtgcttttgtctgccctagtaatattccattagtgcaatactaccgccaagaaaaagcagaaatacgagaaattgatgcggaggctaagcgagcggctgaagctaaggcacgctttgaagcgaaaaaaatccgtatggaacgagaaaagcttgaacgtgaggcaagacatcaacgtgccgcagttaagcttgatgatcaccaacaaaatgaagtgcaatctgcactttctcgtgtaaaagaaaaacatagcattggtaaaattattgctgttaaagcaggagaagagcctgacaacgcagcggctattgctgcacgcaaaaaacgtaaagaagaagcccgagcaaaacaagctgctaaacaggcacaacaagttccacaaaatacccataccaccgccgatgcagaaagtgatccacgcaaagccgctgtagcggcagcattggcgcgtgtaaaagctaagaaagctcaacaagcgcaagccaccgcagaaataggcacacctgctgaaactccgactgatgtggaaaccgatccgcgtaaagccgctgtagcggcaacattggcgcgtgtaaaagctaaaaaagcccaacaagcgcaagccaccgcggcagtagacacacctgctgagactcaggctgaggtggaaaccgatccgcgtaaagctgctgtcgccgcagctattgcccgcgtaaaagccaaaaaagcccaacaagcgcaagccaccgcggcagtagatgcacctgctgagactcaagctgaggtggtgaaaccgatccgcgtaaagctgctgtcgctgctgccattgctcgcgtaa

SEQ ID NO: 299589 - DNA, 207 bp, Proteus mirabilis
atgctaggtatatatataaaagacagctatgatttttcagccgaaaatgaacccctaggtgtctggagtaaaaatggaattatgaataaaacgcaaactcttttatatatggggttttataatcaaaacatgtggaaagaactcgcagatggtggcttttcaggaagtgtaccgatatataataaaaactttcgtgagtggcagtaa

SEQ ID NO: 299590 - DNA, 957 bp, Proteus mirabilis
atgattaaattaggtattgtgatggatcctatttcatccatcaaaattaaaaaagataccagctttgccatgttactcgaagcacagcgccgtggttgggaaatccattatatggaaatgaacgatctttatcttaatcaaggtgaagcccgtgctcatacccgtctgttaagtgtagaagaaaatcctgaaaagtggtttgaatttggtcaagagcaagatattgcgttaggctcccttgataccattttaatgcgtaaagatcccccatttgataccgaatttatctatgctacctatattcttgaacgtgctgaagatatggggacgttaattgttaataaaccacaaagcttacgtgactgtaatgaaaaactctttacagcatggttcccatcattaacgccaaatacattagtcactcgagaagccaaacaccttcgcgctttccatgaaaaacatggtgatgtgatttttaaaccacttgatggtatgggtggcgcctctatttttcgcctgaaaaaagatgatccaaacgtcggtgttattattgaaaccttaacagagcacggtcaccgtttctgtatggcacagaatttcttaccagaaattgttgatggtgataaacgtattctggtggttgatggagaaccggttccttactgcttagcccgtatccctgccaaaggtgaaacccgtggtaacttagccgctggtggccatggagaagcgcgtccattaacagaaagcgattgggcaattgctcgccaagtagcacctatcttaaaacaaaaaggccttatttttgttggattagatgttattggcgatcgtttaactgaaattaatgttacaagccctacttgtgcacgtgagattgaagcggcttatcctgaggtttctattacaggtatgttaatggatgctattgaagctcgccttaacaagaaaaactaa

SEQ ID NO: 299591 - DNA, 732 bp, Proteus mirabilis
atgcgtattcctcgcatttatcatccagagccactcagtgcaggtacacaaacttcattagcagaagaagctgcaaatcacgttggacgagtattaagaatgtcaaaaggccaaaaactggcactttttgatggctccaatcaagtatttgatgctgatattatcgaaagcagcaaaaaatcagtgattgtgcagattaatgaaggacaaatggatgatagagaatccccacttgatcttcatttaggccaagtactttcacgtggtgaaaaaatggagtttactatccaaaagtccgttgaattaggtgttaacaccattactccgctgatctctgaacgttgtggtgttaaactagatcctagtcgtttagaaaaaaagcatcagcaatggcaaaaaattattatctcagcctgtgaacaatgtggcagaaataaaattccacagcttatgccggtgatgtcattagaggcgtggtgtgcccaaacggatgatagcttaaaacttaatttacaccctagagcaagccaaagcattaataccttgccacttccagttaaaaaagtacgactattaattggccctgaggggggattatcccctgaagaaattgccatgacagcaaaataccattttactgatattttattaggtcctcgtgtattaagaactgaaacaacagcactcaccgcaatcaccgctttgcaggttcggttcggcgatctgggataa

SEQ ID NO: 299592 - DNA, 258 bp, Proteus mirabilis
ttggatattaaaaaagaaaataaacgtttatcacaagttcagcatattgataaatttaaaacgaaatataaagtctctgatatggtaactgtttatttatctgaaaccaataaattatatgacagggggatttatagtgttcttgtgcctttcgatagatctaaaaaagtgttatccagattctattggagctatcagggaggggaagggagacctgatactgaaactttattattaaacaagcagtcgattttttag

SEQ ID NO: 299593 - DNA, 294 bp, Proteus mirabilis
atgggcgtaatcccaaaagataatatccagttaggtatcgagagtcggcaatatgtgagtgaggttaataaggctcagcgactgactgaacagcagctagcgcaaattaccgatccttatgttcgtatgagtttactattgcagcaagaatttggtttaaggcgtgaagaagcaattaagttccaacccgcctatgctgataaagactatcatattttattgaaagggagttggactaaaggcggtcgcgaaagaactgttccaatctttacaacagcggagagtgctagatga

SEQ ID NO: 299594 - DNA, 282 bp, Proteus mirabilis
atgccagatcatgttcatatgttagtgagtattccaccaaagatatgcgtatcaagttttatgggatatttgaaaggtaaaagttcgttgatgatctttgatagacatgccaatctcaaatataaatttggcaacagaaagttttgggcggaagggttctatgtcacaacagttggactcaatgaagccacaattcaaaagtatatcagagagcaagaaaagtcggatttaatctcggataagttgagtagtaaagaatatgaaaaccccttcaaggggtaa

SEQ ID NO: 299595 - DNA, 810 bp, Proteus mirabilis
atgttgatctcttcttccgttaaccaaatggcgcaattacagccttgtcgatattcaggctttattttatcaatagtatttcattttactttagtcattagttatttttatatcacgcaacaacgcccggtgataatccatcaacctgcaccggctgttatgcttagcttaagtgaaaacgtccaagcggttaataaagaaaaacagattgttggtgttgatcagcaaatggcggtcgccagccaaaaaaagcagcagcaagaggttgcagagaaacagcccaatcttattattaatgaaaatgcagatatgttgattgaaaagccgaaaaaagtgccacaaaaccaggcttcagttaaggttgcccctttaattgccccaatcaaaccttcaccgattatcagtgaaaatgtatcgagtctatccgcaccttcaacaagtcattctgttgcgaaacaacaggccaatgatgtttctgcaaattatgatagtgacgcaaataaagaagcagatgccttggcattatggcaagctaaagccaaaggtcatttaaatcgttataaagcttatcctgaagaagcgaaaagaaaagggcgtacgggagcacctaaagtgcgttttattgttgatggacaaggttatgtcatcgcctgtgagttgattaatagcagtggtgtgcgctcactagataaagaggcacaaagtgttattaagcgtgctcagccattaccaaaacccccagaagaactgctttttaatggtcaaataacaattgaaatggcaattgaattttccacattgactttataa

SEQ ID NO: 299596 - DNA, 2283 bp, Proteus mirabilis
atggaagacaaactacaacaaagtgcattggattttcatgaattccctaatcctggcaaaatcacagtgacaccaactaaaccactaataacacaacgtgacttagcattagcttattcaccgggtgttgcggctccttgccttgaaattgcggctaatcctttagctgcgtatcgctttacagcgaaaggtaacttggttgccgttatctctaatggtacggctgttttaggactcggtaatattggcgccttagcaggtaaacctgtgatggaaggtaaaggcgtattatttaaaaaattctccggcattgatgtatttgatattgaagtgaatgaaaccgatcctgataaattggtggatattatcgcttcattggaaccgacttttggtgggatcaatttagaagatattaaagcaccggaatgcttctatattgaacaaaaactgcgtgagagaatgaatattcctgtctttcatgatgatcagcatggtacggcaattatttctacggccgctattatcaacgggttacgtattgttcgtaaaaatattgataaagttcgcttagtggtttcaggtgccggtgctgcttctatcgcgtgtatgaaccttcttgtcgctttagggttaaagcgtgaaaatattgttgtttgtgactcaaaaggggttatttatcaaggccgcgaagccaatatggcagaaactaaagcggcttatgcgattaaagataacggcagtcgcacacttgatgatgtgatcaacgatgccgatattttcttagggtgctcagggccgggggtactgacccaagagatggtgaaaaaaatggcacgcgacccgctgatccttgcgctagcaaatccggagccagaaattttaccaccgttagtcaaagcggtacgatcagatgcgattatttgtaccggacgctctgattttcctaatcaggtcaataatgttctctgtttcccgttcattttccgtggtgcgctggatgtgggggcaaccgctatcaatgaagagatgaaacttgcctgtgtacatgcaattgctgaattggcactggcagaacaaaatgaagaggttgctagcgcatatggcgatcaagaactgtcatttggcccagaatacattattccaaaaccttttgatccacgtttaattgttaaaattgcgcctgccgttgcaaaagctgcgatggattcaggtgtggcaacccgtccaattgaagatttcgccgcttatatcgaacacctcaatgaattcgtttataaaacgaatttatttatgaaacctatctttgctcaagcgaaaaaagagaaaaaacgcattgtattggcggaaggggaagataaccgcgttctgcatgcgactcaagaattagtcactttaggacttgctgagccgatcctaattggtcgtcctagtgtgattgaaatgcgtattcagaaattaggcttacatattcaagcgggtagagattttgaagttgtaaacaatgaaaacgatccgcgttttaaagaatattggcaagaatattatcaaataatgaaacgtcgtggtgtttcgcaagaacaagctcgtcgagccgttattggtaatccaacactgattggcgcaattatggtacgtagaggggaagcagacggcttgatctgtggaaccgtgggaagttattcggaacattttgaaatatataaaaatgtttttggtttacgtgaaggatctaatactgcaggggcgatgaatgcactattactgcctagtggtaacacctttattactgatacctatgtaaatgaagatcctaccgctgagcaacttgctgacatcactataatggcggcagatactattcgtcgctttggtattgagccaaaagcagcattagtatcccgctcaagttttggctcttttgacagcccatcatccataaaattaagaaaagcgttagagcttattaaacaacgcgcaccagaattagaaattgatggtgaaatgcatgctgatgctgctttagttgagtcaattcgtcgcgatattatgccagacagcccactaaaaggttcagctaatctgttagtgatgccaacaatggaagcggcgcgcattagctataacttattacgtgtcactagctccgatggggtaacggtaggtccagtgttaatgggagttgctaagcctgcccatattttaacgccaattgcatctgttcgtcgcattgttaatatggtggcattagctgtggttgaagcacaaacacaatctcaacgctaa

SEQ ID NO: 299597 - DNA, 453 bp, Proteus mirabilis
atgttgcctaattatcattattatatgcaagcgcatcattatactatgctgacacctatttatatcgcctcgatagtattaagtttatgctttattaataattataatgagttaagtttttggttattatttatgggtaactttgctatttttattgtcatcttactcagtgcaatgatgaatgagcgagtatattggcgatactgtatcttttctgaaaaattttatttaaaaactaataacgaaagagagattaaaagaacgataatatcacgctattttactgttttttcattaagctatataattggggttgtaatagttttttttgtcacctcttatttaatagagattatttttaacagtcaaatatatatcataacttttctttatatagccgcaagaagaaaaaaattaaaatatcctatcttatcgttaatgaagttcttttaa

SEQ ID NO: 299598 - DNA, 909 bp, Proteus mirabilis
atggatatgttccgctctgtaaataaaatttcgcttacggcattatgcttagttgcttcaatcttctttataacccctgcacaagcaaaagataagctaaaagttgtcacgacttttactattatccaagatatcgcacaaaatgttgcaggcgatgctgccgtagttgaatctatcaccaaacccggtgctgaaattcatgattatcaaccaacaccaaaagatattgtcaaagcacaaaaagctgatcttattttatggaatgggttaaaccttgagcgttggtttgaacgttttttcaatgaattacgtaatgtgcctgcggtggttgtgactgaaggtattactcctatgcctatccgtgaaggggcttataaaaacaacccaaacccacatgcatggatgtctcctaataatgcattaatttatatcgaaaatattcgtaaagcgctcgttgaacacgacccagataatgctgcaatttataaccaaaatgccgctcgctacgctgaacaaattaaacaacttgatgcgccattaagagcaagattagcgcgtattcctgaagaaaaacgctggttagtgactagtgaaggtgccttcagctatttgaccaatgattatggttttaaagaagtgtatttatggccaattaatgcagaagagcaaggcaccccacaacaagtaaaatacgtgattgataccgtaagagaacaccatattcctgttgtgtttagtgaaagtacgatttccgataaacccgctaaacaggttagtaaagagacaggtgcaaaatatggtggcgttctttatgtagactcactttctgcccctggtggcgaagtcccaacttatattgatctacttaatattactgtcgatacaattgcgaaaggatttggacaatga

SEQ ID NO: 299599 - DNA, 927 bp, Proteus mirabilis
atgacaactccccgccttgctgttttaggtagtatcaatgttgaccatattatgaatattgcacaatttcccaagcccggagaaaccgtgattggtcatgactataaaatagcatttggtggtaaaggggcaaatcaagccgtcgcttgtggacgtagtggtgccgatatcacgtttattgcctgtgtgggagatgatgctattggtcgcgaaatcatcgctcaattaaaaacagataatattgatactgatgcaattcgtattatccccaagacacctacaggtgtagcaatgatcttggttaatgaacaaggcgaaaatgtcattagcattgttgccggagcaaatagtgctctcactccaagccatttgcatcagtatcgtcatattattgaacaagcagatgctttattaatgcaattagaatccccactagacactgtctttgaggcagcaaaacgagccaaagcacatcaaacaaaagtgattttaaatcccgctcctgcacagccgttatctgatgaatttctgagttttattgatattattacgccaaatgagacagaagccgaaatattaaccggtatttctgtgcatgatgaagtaggtgcagctaaagcggctaatattttgcacagtaaaggcataaaacacgttttaatcactttaggcagtcgtggagtatggtttagtgaacaaggcaccggcatgatcattcccggttttcgtgttgaagcagttgatactattgccgcaggtgatacctttaatggtgcatttgtcacagcgatattagaaggtaaatcagctcatgatgcgatccgtttcgcccatgcagccgcggcaattgcagtgacacgtcatggagcgcaatcctccgtcccttggcgtgatgaaattaagtcatttttagcagagcgagcataa

SEQ ID NO: 299600 - DNA, 792 bp, Proteus mirabilis
atgcagatcttagcagaccaagtgcgctatagttctaagccgcctgaaatgctattaacgcaccccttacctgatagccgtttatccgatgcacgtagccgtgcagcgcaatatgctccgcgcaaagtgccacaatcggccaattttctctatgctaaaatgcgggtattaactatgcttgagaaaaaccccgcatcaagtaacgccttgcaaaccacactggatcagtttagacaaggaacggaattagaaaaatcagccgccaattatgcacaagccttactctattctcgtgatcgtaaatttaatgaagcgagaaaaatactcacccccatgctggcaaaagagcctaataatatctggcttattgatgccattaccgacattgatgtagagcaaaaccgtgctgcagaagcgataacacgcttacaacaagcacttaagcaatcacctaacaacaaagtgctgacggttaatttagctaatgcttatatgcaaaataagcaatataacgaagctaatcgattattatatcgctatacctttgacaaccctgacgatcctattggttggcaattgatggcggaaaactcggcaaaacaaggtaatcgagcccaagagcttgccgcttacgctgaagatttggcattacgaggagattttgaaacggccattcgttatcttggtgatgcgagtcgtcaagtaaaattaggcagtaatgagcaagctcgttttgatgcacgtattgaccaattgcgtaaacttcaacatagagacagtcaatttaaataa

SEQ ID NO: 299601 - DNA, 360 bp, Proteus mirabilis
atgaccaataacaaagtaacgatttatcataatccgcgctgttctaaaagccgtgaaaccttacatttattagaagagatgcatatcacccctgacgttattcattatttagatacgccaccttctgtcgctgagttaaaagcattactcaaagcgctagattttgacgatgcaagaaaattaatgcgcaccaaagaagagatttataaaaccctaaagcttgcagatgagagctcacaagaagcattaattcaggccatgcatagtcaccctaaattaattgaacgtcctattgtggtcgttggcaataaagcgcgtttaggtcgtccacctgagcaagttaccgcactctttaagtag

SEQ ID NO: 299602 - DNA, 2460 bp, Proteus mirabilis
atggtcaaaaaccgcctagatagagctatccaatcagagcgcaatcttaaagagcaaattgatgtattgaaaggcagtttgttgctctctcgtattctgtttgaagagcaaattgaactacctgatgatatctttatcaataagttaccggataaaattgccgatttacgtttagaacagtttgaaatcaataaacaaagagatcagatttttcagccgaatctctatatcgaccaattaatgcaagagtaccaagccacacatccagaaattaccgataaaaatgagctaaaagagctacataatgcattattacaactgattgatgcgcggcgggatctacttgataaactcaataatcaactgggtagccaaatttctgaatctattaatttacagatggatcagcaacaactacgcagtgtggtgagttcattagaaaataccttagcgcaacaaatattctgggtaagtagtaataaaccgattaacctcagttggttctcaacgtttccagatcaggctgtggctgaatttcaaagttttaaactcaactggtcaaatgaaaatctgttgaccggggctaaaaaatcatatcctgtgctgattgcgctaattctgttcagtagcatactgatttggcaacgtaaaaaattagataagcagtttgataaattaagtgccgatattaataagcttaataaagatactcagttacatactccattggctttagggattgttttcttaaaaacattacccctttcttgtattgtgttagcaataggatattggctaattaatagttttaatgtgcaacaagagtttatctggtcttttacttggcagtttgcggtattttggctgatgtttgagtggtcttatcgtttaatgtctgataatggtgtgtccgtaaatcactttaagatccccctagagcgagtacaacaaaatcgcaaacgtttattacgtttatcgcttcccatgttgccaattattttactttccgcttatggcattaataatccattactgttagttggcgatgtgattggtcaattagtgacaattatttcgctcttttttattagtttgtgtgcattacctttttgtcgtgaaatgtggcaagaaaagggtaatcatgttgtgagaacggtggttatcaccttattaactttctcgcctttacttttaatggggttagttatttttggttattattacaccgcactacgtttagccaatcgttggattgatagcttatatctacttatgttgtggtttattgcttaccacgcgagtttacgcggccttaccgttgcagcaagacgattggcttatcgtcgagcgctagagcgccgacaagcgatgcttaaagagaaaaaagagggggaagatagcactctcgagccaatccaagagccaccgatggatatggagcagataaaccaacaatcattaagattaaccacaatgatcttatttattatcttcgcttccagtttttatggtatttggtctgactttattacaatctttacttacttagatggtattacgctttggcattatactttgcctactgagttgggtaatgtggttaaagcggtgacggttgctgacttactcctctcttttgccattatggctatttcttggtttatgataagaaaccttccgggtttactcgaagttcttattctttcgcgaattaaattacagcaaggcgcttcttacgccattaccactattctgacctatattattattgcaataggtacaattgtttcgctgggtatattaggcgtggcatgggaaaaactacaatggttggcggcagccttaacggtgggtttagggtttggtttacaagaaatattcgctaactttgtttcagggttaataatcttatttgaaagaccggtcagaattggtgatacggtgacgattggttcttattctggaacagtgagtcgtattcgtatcagagcaaccacggtaacggactttgatcgcaaagaggttattatcccgaataaagcctttgtgaccgaacgactgatcaactggacattatcggataccgtcacacgtattatcattcaagtcggtgttgcgtatggttctgatctggataaagtgaaaaccattttaatgaaagccgcaaaagataatcccaaagtgatgactgagccagagcctgtggtgctgtttaccgaatttggggctagcacgctaaatcatgaattacgtttttatgttagaacgctaggggatagaaatatcgctatcgatgaagtcaatcgcgctattgatagactttgcaatgaaaatgatatcaatatcgcgtttaaccaattagaagtgtatctgcataataaacaaggggaagaagtgcaagaaataaaaaaaggccctcttgatggttcaacacccgaagcaaatacgccatttaattaa

SEQ ID NO: 299603 - DNA, 522 bp, Proteus mirabilis
atgaacaatgaactgatagagtatctacattcggtatatcctgagttaccgattgatactagctatatgcggggttactcgaatgaagaaattgggaaaattgaacgtttatatgacatcaaagtcgaaggtcaattgtatgattttttagctaatattggtcgttgtagtggtggcctttttggcgatgaaccgcttgttttttatcgatatggtcagacggttagaggtaacatcttatatcaagattcaatgagagatgaagtcccacatgttcagccatataatcttcgaaaacagaaagcattatttatatcagtcgaaagctatacgcagtatttttttgttttaacagcttctgataaccctaaccttatttatcaatatgatgaaaatgaagaaaccgtagacgctacaaattgggatcttaaaaattatttaagacatgttgttaatgtatacactcgaaattacgatgttaaagcatctttcgatcaacatggtgagcttattattatttga

SEQ ID NO: 299604 - DNA, 186 bp, Proteus mirabilis
atgacaccagaaaaagctgctgaaatattaagtagcacgcctccaacaacagaagcgaaagcacttcaatttgtggctgcgaaggtatatttagcttttgtaaaaagtggtaaggaaatacctagttgggatgcaggaacgggtcaatatagctttaaagatactggcaaagtgatagatgtttag

SEQ ID NO: 299605 - DNA, 366 bp, Proteus mirabilis
atggtatcaaatattgaatataaaacggttgttgaatacgctgaaacccaagcattagacggattatgggcctatatcacaccagacatgcttccttctctacatgtaatttgtgaagatttttcctttccggaaaggaaaaaaatatttttttggttcttaaaaaaattattgaatgaaggtcatttaaaattagctaagcacggtaaatttttaagtggctcgatagatgaacaattacaatgtttttatgacgcatttcctgaaacagaagaggaattaattgatcaattttggttttttgatgaaagttgtcctgggggggcagtctggatacttcaagatggtacgctggaatggacatag

SEQ ID NO: 299606 - DNA, 504 bp, Proteus mirabilis
gtgggcgtgggtgcaggcggctacggggtcaatgtctccgcctccgtcaaccaaggcaaaggccatgaaaaaggcaatggcctcaccctcaccgaaaccacactggatgcaggtaataaactcaccttaaacagtgggcaagatgccaccctcaaaggcgcacaagtcagtggcgaacaagtcaccgtcaatgtcggtcgtgacctcatcctgcaaagtcaaatagggggaaatcgttattcaactagagtttatgaaagtcaaaatttaacagaccaacagatatataattatgctgagcaattggctgctcaacctctaactaaggtaaaagatgggatttatactgcgaaactggctgatggaacaatgataactcttaggagtgtatctagttcagcagagcaaacaggtgctcgttggacaatacaaataaggaacagtcctactttaaaacaagtagaaaatggacttggaaaaaatgcagagataaaattcagatag

SEQ ID NO: 299607 - DNA, 1041 bp, Proteus mirabilis
atggataaaaaaattaaaaaaagcctagcgcgcgtgatcaccattattgtttttttgataacgctcattttattatggcaaagtattcatatgtcggcattaaatcctcttagtgaagatgccatcattgatgctaataaaattaatatctcagcctctgtacctggacgcattgccgctgtttatgtcaaagaaaatagtaaagtcaaaaaaggcgatttactgtttacacttgatccaaccatgtacgcactaagggtagagcaagctaaagagcaactacagattgcccaagcgacattaagcaataagcagcgtattattattgcggaaacatccaattcagaagtggcacaagagcaaataaaacgtgcacaggtcaatttatcattagctacacaatcattaaatcgattagaacctttattagcaaaaggctttgttacggcacaacaagtcgatgatgctaggacgttaaaacatgatgctgaagtgacattaaaacaagcacagaaacagaacgtggcatctgaagcgcttattaataataccgattcagaagaagcattagtcaaatcattaaaaacatcccttgccatggcggagtgggagttaagtaatactgaggtaagggcgccaagtaatggatatatcgccggcatcgttttatctcccggtgagtttattttgtcagggcagtctgtttttaccttaattgattctgatacttggtttgcttcggcctattttaaagaaactgatttaaataatataaaaattggtagctgtgtggtgatttactccatgattgataatcaacaccccattaaaggtaaagttgaaggaattagtcggggagtcatgtcgaccgatctgattaatattccaagagacttaccttatgtgcctaaatcattaaattgggtacgggttgagcagcgttttcccgtaaaagtcattattactgaaccaccagaagcactcatgcgcatcggtgccactgctactgtaaatattgtacctaacgatgatgactgttaa

SEQ ID NO: 299608 - DNA, 435 bp, Proteus mirabilis
atgatatattttattttaattgcattgtttaatggggtttgtatcgtaacaagtcgaacattaaatggtaaattagcacaaaacagcaacgccttttatagtgcgttaattaaccaccttataggttttttatttctaacgatttttgttttatgggtaaaagattatcaatctattgagataagaacgatcccattaattgcttttgttggtggcgttatcggcgctttttttgttgtcattaatagctatgttctacctcttcttggggtaatgttaacctctatattagcaatttgtgggcagatggtttctagcttattgattgatataatcaacggtgttgaaagtaatcatttattactacagatagttggtgtcattctgattattattggtgtattaataaagtttactaaacctacacaatcttaa

SEQ ID NO: 299609 - DNA, 456 bp, Proteus mirabilis
atgaataacaagtacattctttctctaattgctctatcatccggtgttttactttcactgatgattatgagtaatagctatttagctagttttacaactcctttaacggcatcgtggataacccatggtatcggtacacttttttctttaataatatacattttatattccagtaaaaatccactaaaaaaacaaagtaaaaacaaaataaagttgcagtggtatttgggggggattcccggtgcatttactgtgttattagcggcaatgacggtaaatagtccgttatccctttctggtagcattattttaatgataaccggacaaattatttttagtgttatcgttgatgcaatgggatggttcggtgttaaaaaaagaaggatcactctcgttgatctttggatgtgctttttacttattttaggtagtgccttattaataataggtcgataa

SEQ ID NO: 299610 - DNA, 930 bp, Proteus mirabilis
atgaatgatatgaatgtttttcccattttgattgcggttgcagaaaatttgaatataactaaagccgcgcaatcacttaatatgaccaagtcagcagtgagtaagtctatccttgcagtagaagttcgattaggtattaaattgtttcatcgtacaacgcgacatatcagtctgacacccgaaggtagtatttatatcaattatattcgtcagtcatatcaattagctattatggctgaagatgctgtctctcaatttagtgatagtgctaaaggcacgattaaaatatcagcacctatgtcgtttggtacactacatctttcaaaaattattcctctgtttatgctgcaatatccagatcttgaagtgcaattggtacttgatgataaagtgacagatttagtggcagatggttatgatttagccgttagaataggggaattgcccgactcatcacttatcgcaagagaactatcaccttgttatagccagctttatgcttcagcagaatatcttactcaatatgggataccggaaaaagtatctgatctcaagaaccataactgtctatcttattcgttatatcaagcaggacttgaatgggtattttatcaaaagggtaaaaaatacagtcatatccctaaaggcaattatcgaacaaataatagtgaggctttattccaagcagttattcaaggaatgggcatcgctttacttccccattttattactcaaacaacctcacaaggacgagaattagttcctctactcacacagtttgatctccctgaccattttatttatgcgatataccccgataaaaaatatttaccacgaaaaattacattgtttgttgagttcttaaaacaacagtttgggataaatagtcattatcagactatgatagaaaaaaaatacgaaagaccataa

SEQ ID NO: 299611 - DNA, 1317 bp, Proteus mirabilis
atgtcttactttgataaaattgaacaaattcaatatgaaggtaccaccagcgataatcctcttgcttttcgctactataatccagatgaaattattttagggaaaagaatggaagaccatctgcgatttgctgcctgctattggcataacttctgctggaatggttcggatatgtttggtattggtacatttgatagaccttggcagacaccgggagaagcactagaacaagcaaagcgtaaagcggatgttgcttttgaatttttccataaactcaatgtacctttttactgttttcatgatgttgatgttatctctgaaggaaatagcattaatgaatatatcactaatatggcagcaataactgaggtattagcgcaaaaacagcaagaaacgggcgttaaattattatgggggactgcaaattgttttactcatcctcgttacggagcgggtgctgcaacaaatcctgatccagaagtatttgcttgggcggcaacccaagtctgtgaagcgatgaaagcaacaaaaacgctgggaggtgaaaactatgtattatggggaggccgcgaaggttacgaaacattattaaatactgatttacgccaagagcgagaacaaattggtcgttttatgcagatggttgttgagcacaaacataaaattggattccaaggtacactactcatcgagccgaagccacaagagccaactaagcatcaatatgactatgatactgcgacagtttatggtttcttaaaacaatttggtttagaaaaagaagtcaaagtgaacatagaagctaaccatgcaactttagcgggtcatagtttccatcatgaaattgccacagctattgcattaggtattttaggctcagtcgatgctaaccgaggtgatccacaattaggttgggatacagaccaattccccaatagtgtagaagaaaatgcattagttatgtatgaaattctcaaatccggtggttttacgacgggtggattaaactttgatgccaaagtacgtcgtcaaagtaatgataaatacgatcttttctatggacatatatccggaatggacacaatggcaatggcattacgtattgcagcaagaatgatccaagacggtggacttgataaatttatagctcaacgttatgcgggatggagtgctgaatttggtcaaaatatcctacaaggtaaattaagtcttgaagaagtggcaaaatatgcacaaagcaacaccttagcgccacaattacaaagtgggcgtcaagagatgctagagagtttagtgaatcgttatatttttggttaa

SEQ ID NO: 299612 - DNA, 630 bp, Proteus mirabilis
gtggctaaagattttcgtgatattacccttgcactggcaggtatctgccaggcaagtcgtcttgttcagcaaattgcttatcaagggaatgcagacgagaaagatgttgaagtcatggttaacagcatttttaatatcaacccaacttcaaccttggatgtttatggtaaccaaataagtcatttgaaattaggttttcaaactataaaagcgatccatcaagcggtaagaagagaaaaacttacttttgagttgatgacttatcaacaaggcctgattaaccttgaacgtatcataaacaaaaataacgattacagttcgcatttatcacaaaaaatatctcaacttgaacgacaaaaaaattattttgaaccgctttctgacggactatttaatgctctcgctggcgtttatagtgatgcggtcagccctgtagggccaaaaattcaagttaatggttcgattgagttacttaaaaaccctattattcaagccaaagtacgtggattacttctgacaggtcttcgtagtgcagtactttggcgtcaagtaggtggtcgtcgttttgattttttactccatcaaaaaaccatcttacgacaaactgatgattttctcgctcaatgttaa

SEQ ID NO: 299613 - DNA, 1050 bp, Proteus mirabilis
atgactgatatagtaagtttgttaggtgctgatgctaattcattattggaacatcgctgccaaaccatcccaagcgaaaatctctacctgccaggttctgactttgttgatcgtgtgatgattgataacaatcgccctaataccgtattgcgttctatgcaaaccctgtttaaccatggtcggttagcaggaacgggttatctttctattttgcctgtcgatcagggtgttgaacactctgcagcagcttcatttgccgctaacccactctattttgatcccaaaaatattgttgaactcgcgattgaagcaggatgtaactgtgttgcatccacctatggtgttctggcttctgtttctcgtcgttatgcacacaaaatcccatttttggtaaaacttaatcataacgaaacattaagctatccaactcaatacgaccaaacgctgtatgccagtgttgaacaagcctttgaaatgggcgctgttgctgtaggtgcgactatctattttggttctccagaaagccgccgccaaatcgaagagatctcaatggcatttgaacgtgcccatgaattaggcatggtcaccgtattatgggcatatttacgtaatccagcctttaagaaagatggggttgattaccatgcaagtgctgatttaacgggtcaagcaaaccatttagcatcaaccattggtgccgatattgtgaaacagaaaatggctgaaaataacggtggctttaaagcgattggttttggtcatactgatgagcgtgtttacactaaactgactagcgaaaaccccattgatttagtgcgttaccaattagctaactgctatatgggacgtgcaggattaattaactcaggtggagcatcgggtaataatgatcttgctgatgcggtacgtactgcagtaattaataaacgtgctgggggtatggggcttatcttaggtcgtaaagcctttaagaaatccatgaaagacggtgttgctctaattaatgccgtacaagatgtctatttagataaatctgtgactattgcttaa

SEQ ID NO: 299614 - DNA, 894 bp, Proteus mirabilis
atgggccaaatcagtttactgattatcaatggaaaaaattcaggcaatgaggctctgcgacaagcggtttatcaacaacgcaaggaaggtaatgatatccaagtcagaatgacatgggaatcaagtgatattcaacgttttgtacaagaagcactccatattcaagcgcaaaccgttatcgccgcagggggtgatggcacgatcaacaatgtcgcctctgaactggttcgtttagccccctcctcgccccccgcgttaggcattatccctttagggactgcaaatgattttgccaccagtgcacaaatcccattagaaatggacaaagcgctcagtttagcgattaaaggtcgcgccgttcctgtcgatattattactgtgaacaaaacacattactttatcaatatggcctcaggtggctttggtaccaagatcaccactgaaacccctgaagtactaaaatccgccttaggtggcgctgcttattttattaatggtttattgcgtattgataccttaaaagcggatcaatgcaccgttgaagctgaaaattttcattggaaaggtgaagctttaattatcggtattggtaatggacgccaagcgggaggaggacaacaactttgccccgaagcactgattaatgacaataaactcaatattacccttgttgaagcccgtgaattgcttccttctctattaaccagtctgttcgatcgtaagaaaaatgacaaaattattgagcgagaaagtgattgggtcactattagtgcagctcatgaaatggtatttaatttagatggtgaaccccttttaggggataaatttgaatttattgtactacctgaagcgatccactgccggttaccgccccaatgtgacttgttatcttaa

SEQ ID NO: 299615 - DNA, 2421 bp, Proteus mirabilis
atgagcaatcagtccgatcatcatcataatattaagccaatttccggtgatataagtcgtcgccattttattcaagcgagctcggcattagtcacactgccctttttttcctccaacacgatagcggcaacgcaagatcatgcaataacgaaaaaaacaattgacgccaaagagagtgagcgtgttgtctctacctgtagtagttttgactgtggcggaaagtgtgatattcgcgctcacgttaaagatggcaaagtaacacgtattagcactcgacctgacgccgatttagatgaagagatgcctatcatgcgagcctgtgtacggggtcgtggttatcgtaaattcgtctatcatccggatagattaaaatatcccatgaagcgagtaggtaaacgtggtgaaggccgatttgagcgcatcacttgggaagaagctacaacgcttattgcacaaaatatgcaacgtattaccaagcaatatggccctgcttcacgttttgtcagtttaagcactggggtgactggtggtattttttctggtgccaatatgctacgccgtctgtttaatctgaccggtggctttcttgagaattatcactccgtgagtaatggtaatacccttgccgttaccccttatacatacggtacagccgctagcggaagtacattagatacattagcaaatacccctttagttattctatggggacataatcctaatgaaactatttttgggcattccaatcattacttccaaaaaatgaaaaaaaacggcactaaatttattgtcgttgatccacgttattctgatactgcctcttctttagctgaccagtggatcccgctgttacctaccactgataacgcgatgatggatgcaatgatgtatgtcatcgtcagtgaaaacctgcatgatcaggccgttatcgacaaatatacccttggtttcgatgaacatcagatgccagaaggtgttggtgaaaatgagtctttagttgcctatttaatggggaaaaaagacgggatcaagaaaacacctgaatgggcggagccaatcactaaagtacccgcagatactattcgtcaattagctcgtgaatatgcttgcacaaaaccggcggcattaatccaaggttgggggccacaacgtcatatttgtggtgaacggacggcgcgcggtgcgacgctgttagcgactattaccggcaacgttggtgtacgcggtggctgggcggcaggctatggcatggcattaaactctgagttacgtaaaaccattgccggcccaagtttattaactaatccagttaaagcaaaaatcaatatcaccaattgggtacaagcgtgtgaagataaaaatttggtcacaccacaaaatggcttactcaatgccgagaaacttgatactgaaatcaagatgattttctcaatggcgggtaattatatggtgaatcaaaataccgatattcttcatgccgctaaagtgcttgaagatgaatcaaaagtcgaatttatcgtctgtagcgatctctatttaacacctagcgccaaatatgcggatatcttactacctgaaaccagctttttagagcgctggaatattggaggcacatggagttatggcgattatattattctgtccgaaaaagtgatagagccagagtttgaacgtcgtaccgactacgattggttacgtgaagtggctgataaactgggggtcggtgaacaatttagtgaaggtaaagccactgatcgcgactggattgaatatttagtcaatgatgctagccttaaacgtcctgaagatggcattcccacctttgatgagttattgattaaacgtcgtcatctgctaaaacatcgtcctcatacccaaaatgttgcgtttgagaaaaatattcaagatatagaaaataatccatttccaaccccatcaggaaaaattgagatcttctctaaacgcttatatgagatgaataatagcgagatccccgcactttctcattatgtacctgccatagaagggcccgaagatacgttaacagataaatttccactacaactcatcacgtggaaaggacgtaaccgcgcaaattcgacacaatttgccaatccttggctacaagaagtacaacgtcaagaattatggatcaacccattagatgctgaagatagaaatatcaaacaaggcgataaagccaaagtctataacgaccgtgggatcaccttagttcccgtcaaactcacacaacgcattatgcctggtgtcgttgccttacaagcaggtgcttggtggcaaccagataaacaaggtatcgatcaagggggatgtgccaacgtcttaacctcatcccgtagcaccgcaatggcacacggtaatgctcaccaaactttattggtcgaggtagtaaaagcatga

SEQ ID NO: 299616 - DNA, 900 bp, Proteus mirabilis
atgaatgaatggtcattattgattttcacctttatgatgaatgccactattggcttaacactcataacaggcctttttgcacgccgtcttgcacattatctcagtgctgaaagctattatcgctttatgttactgaccttattggtgatttgtggattagccggtttaggctctattgcctccattactcacttaggcgtgccgttaaatgctccgaatgccattagaaatgtcttttcagcttggttaagtcgcgaagttgctgtaactgccatttttgtagggtgtttagggatcacttttttatggctatggcgtaccggtaaattttcgatgctgctatttggtgcaagccttctgattggtctatttgacatttattgcatggcatccatttatcgccatacttccattttaacatggatggataacaacacttatgtgatgttttttggcgcaatgctcacattaggggcgacaatattcttcttgctactaaaaatattgcaacgtataggcaataaattagggatagaaataccatcaacctctttccctatccgttggaaatggcaattgtgggggatcatggcatttagtttaattggccggttactctatcaacctttttatgagcactatttaactcgtacgctctatagccaaacatcggtgacctttccgttatcacctattgaagtctattactccattggcgcattacgtatgaccagttggatcttagcaactttggctgtattggtgtgtggctatagtttagtaaaatatttgatgcgccaaactcaacaaaaatcaactgagtccatttttgtctatggcggtatcatggcaattattgcagaatttgctttgcgttatgtgttttattcaattcactaa

SEQ ID NO: 299617 - DNA, 1329 bp, Proteus mirabilis
atgcatatgaaaaaaaatattgagctatggtcttctttccctaaagaaaaaaaagatgaatatatcaagtttctagagattttcggtgcactatcgggtctttttaaagatacagctgcgggaagtagtgcagataaaccttatctatactatcgaaatcatgaacaactttttgctcgagtttttgatgttgaggatctaacccgtaaggactcagcatttgatgctatcgctaagatgggaaaaaatcgaataggtgttggtttaaaaacctggatacattccagagataaaacttttcaaaaagttgcagagtttaataaggttgcacctacagaaattaggcctttaattgataaaggtgaaccacttgatgttgttaaaaaagtagctttattgcgaaataaacgtattgaacttgatcaacgcacctataaaaccacacatactatatatcataatattaccagagatagtaatgtgatgaatattgtggaatgcagttatgatttaattgatttagactcaattaaaataatatcagttaatgataataaaggtgtttttaattttaaagataagaataaaaaatataaatttaatgtcagtaaaagtgttttatatcaagagtttgacgcttctagtgagttggttgttactaaggttcctattacacaatttaaagatccgtttgaattactttcacatattcatgttactgattcatctataagtaaattagctccgcgaaaagaaaaaatagaagatccgaaaaaaacgatttatcttcctatttattccgattcttcaatgaaagtagaagaaaaatcaggattcaatgcatggaatgcggcacctaaaacaaaaggctcaaataagcttcgaccagactttgaagcttatattcctattcctatctggatccatcatatatttcctcatttctttggatttaatgccttagataaagaagaaagaaatgcagctaaaggatttgaattacaattaccagatgatcgaataattactgctattgtgacacaagataatggaaaaggactacaaacgaatcctcaatctattttagggaaatggatattacatgatgtttttggtttaaaagctagagaattactgacaatggatatgttaaatgagttaggtgttgattcagttaaagtgacaaaagtgagtgataataaatttaaaattgatcttgctgacacctctgcttttgaacaatggaaattagggttaaaaactcaaattgaaaattgtgataatattaaacaaaaaccgaaatttagagatgatttagttgaagaataa

SEQ ID NO: 299618 - DNA, 486 bp, Proteus mirabilis
atgaatactatttatttacctctttattctgatagagataatactgtataccctcaatcaggtcttaatgcgtggaatggcgcttccaaaaatcctctaaccaacgatcctagacctagagatgaagtttatattcctattcctatttggattcatcgcactttccctaccttttttggttttaatgctttagatcctaatcaacaagatgcttctataaatggcttttgtttgcactcccctgttggtaattggaatgcgattatcactcaagaaaatagtaaagctcttgagacaaacccacaatctgctttaggtcattggcttctacgagatgttcttaagttaccttatgatactgtcttgaccatggatatgctaaatgaaaagaaaattgactcagtaaaaattactaaaattgattctggttttcgtattgaaattgcaccatttaatgcatttagaaattggaaagcaacactttga

SEQ ID NO: 299619 - DNA, 960 bp, Proteus mirabilis
atgaagtgtgcgtcattttttgcgggagtaggtggtattgatattggttttgaaagggccggttttgatactgtctatgcgaatgaactcgataaattcgcggttgcaaccttaaaagaaaactttgattttatcattgatcatcgcgacatcagagatgtgaaaacaaatgaaatccctgattttgacattatgctagcaggttttccttgtcaggcattttctgttgcaggctatcgtcaaggttttgatgatgaaaaaggtcgaggcaacttattttttgagttagaaaggatattttcagaaaaaaaaccgcctgtaatatttcttgaaaatgttaagaatttagtcacacatgataaaggcaatacttttaaagttattttaaactcacttcataagcatggataccatgtttcacataaagtcttaaatgccgcagaatatgggaatattcctcaaaatagagaacgtatttatgtcgtttgtttccaagatgaacaagctcataaacgttttagttttcctgaaaaaacaccactaactaaagagatttcagatttattagaagatgaaagtacaatagaaccacgctatttttatactgctaaaacccctttctttgatcagcttgttgaagatgtggtgaatgcagaaacactctatcaatggcgtagaaaatatgtgagagctaataaaaacaatctttgtcctacattaacagctaatatgggaactggtggtcacaacgtccctttactcaatgttcaaaagaaaacaaacactataagaaagcttacaccaagagaatgttttaactttcaaggttatcctgctaattataaattaccaaaagatatgagtaatgcgaatttatataaacaagctggaaatagtgttgtgatacctgtcattgaacgtatcgcccaacaaattaaattagcgttagaatcagtttga

SEQ ID NO: 299620 - DNA, 1974 bp, Proteus mirabilis
atgaatataaaatatcgtgctgatattgacggtttaagagcaattgctgttattttggttatcttctttcatttagataatcgcttaataccatcaggttttattggtgttgatatcttttttgtgatctcgggtttcttgatctcgttaattattaaaacatcactgttacaaggtcatttttcatttggtgatttttatattcgccgattatggcgtttacagccactctatctttttgttttagtagcagttcttgtaatttcaggtattttctatctacctagtgattatcttgatatcactaatagtgaaaaatatgcttcagcttttctgtctaacaaatattttgcaagagcaacgaccagttatgcagcgcaagatgcactcttcttaccgttattacatacatggtctttagcaatagaatggcagtggtatctattcctaccttttgcactctattttcttcacaaaattaatcataaagagaaaataaataatttttatcttattgtctttattacaatagtttctttctcttttgtgcttatttatcaaaaagatcaacctaagaattattattactttagtacgcgtatatttgagtttatgttaggagcttgtgttgcttatttacccgtaaaagtaatcattaatcaaagagttaatagtgttattagtctcattgccttagggattatcttttggatagcagttcaaaaagatgtgattgctggttatccgaatttcaatacgttatatgtttgtcttagtgttgcactaattatttatacaggacaacatggcagtattattcaaaaagtgttgtcattaaagccaatagtgatcattggattattatcctattcactttatttatggcactggcccttatttgctattgcgcgttatataggcgtatttaacaccgagatacaaaaagggttatttttagcattaatatttttactctctattttttcttaccttcttattgaaaaaccgtttagaagaaagcgtttgaactttaaatattcgataacattattgtttattatacctattttattggctttaggattaaatgcattaaatgaaaaatatcatggatttggagtaaggcttgggcaaaattacgttaatttagaaaacaaactcaatcaattcgattatcccaatcgaggtaattgtatgaattttcaagcctctgatcctgataagatgtgtcatattggtaaagtgggtagccagaaaaaagcctttttattaggggattcccatgctaatcatttttggggatttatggatattttaggtaaagatgctgagcttgatgtttatgcgcaagcaacttcatcatgcattactattcctaatatttatctttatgattggtctaatcataagaatacggtttatcaacgttgttatgatcaaacagcgaaatattaccagattattaaacagaatcggtttgattatgtgatttttggacaggtttggaataattacgcctcaaatcatgttattaataaaataggtgataaaagaacggttgaggcatctcgtcaacgtgtggaaaaatcgatgcgtgaagcgcttgatatcattgttgctactggagccaaacctgtttttataaaaaccgtttattcaatgcctagtggttttatgacctgtttttatgaaaatgccaagttaagaaaagattttgctgataacaactgtaatcccaaaaactataaaggtgagggtaatacatggatgaaccaattatttgctaaattaaaacaggactattcaagcttaattattatcgatcctaaagatgtacaatgcgataaagatacctgcttaacagatattgaaggagtaccggtttatcgtgatgtaggacatattactgattatgcatcaacgattttgggcatgatgtatattaataagatgggtaatccatttaaggaataa

SEQ ID NO: 299621 - DNA, 1467 bp, Proteus mirabilis
gtgtcaactgcaaacacacctgaagatgaacagaaaccgagtctgaatgcgtttaaacagcctcgtgcattttatctcatcttctcaatcgaattatgggaacgttttggatattacggcttacaagggatcatggccgtttatctggttaaaatgctgggtatgagtgaggcggaagctatcactgtttttgccgcatttaccgcattagtttatggctttgtagcaattggtggctggcttggtgataaaattcttgggacaaaaagggttattgtcctaggcgctattgtgctggcaattggttatgccatggttgctttctccgatcatgataaagatatgatttactggggattagccactattgcggtgggtaatggtttatttaaagccaacccctcttctttattagctacctgttatgagaaagatgatccacaattagatggtgcatttaccatgtactatatgtcgattaatgtgggttcatttttatccatgttagcgacgccatggttagcggcgaattatggctgggatgttgctttcgcattaagtgtggtggggatgttgatcacactggcaaactttatgctatgtcgcggttggatcaaagataaaggctctaggcctgactttgagccactaaactacctgaaactgttattaacgctggtggggattgttgctttaacggcagtatcaacgtggttattacataataatgaagtggcaacatggtctttagcgattatttcattaggtattatcctgatttttgcccgtgaaacttttatgatgaaaggggttgcacggcgtaaaatgatcgtcgctttcttactgatggtggaagccgtggtattttttgttctttatgatcaaatgccaacatcattaaacttttttgcaatccataatgttgaacacgctattttaggctttagtgttgagccagagcaatttcaatcacttaacccattttggatcatgctagctagtccattattggctgctatatataactttatgggtgataaattacccatgccttataaattcacagtgggaatgtttttgagtgcaactgcattcttagtattaccattgggggcgagtatggcaaatgaagctggcatcgtttcatcatggtggcttgttgccagttatggctttcaaagtattggtgagctgatgatctcaggattaggtcttgcgatggtggcccaactagtgccacagcgtttaatgggctttattatgggcgcatggttcttaacatctgcggcagctgcaattattgctggtaaagtggcaagcttaatggccgttcctgaagacgtacaaaatgcacacgcatcattagaaatttatagcagtgtatttttacaaataggtatcgtaacaggtgttattgcactattaatgctatttactgcccctatgctgagtaaaatgacacagtaa

SEQ ID NO: 299622 - DNA, 1236 bp, Proteus mirabilis
atgaataacaacaaaaagaccaaaaaaagattttttcttattatcaccctgcttattgttatcgctggcgctatcgcctattggcaatactcttcaaacaacagcgcaccttctgtgagtaaagatacccctactgcgaatacaccaaatagaagtacggctggctcaagacgaccgcctatgccacctgtacaagtggcgacatctacacaagaagatgtgccgcaatttttaaccgctttaggtacagtgaaagccgtcaatagtgttaccgtgacaagccgtgtggaagggcaattaatggcgttgcatttcaccgaaggccaacaagtgaatcaaggcgatttgttagcagaaatcgacccacgcccttttgaagtgcaattagcgcaagctaaagggcaattggcaaaagatcaggctacactagcgaatgcgcgccttgatttagctcgctaccaaaaactggcaaagacccatttagtttcacaacaagaattagacaaccaagcggctttagtcaaacagtctgaagccagtattagtatcgataaagcggcaattaataatgcacaattacaattaacctatagcaaaataacggcccctatttcaggacgggtgggattaaagcaggttgatgtcggtaactatatttctggtggctcatctacgccaattgtcgttattaatcagatggatcctgttgatgtactctttacattaccagagcaagatctaccacaggttatcttagcccgtaagaatagtcctacattacctgttagcgcattagacagaaataataaaattgaattagcacaaggggcactatttagtgttgataatcaaattgatgccacaacagggactatcaaattaaaagcacggtttcctcaacaagaaagtacgctatttcccaatcaatttgtcaatattcgtttatatgtcaccacactagaaaaagcggtagtgatccccaatgcagcattacaaatgggaaatgaaggacactttgtttgggtcgttgatgaggaaaacaaagtcagcaaactcgctgttgaggttgcatcacagaatgcagataaagttgtcattgcgtcaggattatccgctaatcaacgtgttgtcaccgatggtgtggatagattaacgcaaggtgccaaagtcgagattgtgacaccgctggcacctaaagctaaaaccactgatcccgttgttgcggagaaagcataa

SEQ ID NO: 299623 - DNA, 3084 bp, Proteus mirabilis
atgaagctgtttgctctctttattcaacgccctgttgctaccaccctacttagcctagccatttctctttgtggtgcgttaggttttatgttgttgcctgtcgcaccactgccacaagttgattatccggtcattaatatttatgcctcattaccgggagcgtcacctgaaacgatggcttcttctgttgccactccccttgaacgctccttagggcgtattgcggggattgatgagatgacgtcaagtagtgctttaggtagtaccagtatcacattagtctttgacttaaataaagatattaataccgcagctagagatgtacaggcggcgttaaatgcctcacaaagcctattaccttcaggtatgccaagtcgcccgcgttattacaaatcaaatccttctgatgcaccgattatgatcttaacgctgacctctgaaacacaaaataccggtgagctttatgatctcgcatcaacacgcttggcacaaaaaatctcgcaaattgaaggagtgagtgaagtttccgtaggaggtggttcactgccggctgtgcgtgttgcactcaatcccgatgcgctatttaatcaaaatgttagtcttgatgatgtacgcaaagccattagtcaatccaatgtaagaagaccacaaggttttattcataatgatgaaaatcgctggcagatacaaacgaacgatgagttaagcacagctcaagattatcgccccattattgtgcattataatcaagatgctatcgtgcgtttaagtgatgttgcccaagtaacagactcagtacaaaacgcgcgcgcggcaggcatgagtggtggtgaaccggctattttactggttattcgtcgtgaagcgggcgccaatatcatcgaaactgtcaaccgcattcgtgatgaactccccgaattacgtgagctactccctgccagtgtcaatttaaaggtagctcaagatagaacccccactattcgtgcctcattagcagaagttgaacgcgcattagcgattgccgtggcactggttattttagtggtattcttatttctacggtcagggcgtgctaccttgatccccgctgttgccgtacccgtttcattaattggtactttttcagccatgtatttatgtggctttagcttaaacaatctatcattaatggcattaacggttgcaaccggatttgtcgtggatgatgcgattgtcgtactcgagaatatctctcgccatatcgaaaatggcttaaaacctaaacaagccgccctaaaaggggttagcgaagttggctttactgtcctttcaatgagtatttcattggtggcggtatttattcctctcttgttaatggatggccttgttggacgactgtttaaagagtttgccattaccttaaccaccgcgattgggatctcattatttgtctccttaacattaaccccgatgatgtgtgcccatttattaaaaggcataaaacccaaagcacagtcacatttacggggatttggtaagttaatttttcggttacaacaaggttacagtgtcacactacaagctgcattacggcataaacgctggatcatggccatttttattaccaccttaggactgaatgcgtatttatatatcagtgcgccgaaagccttctttccagatcaagataccggtcgtttaatggggtttgtacgtgcagaccaaagtatttcattccagtcgatgaaagaaaaaatgacccgttttatgcaggagattaatgcagataaggatgttgatagcgtcacgggatttacggggggaggacgtattaatagcggatttatgtttatttcacttaatccgctgtcagagcgcacagatagtgcaaatcaagtgatcaatcgccttcgtatcaaactggctaatgaacccggagcaacactatttttaatgcctgtacaagatgtacgtgctggaggacgccaagccaatgccagttatcagtttactttactcgctgatgatttaagtgaattacgtaaatgggagccattaatacgtaaagcgttaggtgaattacctgagctggttgatgtcaactcagataaagaagataaaggtgccgaaatggcactgacttatgatcgcgatactatgtcgcaattaggcattaatgtcagtgatgccaataatttattaaataacgcctttggccaacggcagatctctaccatttatgccccgctaaatcagtataaagtggtaatggaagtgtctgaacaatatacgcaagatgtttctgcgctcgataaaatgtatgtgattaatgcacaaggtgaacgtattccattatctgcgtttgccagttggtatccagctaatgcacctttaagtgttaatcaccaagggttatctgccgcttccaccatcgcttttaatgtgccagagggctataccttatctgatgccattaacgccattgagcgaaccatgactgagttaggtgtacccaacacggtacgaggcacctttgccggtacagcgcaaattttccaagaaaccattaagtcacagcttatcttgatcttagcagctattgtcaccgtctatatcgtccttggtgtgctttatgagagctatattcatccattgactattttatccacattgccttctgccggtgttggcgcattattagcattgcgcttgtttgataccccctttagcttaattgctctgattggcattatgttgttaattggtattgtgaagaaaaatgccattattatggtggattttgcgattacggctcaacgagaaggagaactatccgctcaagaagcgattattcaagccagtttattgcgtttccgccctattattatgaccaccttagctgcgctctttggcgctttacctctgatgttaagtagtggtgatggtgcggaattaaggcagccattaggtattaccattgttggtggcttacttatgagccaattattaaccctgtataccactccggttatctatctgttttttgatggcgttcgccagcgttggcaacagcgacgccataacagaaaagaggcaaatgcatga

SEQ ID NO: 299624 - DNA, 1377 bp, Proteus mirabilis
atgaaactaagaagtaagctatttttggtgatcttcgcgacttgcatgatagtggtatttgctatgcatatcggtattcgtagtagcttccaacaggggtttattggctatatcaagaagaatagtgagcagcgggcaaccttgttagctgaagcgttaagcgatcaatatcaattaaccggagattggcgttttctcaatcgagatgatcgctctatttatcagatactacgaaccattgaccaaataagtcaaagtggtgaaggccccgcccctcgaggatggcgcactcagttttggatcgtcgataaacagatgaaacgcttatttggccatgataatcaatttcccgcagaaacctttaaaaaacctattacttatcatgatgaaattgtcggctgggtgattgtcagtgcagcggataaaattagcaacgaagcagatattagctttgataagcaacagttacgaaccagttggatcattgcaggcttaacggtgctttttgcgctattaattacgttaatactgtcacgtagcatgatccgcccagtaaagcgattagtggaggcaacccacaaattagccgcgggtgattttgctgttcgcgtaaccccaaccaataaggatgaaatcagccagttagcaacggattttaatcaacttgccagtacactggaaaaaaatgagcaaattcgccgtgattatatggcagatatctcccatgagttacgtacgccattagctattttaaaaggagagctagaagcgttacaagatggtgtaagaaagccaactgcagaaactttaaattcattactctttgaagtaactaatttaactaaactggtcaacgatctacatcagctgtcattatctgatagaggctctttaacctatcgtaaggattttattgatattaatgaaattattttgttagccgtcgcctcttatcggcatatttatcaagccaaagagattgctttacagactgatttagacgataacgccaaactgattgtgcaagctgatccggataggttgatccaactgtttcataatctattagaaaacagtgtacgttataccaattctggtggccaattgcatattagtagcaaaagagaacataataatgtgttgattgtgtgggaagatagtgccccagggctagataaagcacaatatgaagcggtattccaacgtttttatcgagccgaaagctctcgtaatcgttccagtggtggctctggtttagggcttgcgatttgcgaaaatattgtcgaagctcataatggtaaaatcacggctatgccatccgctatcggtggagtaaaaatgcttatcgtattacccgtctattctgaagataattaa

SEQ ID NO: 299625 - DNA, 309 bp, Proteus mirabilis
atggctttacattatgtcgatcaaacttattattcaggaaataatggttatgtggttggatgggtcgccggttacgattttaacctaataaatcaaaaatttagtatcacaaattggcatgaaatggagtttgatcgtaataaacgttatggcaatggcggaaaaaatggctttaatggagccgtcgctatttggtggcaccccaccacttccattactacaggcattcaataccgctatgcttataaaaagttaggagaaaactttttacaagatggtgtgatctatagcttaaaatacaacttctga

SEQ ID NO: 299626 - DNA, 750 bp, Proteus mirabilis
atgactattcaaaaaaaacgcatgagtattcaattaaaaaatataaattgtttctacggttcgcaccaagcactctatgatattaatctagaatgttctgctggtgaaacaatggttctgttaggaccaagtggtgcgggtaagagctctctaatgcgggttctaaacttattagaaatgcctcgttctggtgaattagacattgctggtctacattttgattttagccagcaaccgaatgcgaaagcaattcgtacattacgccaaaatgttggcatggtttttcagcaatataatttatggccacacttaacggttcttgataatttaattgaagcaccttgtcgtgtattaggcttggcaaaaccgcaagctaaagaaaaagcgatgaaattacttgagcgtttacgtttaagtgattatgcacaacgttttccactgcatttatccggtggacaacagcaacgtgttgccattgcaagagcattaatgatggagcctcaggtactgttatttgatgaaccaacggcagcacttgatccagaaattacggctcaagttgttgatattataaaagagctttctgaaacagggatcacacaagttattgtgacccatgaagttgaaattgcgcgcaaagccgcaagcaaagttgtatatatggaaaacggccgtattatagagcaaggtgataatcatcatttcactgcccctcaaacggaagcttttgctaattacttgtcacactaa

SEQ ID NO: 299627 - DNA, 1662 bp, Proteus mirabilis
atgttgaataaccgggcgagtaaaatcggggccatcctcttggctcttttttttgttcttacctacttatttccattgaacagccggttattatggcaacctgatgaaacacgttatgcggaaattagccgtgaaatggtggtgagcgggaactggattgttccccatatgcttgatatccgctattttgaaaaaccaatagcaggttactggattaataatattagccagttaatatttggtcacaccaattttgccgtacgctttggctcagttatttctatcctattaagtgcgctacttatttatttattagcacggatgatgtggcgtaatcgtcaagtcgcttttgttgctagcttaatttatttatccatgtttttggtgtttagcgtcggaacttatagcgtacttgatccgatgttagcgctttgggttaccgcaagtatggtgtgttgtttttgggcgttgaaagcaaccacggtaaaaacgcgtatattggcatggataacgctaggtttagcttgtggtatggcctttatgaccaaaggctttttggcattagctatccctgttattgtgatgatccctgtcaccctttaccaaaaacagttcacccgaatgttactctatggtgtgcttgctgttttaagtgcggcgttaattagtttgccatgggtcttagcggtggcgaaagctgagcctgattattggcactatttcttttgggttgagcatattcaacgtttttctggtgatgatgctcagcatagttctcctttctggtattacatcccgataattgtactgggtgttattccttggcttggattattaccgggagcattagttagtgcatggaagaagcgtcgtaagcgtcctgaactctttttcttactgtgttggtttgttgttcctttcctattttttagtatcgcgaaaggtaaattacctacttacatgttgccatttatgggaccgttggcgatgttaatggccaaatacggtgtagactgcgctagaaaatttaaaatgaaagcgctacgcattaatggctatataaatatttttattggtgtcgctgctgttgttgcgatattaattattcaattggtttcttctaaaccaatttatatgccttatgaatggtcaaaatgggtattagcgattgtcgctttctcattatggggcattattggttacctttgttctacattaaatggtaaacattggctatgggccgcgtcttgctctttaggggtaagcttatgtattgggcaagcgatccccaatagttctattgatggtaaattaccgcaagagtttattcgccaaaatatcgataccctcaatgcgagcaaatatattgtcagtaacagcgttggtgtgggtgctggattagcttgggaattacaacgtagcgatatctacctttatgagagaacaggggagttaacctatggaattgaatacccagattctcaacatagattactaaaacctgaaaattttgagcaatggttagaaaatgccagaaaagaaggtaatgtctctgtcgtgatcagttataaagatccgaagaaactggcgcagatgccacgacctgaagagttagtgactaatcgtcgtatggctattttgacctatgagaaacgtaagtaa

SEQ ID NO: 299628 - DNA, 2448 bp, Proteus mirabilis
atgaccctactcagtattgtgcttttcttagcgctcatcggtatacttagctaccgaaaatacagccttgtagtaagcagtatcctacttattgcttatactttcgtgatgggtttagccaatatctggagctactggctactagtgcccgttgcattgatattattaccattcaccctcccttctattcgcaaagcatatatctctgccccggcactaaaggctttccaaaaagtgatgccatctatgtctaagacagagcaagaggccattgacgcgggaacaacatggtgggaaggtgaactattccgtggtgcaccagattggaaacaacttcataattatcctaaaccacaacttaccgctgaagaacaagcttttctagatggtccagttgaagaagtttgtcgcatgaccaatgatttccaaatcacacatgagctagctgatttacctcctgagatttggcaatacttaaaagaccatcgtttctttgcgatgattatcaaaaaagagtatggcggattagagttttctgcctatgcacaatctcgtgtactgcaaaagctcgcaggtgtttctggtattctcgccatcactgtgggagtgcctaattcattaggtccaggtgagttattgcaacattatggtactgatgagcagaaaaaacgttacttacccggtttagccaaaggtgatgaaattccatgctttgcattaaccagccctgaagcaggctctgatgctggcgctatccctgatagtggtgtggtttgtatgggggaatggcaaggtgagcaagtccttggtattcgtctcacatggaataaacgctatattactttagcacctatagccacagtattagggctcgcttttaaacttcgcgatccagaccacctactgagtgatgatgaaaaccccggtattacttgtgctttaattccaaccgacgtaaaaggggtagaaattggtcatcgccatttcccactcaatgtcccttttatgaatggtcccactcgtggtaaagatgttttcgttcctatcgattttattatcggtggtccaaaaatggcaggccaaggttggagaatgctggtggaatgtctttcagtcggtcgtggtatcacactgccatctaactccacgggaggcttaaaaagtgcagcaatggcaacaggtgcttactctcgaattcgtcgtcaatttaagcttcctatcggtaaaatggaaggaattgaagagccattagcgcgccttgcgggtaatgcttatctcttggacgcggcttcaaccttaattaccacaggtattatgttaggagaaaagcctgccgtactttctgctatcgtaaaatatcattgtacccatagagcgcaacgcgggattattgatgcaatggatattgttggtggaaaaggaatttgtcttggtccttccaactttgtggctcgctcttatcaaggctcccccatcgccattacggtggaaggcgctaatattctcactcgtagcatgatcatttatggacaaggggctattcgttgccatccttatgttttagatgaaattgcagcggctagagataataacttacacgactttgatcatgccttatttggtcatttaggtcatgttgctagtaatacattacgcagcctttggttaggtataacgaatggtcgtttaagtaccgcgccaacaaaagatgaaactcgtcgttattaccaacaaattaaccgactcagtgccaacatggcgttactttctgatgttgccatgggggtcttaggtggtagtttaaaacgtcgtgaacgtatctctgcaagacttggcgatattttaagccatattttcctcgcctctgcggtactaaaacgttatgaggatgaaggtcgtaacagcgctgatttaccactggtacactggagtattaaagagtgtttataccaagcagaaaatgccattgatgagctattacgcaattttccaaatcgttttattgcaggaaccctgcgcgccattattttccctctgggtaaagtgcagaaactcccttcagataagttagatagtaaagtggctcaaattatccaacaaccctctgaaacgcgtgatcgtattggtaaagggcaattcctcacaccaagtgagcacaatcctcatggtttaatggaagaagctctgctcgatattttagccgcagagccactgtttgaacgtatctgtcgactctatgaaaagaaatttagcttcactcaattagataaattagcggataaagccttagccgataaacgagtgactcccgaagaagcagatatcttacgcaaagcggagcaaagccgtttacgtagtattaatgtggatgaatttgactttgatgcattggcggtacctgcaaaaaagtcgccaactgacacaataaaaacagataaagcagcctaa

SEQ ID NO: 299629 - DNA, 579 bp, Proteus mirabilis
atgtaccaagatcttattcgtggtgaattaactgaagcggcagatacactctctcgttttttacaagatgatgcgaatattgaagctattcaaaaagcagctgtattattagcagactcatttaaagcaggtggcaaagttttatcctgtggtaatggggggtcacactgtgatgccatgcattttgcagaagaattaacggggcgctatcgtgaaaatagacccggttatcctgctatcgcaatttctgatgtgagtcatatttcttgtgttagtaacgattttggttatgaatatgttttttcacgttatgtcgaagcggtaggtaaagagggtgacgtattactggggatctcaacttccggtaattcaggcaatattattaaagccattagcgccgctcgtgaaaaaggtatgaaagttatcacactaacaggtaaagatggcggaaaaatggcggggagtgcagatattgaaattcgtgtccctcattttggttatgccgatcgtattcaagaaatccatatcaaagttattcatattctgatccagctgattgaaaaagaaatggaaaaataa

SEQ ID NO: 299630 - DNA, 342 bp, Proteus mirabilis
atgccaacgtatactcgacgcgtactcaaacagaccaaattagcaccatttgagccgtacctaatccaacgcattcaactggctaaacccggctggatccctgcaactgttttgtttgatgaattttgtcaaagaggctatcaaggcgggattgcgcaattgcgtcgtttcgtttgccagtttaaacccattattgcacctaagccgattgtgcggtttgaaacgcctcccggtcagcagatgcagattgatttcaccactattcggtcgaagtcaacagatgctaaaagcgttcgtggcgacactgagctattcccgagcttgttacgtcaagttctttga

SEQ ID NO: 299631 - DNA, 321 bp, Proteus mirabilis
atgctaaaagcgttcgtggcgacactgagctattcccgagcttgttacgtcaagttctttgataatgaacgagccagcgcttggcaacagggtttaaaagaagcgttcgattattttggcggcgtgcctcaacacgtactttgtgataacgcaaaagccctcattgtcaagcgagatgcctatgctgaaggtgaacataaactacatgttgaaatgcttcagatgtcaaaagattatagttttaagttgaccgcttgtcagccttatcgggccaaaacgaaaggcaaagtagagcgttttaaccatcacctaaaaaaatag

SEQ ID NO: 299632 - DNA, 444 bp, Proteus mirabilis
ttggcagagcagtctattgcccagaacaaaagctatggcgaatttttactcgcattattggacaatgaacaaaaacaacgcgatgaacgtacgcgcagtatgctgagtcagatggagggatttccagcccataaggcgctgagtgtatttgattttaaatttgccacgggcattccgaaacagcaaatacaagaattaagtgcactgacatttattgaacagaatgaaaatgccgtgttgttagggtcgagtggagtgggtaaaacacatcttgcgattggtttaagtctgaaagccgttgaagccaagaaaaaaacacgttttacgacagccgcaggcctgatgttacagcttttaactgcgaaacagcaaaacaaacttgtattctgctgcatctatattcttacgcaatttatcagcggctttccacaggataacttctaa

SEQ ID NO: 299633 - DNA, 348 bp, Proteus mirabilis
atgaagatgaaccgtgaacatactgttccgctatctgacgctgctttagctattctagggctaatgaaaccactcagtagtcatcgtgagtttatctttcctagccgtatcaagcatactcaacctatgaacagccaaaccgtcaatgctgcattaaaacgcgctggattcggcggtgtactggtctcacacggtctacgctcaattgctagtaccgcactcaatgagcaaggcttccctcctgatgttatcgaagccgccctaacccacgttgataaaaatgaggttcagcgtgcatacaaccgtagtgactacctaaagcaaagacgccccatgatgcaatggtag

SEQ ID NO: 299634 - DNA, 891 bp, Proteus mirabilis
atggaacagaacgattacgatagaaatgcacttaagcaaattcacgactggaaaaatccacagtgtggtttttttgataaatcatttgaattaataagtaaacctctaaacagcgctggagagttgattctttcagcgcctgtcataggtgaagtcattcaatcctctgtgcaggggctggtgggtgtctgtagcgatgcagcgctgtggtcagtgcgatccgaggcgattttcgaggagttccgtaacgatgggtatacccacattaatcactacgaagatattgaaacgttacgtcttgaggatatcgataaaaccgttggctggctgtcagccaaatataagggcatcgcgctggcggaaggtgcaggtacgggcatgatagggattgcagggatggccattgatatacctacactcattacattgaatctgcgagcaatcggagaatatgcgacgtattacggttttgatattaatcgtcaggaagagcggctttttgcttttaacatattggggctatcttctgcttcatcaactatagcgaaaaacgttgccatggcgcaactggtaaaaatatcgcaacaggttgccaagaaagtagtctgggaagagttagaaaaacaagtgtttgtgaaaattattaagcagattgccaatagcttagggattcgtcttaccaaagcaaagctagcccaaacggttcctgtagcaggcgcggctgttggtggcggttataacgcctattttaccagtaatgtctgcgaagctgcctactacctgtatcgtgagcgcttccttgcaataaagtatgatccatctgtgattgatatcacggtaaaacctgcggatggttttttcccttgtgacggcgatccggttttcgaatga

SEQ ID NO: 299635 - DNA, 693 bp, Proteus mirabilis
atgaaaaaagtattacttagccttactatgctggctataatatcaacaccagtgttggctaaatctcctgtagctaacttaaaaatcaatggtgatattaagccaccaacttgtactattaatggagcgacacaaagtgatgttatctttgattacggagtcataagcccaacacttatccctcaatcaaaaaactacttgtacccttctactgccgtgcaaaataccgttacaattgaatgcgatgcaaaaacatatttaacctttgttgcatctgatacttatgatagtgcagaactagctaataatacgtcagcacagtttcatttagttgataaagcaaacactgaaaatgcgattggtgcagcgttgtttatatggaataatgttactgtcgatgataagcctgcgtatctttcacgagcaaatgatgttgctatcacaggggaaaattttaataacgtcctatacaaaggaccaactaatggttggacatcagaacaacaaacagatgttaataaaaattctctagcgctaatttcaggtaatattttccaagcaacgttcaaacaaggaaataaaagtcgtacttttattttatccaaagactcattaagtaaaaaagggatagatttatctgatggtttagattttatgggtgaagccgtcctcacttttaactttggtgtctaa

SEQ ID NO: 299636 - DNA, 1761 bp, Proteus mirabilis
atgcaattattgattgatgaattaggcaaaaatatgcaagaaaaaccattctcccttacatcacatcatactgacaaacaacatcgtttattaaaatggggcttactcagcttatattttatctctgttcccttgttggctgatcccgtcaaccaagcactctctatcgatgcacgcgagcaacaacgccagcaagaacgtgagcgcatgttacaacagcaaaacaatcccgttgtggatacgcgtattcaacaacctgatttaaccctgcccgattatccgcaaaatgagcaaccctgctttaccatcacatccattcgtcttgatggtgagtccgccgctgattttcaatgggcgttaaagaccgttaacgacgccaaaggccaatgcttgggtagccaagggattttgttggttctcaataaagtccaaaatgccattttagaaaaagggtatgtcaccacccgcgtgatggcacaagagcaagatttaaatcaaggtgaattagtgctcacgctccagccggggcggattaatgccattcgttttgataaaggtacctcatggcgtgggcgcttgtggaatgccgttcctgcttcctcaggcgatattctgaatctgcgtgatattgagcaagggctggaaaactttaaacgtgtacccaatgtcactgccgatattcgtatcgaacccggcccagttgatggcaccagtgacttagtcgtcagttggcaagaaaagcgtccagtgcgattaagcctgagtttggatgacagtggctcgaaaagtactgggcgttatttaggctctgcaacactagccattgatgcgccgtttgcccaaaacgatatgttttacgccaatatcagcaaagacttgtttgataaaggccctttcggtaaccgctcttacaccctgaactactttatccccgttggcaattggggctttgccgccaattataatgaatataattatcaccaaaatattcccaatgctaacgaagtactgcgttatagcggtaagagcgataccgcacaatttaccgtgtcacggttactgtttcgcgaccaaacccacaaaaccacccttaatctgcgtagttaccgaaaaaccgccagtaatgcagtcaatgatattgatattgaacaacagcgccgccgtaccgcgggatgggaaattggtgttaaccagcgcagtttcttaggcaacgcgacactcgatgctaatgttaactggcgtcgcggaactggcgcctatggtgcacgccgtgcaccagaagaagacactcacagtggcagtgctcgcgtgggaatttttcttggcgacatcaatttcaatcagccatttacattaggtgaacaaccttggcgctggaataccactttacggggtcaatggactcaacacgccttaacaccacaagaacgcatgtctattggcggacgctataccgtccgtggttttgacggtgagcaaatactgtcgggtgaaaaaggcctgttatggcgcaacgaactggcatggaatgttttttctcaaggacaagaactgtatttagccgctgattacggacgtgttgaaggccaaagtacccaataccttgtgggacatcaacttgccggtaccgcattaggacttcgagggttaattttctctcgtttaagctatgacctgtttgtcggcatgccattgtataagccgaaaaaattcgatacgtcaggagcgacggctggttttagcctcaaccttgaaatttaa

SEQ ID NO: 299637 - DNA, 528 bp, Proteus mirabilis
atgtcgatagcaaactcaggttgcgcggtttggctctccatcggggtagctttgttgttagtatcgaccttatttttacctgcaacgatcgctattttttctttcgcccacacgccagaattgatttcaacggcgcgagcgagtaggtcaacgtattgcgtatcgtggcgactatcggcatttagtcctccaccttccactcgaataaccccgcgttctactcgatatcctgcaaggctaccgtcttggttaaattgcggtttccctgtggtaagggtcatacgacctgcattaatagtgccacaaccattacagatgatccctgaagggttagcgacaattacttgcgccttaccgcccgcaacttccagaaagcctttaatttggcttgggttattactgttgacttcattcagaataacgcgtgcaggggctttgtttgggtcaaggtttgggttaccttggatcatccctgcagtttgtgtcgaggtcatgactgcggaattattgaggatagcccctcgttga

SEQ ID NO: 299638 - DNA, 591 bp, Proteus mirabilis
ttgctggtttcattaaaccctactgccgtcaacgttcagaccattattttagggaatattctcggcattgctgatgaagatgtctggcaagtcgttatcattactggtgtctcttttcttattctattttgtatgtggaaagatttattagtggtattttttgatgaagtacatgctcgctctattggtttatcccctttaaaactaaaaatcatcttctttaccttgctcagtgcatgtacagttgccgcgttgcaaacggtcggcgctatcttagttattgccatggtggttacgcctggcgctaccgcttatttactcacagaccaatttaaacgactcgctattatcgctatttgtattggtacagtaaccagtgcggtgggtgcttatctaagttatttctttaatggtgctacagggggagttatcgtcacaatgcaaaccgcccttttcttattagccttcttatttgcacctaaacatggcatgttggcagcccgtcgccgtgcacgtcaaagctcccaagcacttatttcacaatcccagcatccaaaagacgttactcaacaagaagaggtgcaactatga

SEQ ID NO: 299639 - DNA, 873 bp, Proteus mirabilis
atgtggcagaatattggtcgtttgcttgaatcaaatttaggattttcagcaaagatcagcgaaaaacaccatctttcaagtggtgatatacaccacacttggaaaattcaatatggtgagatccctgtctttgtaaaatctaacctacgggaatttttgcctacctttaaaaatgaagcagaacagcttgaaatgttggcaaaaagccaaacgatccgtattcctcgcgtattaggcattggaaatagtaaagatgctagcttcttactgttagaatttcttcctgtgcaaccttttacacctcacagtgcgtattgtttcggtcaacagttagctaagttacatcaatgggaagaacaaccccgttatggttttgatttcgatacccatatagacaccactcctcaagcaaatggctgggagaaacgctggaattacttctattcggaaaaacgtatcggtattcagttacaactcgcttcagagaaagggatggtttttggtgatatagaagaaatcattcaaatcattaatcatcgtttagccgatcatcatccgcaaccctcgctattacatggcaacttatggcctaaaaattgtgccgcgataggtcaatctgaaggaactatgttcgatcctgcttgttattggggtgatcgggaatgtgatattgccatgttaccactatgctcttctgtgccagcgaatatttttgatggctaccaaagcatctggcctttatctgaaaaattcctatcacgccagcctatctaccagctctactatttccttaatcgttgccatttattcggtgacgaaaaagattacctcgcagccagaaaaatcattgatgatttgctcggtacacactaa

SEQ ID NO: 299640 - DNA, 567 bp, Proteus mirabilis
atgacagccgaaggacatttacttttttctgttgcaacactcgttctcgcacagaaattagaaataacccccgttcttgctcaaggtgattggtttcacatgatccctgctgtcttattaggttcgctgctaccagatttagatcatccaggttctatattaggacgcctctttcggataatctcattacctctatcaaaactctgtggtcatcgtggcttcacacatagtctactggccttttgtggtttagccattttatgggaaacacaagttgcgccttatatcgccatttcggctgatttttttcacgcccttttgctaggttacttaagtcacttactagcagatatgctaacaccatcaggtgtaccttttttatggccactaaaaatgcgttttgccttacctattttagcgaaaaaaaatagtaaaaaaggagaacgatttatttctgtcatcatcttagttggtgcgctatttctgcccccgcacctaactctttctcttccctcacaaataaatcactggttacaaatgtaccacgataaacgtacacctttttaa

SEQ ID NO: 299641 - DNA, 1074 bp, Proteus mirabilis
atgagtgagttgaaaaacgaccgctatttacgtgcgctgttgcgccaacctgttgatgtcacccctgtttggatgatgcgtcaggcaggcagataccttcctgaatacaaggaaacacgagcacaggcgggagacttcatctcattgtgcaaaaatacggaattggcttgcgaagttacattacagcctttaagacgttttcctttagatgccgctatcctattttctgatattttaactatccctgatgcgatgggattaggtctgtattttgaaacaggggaaggtcctcgttttaaaacaccgataaatagccttgatgatataaaaaaattacctattcccgatccggaagatgaactaggttatgtaatgaatgcggtacgtgctattcgtcatgcattgcaaggtaatgtgccattaattggtttttcaggtagtccatggacactagccacctatatgattgaaggtggaagtagtaaggcattcacaaaaattaaaaaaatgatgtatagcgagccacaagctctgcatctattactggataaactggcggatagcgttatcctttacttgaatgctcagattaaagcaggtgcacaatccatcatgatcttcgatacatggggaggcgtgctaacaggacgcgattatcaattgttctcattacaatacatgcataagattgttgatggccttattcgtgaaaatgagggcagaaaagttccggtcaccttatttactaaaggtggtgggcgttggttagaagcgatggcagccacaggttgtgatgcattaggacttgattggacgattgatatcgaagatgctcgccgtcgagtcggtgataaggttgccttacaaggtaatatggatccttctatgttatatgcgccaccagcaagaatagaacaagaagtcgctacgattttagctggctttggtaaaggtactggtcacgtctttaatcttgggcacggtattcatcaagatgttccaccagcccatgctggggcatttattgatgcggttcaccgtctatcgaagccttatcatcaggataatgattaa

SEQ ID NO: 299642 - DNA, 681 bp, Proteus mirabilis
atgacaaacataacgaaacataagatcgctatttttgatttagatgaaacactgttagccggagattctagctgtttatggacaaactacttgtgggagaaaaagagagtcacagatcccgcttttttagctttagataaacaaatgatcgctgactattacgcagaaaagctcaatataaatcagtacttacaccaacatttgtcttattttaatcagcatgatattgaagaaataaatcaatgggttactgattttactcataccataatcaagccattactttatccccaaggcattaataccataaacctttaccgacaacaaaatatccccgttatcattatctctgcaaccatgtcctttctggtacatgcgattgcaaaacaacttaatgccgatatttctatgggcattgatatgcagataaaaaataatcattatacaggctatattgatggtgtccctacttttagagaaggtaaagtcacccgactcaatcagtggaaagaacaaaataacattaacaattattatgtttatttctatactgactcagccaacgatctccctttatgttatcaagcaaatgaagttatcaccattaacgctgatgaaaaattaagccaaatagcaacagaaaaagaatggcaacagtgctactggcaattaaataaataa

SEQ ID NO: 299643 - DNA, 1953 bp, Proteus mirabilis
atgtccaaaaatcaaactatctctattaaagatgtttcgcccacagcgaataaacagcgtccacgtaaagaacaacgagatgcagcgcaatcctttattagcactattcaaggtgttaattttcccaattcaaaacgtatttatatcactggtactcgttcagatattcaagtgccaatgcgtgagatccaacttgataaaaccctgatcggtggctcaaaagaagatcctgtttttgaagagaatgaacctattccagtctatgacacttcagggccttatggtgatccaacttctcaacttgacgttaatcttggcttaaaaaaaattcgccaaccatggattgatgagcgtaacgatactgaacccctttcacacttaagttctgattttactcaacaacgccttactgatgctggattagaacatctacgctttccgttaaaacctagccctagaaaagcgctaaataataagagagtgacgcaattacattacgctcgcaaaggtattattacgccagaaatggaatttattgctattcgcgaaaatatggggcgagaacggattcgtagcgaagtgttacgccaacaacatgccggatttagctttggtgcacatttacctgacaatattacgcctgagtttgtacgccaagaagttgctgctggtcgtgccattattcctgccaatatcaatcacccagaatctgagccgatgattattggccgtaatttcttagttaaggtgaatgctaatatcggcaactcttcggtcacctcatctatcgaagaagaagtagaaaaactgatttggtcaacacgttggggggcagatacagtgatggatctgtcaactggacgttatatccacgaaacacgtgaatggatcatccgtaatagtccagtacctattggtactgtccctatttatcaagctctcgaaaaagttaacggtattgctgaagatctcacttgggaaatgttccgtgatactttattagaacaagcggaacaaggggtggattatttcactatccatgcaggtgtcctattacgctatgttcctatgactgcaaaacgtctaacgggtattgtctctcgtggtgggtcaattatggcgaagtggtgtttatcacaccataaagagaatttcctctatacccacttccgggagatttgcgagatctgcaccgcttatgatgtttcattatcattaggtgatggtctaagacctggctctatccaagatgctaacgatgaagcacaatttgctgaattacatacgttgggtgaattaacaaagattgcttgggaatatgatgtacaagtcatgattgaaggtccaggtcatgtaccaatgcagatgatacgtcgcaatatgacggaagaactagagcattgtcatgaagcccccttctatacattaggccctctaacaactgatattgcaccgggctacgatcattttacttccggtattggcgctgcaatgattggctggtttggctgtgccatgctctgttatgtcactccgaaagagcatctcggactccccaataaagaagatgtgaaacaaggtcttattacttataaaatcgccgcccatgccgctgatctcgccaaaggacatcctggtgctcagatccgtgataatgccatgtctaaagcccgttttgagtttcgatgggaagatcaatttaatctagcacttgatcctgaaactgcccgtcaatatcacgatgaaaccttacctcaagcatcggggaaagtcgctcacttctgctctatgtgtggacctaaattctgctcaatgaagataacgcaagaagtgcgtgattatgcggcaggtatggagcaaatgtcgcaagcctttaaagcccatggtagcgaactataccatagtgcagaaatagccagttccgaggtagctgataatgaacagatcctctaa

SEQ ID NO: 299644 - DNA, 624 bp, Proteus mirabilis
atgagctatacattacctgcactcccttatgcttatgatgcgctagaacctcattttgatgagcgcacaatggaaattcaccatactaagcatcatcaaacttatgtgaacaataccaatactgcgttagaaaaactgcctgaattagcgggtttagaaattgatgaactcgttaaaaatttacacaaagtacctgctgatcaacgtacctttgttcgtaacaatgcgggtggtcattctaaccatacattcttctggaaaggattaaagctaggcactcaattacatggttcattaaaagatgccattgaacgtgatttcggtagtgttgatgcatttaaagagttgtttgaaaaagccgctgctagccgttttggttcaggttgggcatggttagtattaaaagatgatggaaaattagctgttgtgtctaccgcaaaccaagatagcccattaatgggtgaagagttagcaggtgcatctggctatccaattattggcttagatgtatgggaacatgcgtattatttgaaatatcaaaaccgtcgtcctgattatatcaaagccttctggtcggtagttaactgggatgaggcacaaaaacgctatcagagcaaagcataa

SEQ ID NO: 299645 - DNA, 1632 bp, Proteus mirabilis
atggttaactttttattctatatggaaaaaggtgataatgataaaagcatgtctcaagtaataaacttttctcttttatttattttatctatagtacctgcactattagcgggttcaaccctgcatattgaacaaaagttctctatggtgattatcggttggctccttatgttgctctgcgctggtatctatcggtttactataggaaaagtgataacttttattgttgctgctttatggtctttaaacctctccatctcgctgtttttttatcgtgaacatgatattcccttttcatcatcaatagcagaaactttcattaatactaatggaagcgaaactgttggtatgctctcttataataaatattatgtactcttttatattgttatatttacctgttttttctatttaatacatattagcgcccgttatttaaataataaaactaataaaaggtgtttaattgctatatttacattaataattcttatttctctatacaagaacttatcaataagatcagagagtaaaactcaattacttgctgaatattatctacttaatacccctttttacaatgcagcagctttagtgcggactttccacgaaaatagacaaatcaaaaaaattacatcagaaaaagttaattttaactatgataaagtggatcaaaaaacagaaatttatattcttttgattggtgaatcagtacgacgcgatcatttaggaatttatggatatccgtacgatacaaccccgactttagagaaagaaaaaaataatattttattatttaagcaagcttattctccagcgcctgtgaccatattatcagtccccatatccctttctaatatcaacctcactgagttatatgataaaaaacactacgctgataatatcatttctcttgccaatcatgctggtttcaaaacatattggttaagtaaccaaggtaaaggaaatccaaaaacgagtgtgatttctgttattgccaatatggcccaacataaaaaatggaatgaatttattggctatgatgaagaattattgccatttttagataatgcgcttaatgataattcatcaaataaaaagctcattgtcctacatacttatggtagccatgagccagcctgtaatcgttttcctagcacttaccttaaaacctttacccaacaagaagatgataactgctacgatagctctatcgcttatactgacaagcttatcagccaaattattgagaaaatacaagataagcccgcatctatactctatttttcagatcacgcattacaacgattagataaaaatagagaagtacgttatcaccatggcgtgaacagtcctcgccaagaagcttataatataccgctctttatttggtatagcacatccgcaacgcgaccgaatatcaataaagaaaatttaaataaacctttttccaccgcagataattattggctattaagccaatggctaggtattgaacataactcagcaaaaaaatgttactcacctttaagcgaatgctatcaaacaaaaacctcaatgatggtcatcgatggtaataagaagttattaaactacgcactattagaatcagaagagcaagcgcctcaataa

SEQ ID NO: 299646 - DNA, 393 bp, Proteus mirabilis
atgaataaagaatattctgccaaatgggaagagcgttttgatttcttcgaaaaatatggttctcctaaatctccagaatacaaggctgcatataaagctcttactttcggtaaacgtattctaattgggatgaatatctgggctttcttttttggctttatctattttcttatccttggtttatggcgtaaagcgttaaccttattcgggattaatgttgctattatcattgtggtaagttttatcgtggaaggactttctctaagcccttcaattctcaatgtagtcagtattgtgctcaatttcttatgggcggcgacagctaattatgcttactacttaaaagaaaagaaaaatgatcaaggttggaacccgttcaccggtgtattctaa

SEQ ID NO: 299647 - DNA, 549 bp, Proteus mirabilis
atgtctgaacactttcaaggtaaattcgaagcagaattgaaataccacttaaaacaacctgaagattttattgctgcattacagctcgctggagcaactttatttatcccgaaaaatgatgaaacagattggtatttagaacacccaaatacacctttccctgctcccgctataagtttatgcgtaagaaaaatgatcccctcagggatcaatttattaattgtaaaaggcccagaccaagcccagtgtgaagctgtaaaaatagaagatgcagaaaaaactgttgcgatgtttaagacattaggttatcactgtattttaaactatacaaaatcccgtcaaatctactttctagaacaatttcatattactatcgataaattagacaatcttggctactttgctgaatttgctattatgactgatgatgagagtaaacttgctgactataaattacagttacataacttagcatatcgatttggctttaatgatagtgaacaagaacatcataactataaaacaatgcttctaaataaattagcttaa

SEQ ID NO: 299648 - DNA, 993 bp, Proteus mirabilis
gtggaggatgtcaagagtcttaaacaaaatgattttacgaataaaaaaattatcgtaggtattagttcatgcttattaggggataaagtgaggtttgatggtgggcataaatgttgtcatcttgctgttgatgaattatctgagtactttgaatatcaatctacttgccctgaaatggctattggtttaccgacaccaagaccagcattacgattagttcaatctaagacaggcgaagtcaggttaaaatttagtaatggaagtgaaggtgacttaactgaacagatgaaagattactctatcgaatatttgaggaggtttaatcaatttagcggttatatcgtctgtgcgaaatcgcccagttgtggattagaacgtgttcgtgtttatgatccaataggcaatggtaataaaaaatcgggtacaggtatttttactgaaaatctgaaaagaataatgccgtggttacctatagaagaagatgggcggttaaacgatccctatattagagaaaattttattacacgggtgtttgcgcttaatgagttaaatcaattgaaaataaatacctttactcgtcaggcattaattgattttcatacaagatacaaactattattattagcacactcacaaccactttatcggcaactagggcgctttgttgctaacaataaagattgggattcattagagactttctttgttgaataccgtaatcgatttatggcactattacaacatcaagccactcgtcgtaatcacactaatgttcttatgcatgtgcagggatattttaagcaagatttaacttctaagcagcgacaagcattaagccaattgattttagaatatcgccaaggaatacaacctttattggcaccattaacattaattaatcattacttatcagaatacccagataattatctgagcaaacaaaaatatttttatccttatcctcaatctttaagattgcgttatggtttgtaa

SEQ ID NO: 299649 - DNA, 882 bp, Proteus mirabilis
gtggcaggcttagaacaatttattggtaatacaccattggtcaaattacaacgactttcacaaggattagatgcagaaatatgggttaagcttgaaggcaataatccggcgggttccgtgaaagacagagccgcgttatcgatgattgagcaagctgaattacgcggtgaaattaaacctggcgatacattaattgaggcaaccagtggtaatacaggaattgctttagcgatgatagcggcagtaaaaggttatcgactaaaattattaatgccggaaaatatgagtaaagagcgtcaagcatccatgcaagcgtatggtgccgagcttattttagttagccgtgaaattggtatggaaggggcgagagatttagcacaagaaatggagcgtaaaggcgaagggaaggtgttagatcagtttaataaccccgataaccctcgagcgcattttacctcaacgggccctgaaatttggcaacagactcaaggacgtattacccattttgtttctagcatgggaacaacaggtacaataactggggtggggagttacttaaaaacgcaatccgacagagtaaaaattgtcggtttacaaccggaagaaaaaagtcaaattccgggtattcgtcgttggtctccagcttatttacccggtatttttcgaaaagatttggttgatagtgttatagatatgtcccaaacagaagctgaacaaaccatgcgtttattggcgagtaaagaaggtatattctgtggtgtgagttctgggggagcggtggcaggggcaatacgcgttgctaaagagaacccaggagctgtgattgtggctattgtttgtgatagaggcgatcgctatttatcaactggggtatttggttga

SEQ ID NO: 299650 - DNA, 624 bp, Proteus mirabilis
atgttaacaacattttttcaggggtttttattaagtgcagcaatgatattgcccattggtgcgcaaaatgcctttattttgcaacaaggcagcaaaaaacaataccatttaatgagtgcatctttatgcgctttaagtgacgtgatattaattagcggaggagtatttggtggaagtgcattactgagccaatcagaatatcttttattactgatcacttggggcggcgtggcttttttattgtggtatggctggaatgcatttaaaaccgcttttactaaagaaatagcattatcacaacatgaaaatcaagtaaaaagccgttggcgagtgattgtgactttagttgccgtcacttggctaaatccccatgtttatcttgatacctttgtggtacttggcagtatcggagggcaattaacggcagaattacgtccttggtttacctttggggcactatttgcatcgataagttggttttttgctttatcactactagcggcttggttttcacctattttaagtcaagtaaccgctcaacgtatcatcaacttatttgtggggtgtgtgatgtggtttattgctctgcaattggccgctcagggatggaaaaacctcttttaa

SEQ ID NO: 299651 - DNA, 270 bp, Proteus mirabilis
atgttaagtgtaattaaagtgttgttttgtgtattttttgactattttatctttaattttaatagtagtgatgacgaggaattatttattccgtttggttatcatagtcgtcgagtatttattggttgtttattttttattattattaattttattgttatttatcaatcaactacaattttattgttatattatatattgatatataatcgaattacatccttaatgatattaaggaataaattattttacaaaactaaaaaaatttaa

SEQ ID NO: 299652 - DNA, 1461 bp, Proteus mirabilis
atgtcaaaaagcggttcaaataataatacaaatcagaaattaggactgcttgcattggttgcaattgtaattagctcaatgataggtagtggtgttgatggattaccacaaaatatggcagcaacatctgaaattggtcctgttattattgcttggctaatttgtggttttggcatgtattttattgctcgaatttttatggtgctgtcagatattcgacccgatctgcaatcgggtatttatatgtatgcccgtgaaggttttggagcatttgttgcttttattgttgcttggggttattggttaatgaccatttttagcaatgtagcttttgcgattatggtgatggataccttaaattatttcttacccggagattttaaaggtggcaacaatattccttctattattggtgcttctatccttatttggggattcaattatcttgttttatcgggtaccaaattagcaggtgcgattaatattattggtacttttgctaagttaataccgttaagtatttttgtgtttattttagtctattttttaaattatgaagagctgactaataacttttggggaaattccgccacaatcccagcagataatctaggtcccatacctacacaaatattagcacctttagatattgccctatggtgttttatcggtgtggaaggtgccgttgccttatcaggtcgagcacgtaataagaaggatgttggtaaagcaacattaatagggtttattgtctcattgattatttgtatttttatctccgtattaccctttggcgtattaccgcagaaagcactaagtacaatacctacaccatcaacagcaggaatattgaaaacggtcgtcggagattggggagaatggttaatcaatattggtgtattagtttcggtattaaccagttggcttgcttggacgatgatttgtgctgagatacctatggctgccgctcagaatggtacatttccaaaagcgttttcagtgaaaaataaaaatggtgcggcgtctacgtctctttgggttagtagcctctttatgcaattggtggtctttgtcgtttatttttccaataatgcttggttaacaatgttggctatttctgcattaatggttttgcccgcttatttgactagctcggcttatttattacaactttgtttatcggataatttttctaaatacgctaataaaggaaaaacttcagctttaattagtggacttatagggttaactttttgtttatttatgttttatgcttgtgaaattaaatatttatctatggtacctattttactgacattaggtattcctctatttatttggtcgagataccaagaggggcaaaaattatttagtcctatagaacgtatattgtttgtttttattatcatgctggatatattaacagtttttttatatctaaacgattatattaaattttag

SEQ ID NO: 299653 - DNA, 672 bp, Proteus mirabilis
gtgaaatttaatcatcatgtattatttgtctcttctgtggggttaaaagaagacaaccccgcaaaacaggcattaaattcattgaaacaagcaatcatagagcgtggttttattgctcagattgcagataatattgaccacggtattaaatatataaaagagagtcctaagtatagtgcagtaggtattttttgggataaaaataattccaaaatgaatatagagggtgaagcctttatctcattatttagaaaaagaaatccgagcacacctatacttctcctttctgaagagaatattaccgataatgtttccatcaatattctcagagaggtaagtgaatatatttatctttattcagaaacagcaacatttacagctaatcgtatttatacgttaatccatcgttatgcagaaagccttttaccaccttattttaaaacattaaaagattttactgaagatggtgattattattgggattgccctgggcatatgggcggtatggcttatttgaaacaccctatcggtatcgagttcattaatttctttggtgaaaatatgatgcgggctgatatcggtgtcgcgactgctgaaatgggggattaccttatacatgcgggacccttcaaaaacatccgaagaaatggccgcagagttatttggtgctga

SEQ ID NO: 299654 - DNA, 1758 bp, Proteus mirabilis
atgcgggacccttcaaaaacatccgaagaaatggccgcagagttatttggtgctgactggacattttatggcgtatcaggctcatcaggttctaatcgtattgtggcgcaaggcgccatagccgctaatgaaattgttgttgtagatagaaattgccataaatcactgaatcatgggttgaccctttcacaaggccgccctgtgtatttaaaaccgacacgtaatggttacggcttaattggccctattccaactagacgactaacacaagcaagcatccgcaatctgatccaagaaagtccgttaacagaagacgctgttagctcggaaccgacttatgcggtagtcactaactgtacttatgatggcttttgctacaacgttaacgatgttgtgaaaaatttagccaaaagtgtacctcgaattcattttgatgaggcatggtatgcttatgcgcgctttcaccccctctataaaaatcgttttgcgatggatgtgtctgaggatataccggatcgtcctacgctttttgctgtgcaatcaacgcataaaatgttgccatcactctctatggcatcaatgatccacgtgaaaaaaagcgcacgtgctcctttaaattttgatgactttaatgatgcttttatgatgcatggtactacgtcaccttattatcccattattgcttctattgatgttgcggtaggaatgatgaaaggagaatcgggtcgatctctagttcaggagtctatagaggaagcaattgcatttcgtaaagcagtggtagcagtaaaacgtcaattaaaagagcaaaatggtgactctgattggttctttgatgtactacaaccaacccaagtgtgtgatcctaacacgaaagaaaattacagttttgagcaagctccattatctttattaagccaagagtctgaatgttggacattaaaagtcggagataaatggcatggtttttctgatgaagatattgctgacactgacagtatgttagatcccgttaaagtgacgataacttgccctggcattaccgcagatgggcagtatcaaaaaatggggattcccggttatatcatgactaaattcttggatgatcgtcgtattgaaatcgccagaaccggagactatacccttttaatcctcttctccgttggggtgactaaaggtaaatgggggacgttattagaaagtttactgacttttaaaaagctttatgattcggatgcgttagcggtagatgctattccttcactaaaagaaatctcccctcaatatgccaaaataacattaaaacagctttgccaatctatgcatgaaaagatggatgagcttgatttaatgaaacatattaatgatgccgtaaatagcgttcctgaacccgttatgtcaccggctgatgcttatcaaaaggttgttcgttataaaacagaacacgtacatttagatgatttttcaggtcgtatttctgccagcatgttagttccttatccaccgggaattccagttctgatgccaggtgaacgcttacctaaaggggatgaaggcgttattggttaccttaaagccctacaaaattttgacaatacattccccggttttgagcatgaaatacaagggatcaatgtcgatgagaacggagatttttgggtaagagccattgttgaagacgaacgggtcgcaaaagaattaccttcatctgtgaaatttaaacgccgtgtttcagcaattaaaaaaggccgtcagtaa

SEQ ID NO: 299655 - DNA, 1512 bp, Proteus mirabilis
atggcaaacaaatcagaaactgcatcgtcaaagagccccacatcagcgaccggtgatagtggtgcaaaattgggtttatttgctctgatcgcaattgtagtaggctctatgttaggtggtggcgtgtttagcttgccacaaaatacagcggcaagttcagcaatcggaccggttttaattgcgtgggtgattgccggtatcggcatttactttattgctaatgcgtttcgcttattatctgatttacgacctgatcttcaagctggtgtgtatatgtatgcacaggaaggttttggatcttttattgggtttaatgtggcctggggatattggttaatgactgcatttggtaatgtggcatttgccgttattctaatggatgcttttgatcagtttttccccggtgtctttacagatggcaataatttaaattcaattatctgtggctctattttaatttggggctataactttttagtcttgtcaggaacgaaagttgcaggttttgttaatacacttggtactattgctaaattagtaccattgattttatttgtgattattcttggtgtgcttattgattattatcagttgtttagtaatttttggggtacctctcctcaaattatgaatacggtggataataaggctgaacctgtatcattaatgtcacaaatattagctccgatgacagtaacattatggtcatttattggcgttgaaggcgccgttgttttatcgggacgggcaaaaaataaaaaagatgttggtaaggcaaccttattaggatttttattagcactaattatttatattttattatccgtcttaccatttggtgttatgtcacaaagtcaattagcgcaattaagtaatccatctaccgcaggtgtattggctaaagttgttggaaattggggtgattggttaatgaatgtcgggttgattatttctgtattagcgggatggcttgcttggacaatgctatgcgcagaaattccgatggttgccgggcaaaaaggcgcgtttcctaaagcttttgctcgtactaataaaaatcaagccgccaatacctcactctgggtcagtagtattgtcatgcaagccgcgatgctattagtctatttttctaataatgcatggaataccatgtataacatcagtgcattaatggttgttccagcttacgtcacgacaactttatatatcacaaaaatttgtcttaatcgtcaatattatcaatatgccaaaacaggtcgtggtttagcattgttcagtggtgtactaggcgttattttttgcttatttattttatatgcgagccaaattcagtatgttgcattaattcctattttattaacatgcggattacccgtttttatttggtcacgtaaagagaaacacgataataaacctatctttcagaaaaaagagacactttatttagtgattttattattacttgatgtgttggtattagctttattgatgaaaggtattattactctttaa

SEQ ID NO: 299656 - DNA, 552 bp, Proteus mirabilis
atgggacggcaaagaacgattgatagagaaaagttacttgaggctatttttgacatcgtgatggagcaaggggctgccgctctgactatcgatacggtggccaaaaaaatggggatttccaaaggtggagtccaatattgctttaatagtaaagaagcgatgattgatgcaatgtttgaacattgggaaggaggatatgaagcgcggtttaatgaggtgattgccaatgataactcagccaataatcgcgttagagcacatattcatgcgactcatgatcacgataagctctcttttgcaaaaggagccagcttaatggccgcgttactgcaaacgccagaatatttgcaaagtactaaagcgtggtatcagcaaagattagcgggtgtcgataccacaacagtagagggaaaacgggcgagactggcttttttagccaccgagggggctttcttactacggtattttggtttaatggatattgatgataatgagtgggaagaaatttttagcgatatcaattctaaactcattaatgtagagaccaaatga

SEQ ID NO: 299657 - DNA, 522 bp, Proteus mirabilis
ttgtctgttgctgaaatcacttttcgttctccggctgcaacagaagcaatctctttattaaaaaaacatattccatcaatgttagttggtgctggtacagtattaactaaagatcaagcttacgtggcaaaacaagctggcgctgagtttattgttgctccggggctcaatcctacaacagtaaactattgcaatgaaattaatattcctatcattcctggaattaataatccatcttcaattgaattagccttagcgcttggcatcgattttgttaagttttttcccgccgaagcctctggtggtattgcaatgctaaaagcattgttagcaccttatcatcatctgcatattatgccgacaggaggtattggattagataatattcgcgattacctcgacatccaacaagtcgtcgcatgtggtggatcatggatggtaaaagaagagtttatacaacaaaaagcgtggcataaaataggtcaattaaccgcagaagccgttaattttgttaatacctaa

SEQ ID NO: 299658 - DNA, 528 bp, Proteus mirabilis
gtgattgatgggggaaaaggtgacgatcatattgtcgttaatgaaggacaccatattttatttgcaaacgaaggtgatgataagctctatggtggaaaagggaatgatgttcttatttcagatagtggtaatgattatctgcaaggtggagaaggggacgatatctaccttatcaacaaacattatggtgagatcacgattaacgataatgaagggaaaaatgttatttatattactgggttggataaagatgaagtgatgttatcttcccgagataatgatgatgaagttcttttttctcaggataaaaattttattgtcagaataaaaaataaatataaagagcagccgcagagcgtttatcagattgaacaaagggagcatatgctaagtgacgaagtgttagcctctattgttcatgaaatggctcagtttaatcaaactcagctgtcttctatgcaaggaacctttttgcctgaagctaaagaatggacgttaatgccaattatcactaagcatttaggttaa

SEQ ID NO: 299659 - DNA, 846 bp, Proteus mirabilis
atgtcgattactgttttcattgcggtattatttgcagctgtttttcatgcttgctggaatgcgcttgttaaagtgggcagtgaccggtttttaggaatatcattactgacttttttttctggtatcgtcactctgccagccctattttggattgggttacccgctctcagcgcttggaaatggcttattctttctgttctattccatattggctacacattctctttaagtcgctgttatacattggcagactttaatcagatttaccctatttctcgtggcagtgcaccattaatgactgctattcttggtttttttctgtttaatgaaattctccctatcaccgccttaattggcattctcttaattattttaggtattatccttatctcacgtagccggaaaatagctgagtttaatttacataaggatgcactcttttttgcgttacttaccgcattatttactgcaagttatacattgtctgatggtaatggttctcgcgttgatgaatcaccactcgcttatattctctggctcttttttctaaatggcctcactatgtattgcattgcatggcttcgttatcgccagcatttaaaaataaaaataaagcattattggaaaccggctttctttggcggtgtaatgcaattagtcagttatggcatagtaatatgggcaatgagccatgcctctattgtactggtggcggcactaagagaaaccagcgtactatttgctatgctcttatcagtttatcttttaaaggaaccatttaatcgtaaacaactgttagcttgtttagttattttagcagggattgttgctatcaaaatgggataa

SEQ ID NO: 299660 - DNA, 1173 bp, Proteus mirabilis
atgacagcaattattagacaatttttgagattagaggcatcaggcggtattcttctgattattgctgctattatcgcattaataatggcgaatacacctctaaatgctttgtataatgagtttttatctattccgattatgatcaagtttggtgcattcgaacttgataaaccgcttttactttgggttaatgatgccttaatggcagtatttttccttgtggtagggttagaagttaagcgtgagctgaaagaaggatctttagcacaacgtgatagggcaatttttccagccattgctgccgtaggcggtatgttagcaccagctttgatttatctattttttaatcatggcgatgcgattggtcagcaaggatgggcgatcccggcagcaacagatattgcttttgctctaggtgtcatggcgttactaggacgccgcgttcctgtggagttgaaagtctttttattagctctagccattattgatgatcttggtgtcattgtgattattgccctcttttactctaagagtgtggcattattcccgctattattggcagcgctaatcaccattacgttgtttattcttaattggcgcaaagtgagtaataccgcagtttacttagtcctaggctttattttgtgggtttgtattttgaaatcaggtatacatgccacaatcgcgggagtgattgttggattcttgatcccattaagagataaagatggggcttcaccgtctgaagagttagagcatgttttacacccgtgggttgcctatttaatactaccactatttgcttttagtaatgcgggggtttctttaaatggcgttacccttgatggcatgttatcgactttacccgttggtattgcgttgggacttttcttaggtaagccgattgggatttttctctttagttggatttcggtaaaactagggattgcaaaattgccagatgcgattaatcttaagcaaatatttgccgtttctgttttatgtggtatcggttttactatgtctatctttatcgcaggccttgcgtttgaaggtgctatagaagcctataatacatactctaaactgggtattttagttggctcaaccatggctgctgttgtgggatatttattgcttaactctgttttaccgaagttgaaacagaagtaa

SEQ ID NO: 299661 - DNA, 954 bp, Proteus mirabilis
atgagcattagaaatatatactccaaaaggcaaaaagagctgaaaggagaaaaatacgatgtttatcaatatgatgaattatctaaaaaattaaaaatacaaataattcatattattaaaaaaacttttggtaagtgtcccagctatactgcattaaaatacggatacgctagaacatctatagtagatgtttcatataaatatgttttcgacactctatgtgaagaatggggtgagttagaattaatttataaagattattcaaatgaacgttcttacgaaacagatatatgtaatagacttataaatgaaaaagatattgataaatgtttagatatagtggaggtttgtttttctactcttaatgataataaagaccgttactcttcatctgcgcttattgatgaatcactcagtgatttaaatcatagatttattgaaaatgaaactggctatcaatttgaaagcggtgaaataataagaattgattccaaaataatgcattcagatgtagttaaaccagtaataaatttattatcttcaaataattattataatggtgcaaataaagagtatttatctgctcatgaacattatagacatgaaagatataaagagtgcttaacagattgttgtaaatcatttgaaagtatgctgaaagctattcacgaaataaatgattgggaatataaaaaatcagactcagcttcaaaattaattaaaagttgtttcgataatgaattaataccatcatatattcaaagtcaatttacaagtcttaaaacaatgttagaaagtggtgtgccaacaattagaaataacatatcagggcatggtcaaggcactgaaaataaagaagttaatgaggaactagttagctacatgttacatttaacagctacaaatttattatttttagctgatagtcaaaaaaaatatcagcaaaataattga

SEQ ID NO: 299662 - DNA, 1068 bp, Proteus mirabilis
atgaaaattcattatgctgtaggtaaatatataattgctatatttattctattactgcttgctatcaccaccctattattttttacaagccatattcaagactttgactatgaaaacaaaggtcaagaagaattaaattttgtatctcaaggaaacagactatcaggaacgcttcttaccccgcaacataagactccgtctgcggttattgttgttattcatggtgatggacctcaagatcgttattcaaatggtggctacaaccctctgttcaatacatttttagatgcaaatatcgcaatattctcgtgggataaagcaggaattggtgacagtcaaggaaactggctacatcaatcaatggaagctcgagccgaagaagcagtagcagcattaaaattaatgcaactacgttatcccgaagttcaagtaggttttttaggattttctcaagctggatgggttattcctatcgccgctagccaatcacaacccgctttttctgtgattattggaggtgctgttaattggcgagaacaaggacaatactaccaaaaattgcgctatgagcagcaaggaaaaacaacggatgaaattatgcaattgctggcaaaagaacaaaaagaaaatgatgatatttttggactacatggtacaaaagatcgcactcgccgtaatgacatgagtgaagatcgatttgattttgttgtcaaaaattacttaagtgattcatcaagttatttaagcaaaatgaatggccgtatattagcggtatggggaaataatgacttaaacgttaatgctcagcttaatgcttgtcgctatcgtgcgatattaaatactcatcatcaagctgatattgttgtttttcctcatgctagtcatggattactccgtgtgccagaatttaattaccaattagaaagtgattggccaatataccgtcaattacaatttctgtgggctggacgtaaagcttacactgaaggttcgttaccacttattatcgattggataaaaaataaaaaaccggatttttctccctataatatggattgtaatttatga

SEQ ID NO: 299663 - DNA, 753 bp, Proteus mirabilis
atgatcaatgaatcattagtaactatttatcacgacccaacatcagagccaagcagagccgttcactggttatgtgtagatgcggggatcactatcaacattaaatatatatggctaacattaggtgaccatctttcaaacgaatttcttgcagtaaatcctctacatcaagttcctgcaatgaagcataaagatttttgtctttctgaagcttcagcgataatgaactatattacagacatacatggttgtagtgatgaatggtttgggaaaagcattagagaaaaagctattattaataaatacctctcgtggtatcacactaatcttcgtaggatctcaacgctagattactttcttcctgttttattgatgccggcgtacttaggcttacctaaaccaaaaggtgaagatctaaaaaataaacttgatgctcttcatgccatgtttgccaatcttgatttcttattgcagggtaagaaatttttatctggagataaaatatcagcagcagatattctttatgcatgtgatatttttgctctgatgattgatcctaactataaaaaattgttatctcgctataataatatagcaaattggctggaaaatttaaaagtaactaaaggttataacgaatcacataaagcttggaacaatatagcgccgcaaatattagcactaaatggaggaacgaaaggctctccagaatgggtggcagaaaattgcaaaaaatttttattgttgaactaa

SEQ ID NO: 299664 - DNA, 1251 bp, Proteus mirabilis
atggtcaaggtatctttggaaaaagaaaagataaagttcctactattggaaggtgtacaccaaagtgcggtagagaatttaagagcggcaggttataccaacatcgaatatcataaaggtgcattatcgggagaagaattaaaacaagctatccgtgatgcacgctttgtggggatccgttcccgcactcacttaacagaagaaatttttgccgcagctgaaaaattagttgctgtagggtgcttctgcattggtactaaccaagttgacttagatgcggctgcccgtcgtgggatccccgtttttaatgcacctttttcaaacactcgttccgtggctgaaatggtgttaggggaattactgttattactacgtcgtattccagaagcaaatgccaaagcgcatcgtggtatttgggataaacaagctaaaggctgttttgaagcgcgaggtaaaaaactggggattattggctatggtcatataggcacccagttagggattttggcggaaagtgtcggtttagatgtctatttttatgatattgaaaacaaacttcctttgggaaatgcaactcaagttcgtcacttatccgaactgctgaatatgtgtgacattgttagcttacacgtaccagaaacgccatcaacaaaaaatatgattggtcacgaagagctattacgaatgaagccaggcgctattcttattaatgcctctcgtggaacagtagttgatattccggcattagcacaagcgctagagagtaaacatttatcaggtgcagcggtggatgttttcccaacggagccgggagcaaataacgatccgaacgatcctttcgtatcagaattaattaaatttgataacgtgatcttaacgccacatattggtggttcaacccaagaagcccaagaaaatattggttatgaagttgctggtaagttagctaaatattctgataatggttctacattatctgcggttaatttccctgaagtatcactgcctagtcatggtgatgatgtaaaccgtttactgcatattcatgaaaaccgtccgggtattatgaatagtatcaataacgtatttacagaagaaaatattaacgttgctgctcaatatctacgtactgctggcaatgtgggttatgtagtgattgacgtcactacacaaacgaaagcacaagctgagttagtattgcagaaactgaaagggttaccggggacaattcgtgctcgtatgttgtactaa

SEQ ID NO: 299665 - DNA, 729 bp, Proteus mirabilis
atgaaagatagtgacttggattggttgttaaattcaagcgaaagcgaaattaataaaggctcaattccgttaactccaaatgaaacacagttatcatcattgatcatgaacaacccattggggaataacaaaatacagcttccgtattatgcagaaaaagcgacatactccttgctttcagggcttaaaaaccaagtggacttattacctggtgcgattattgttactgatctcctttttgtagctgaacatactggggtttatgttggcgatggaaatgttgttgagttatatggcgacggaagcatcaacttaatctctatcaatgattttcttaatggtggttataaaaataatgatatatcaccaagaacaggcataaatatatacactgctacttacgatggtaaatgcatagcatctaaaagagttacaaatagggctttgaatttaaacaaaaaattcgcaggaaagaaaataccttatcattgtttaaaaaataactgccacatgctttctggatattgtttttctggcgaaggttttcaggaaaatacagactgcgctttttttcgggggttaacaaaaaaaataatagattcgactgttccccgtacaaataaaaaagagagcttttgggactttttatttaaatctgaagaatattcaccatattcaaaaaatgacttaaataaatttgcttggacgcaagttagatccactaactag

SEQ ID NO: 299666 - DNA, 1068 bp, Proteus mirabilis
atgagagcttatgatattttatcattattaagagataaggatgtttcgttccgtactatccagcatggattgacacacaatggattagcatcagcaaaaggatgggaagccgctttagattattataatgaaatttatgatagtgaaagtgatgagatagttaaaaatttatatctatcccagctgtattatggaaaaaggactgtctatttcagaagtttgtcagatgtaaatgacaaaaacgtaaagaatacggttgatgtaataaatcgtatttttacaacatcaaagcataaagatattaaaacatataaaaatagttacccttatatattagacaataaatcgttgtttaatttgaaattaaataatccatgtcctgttcatatcgatgataatgcaaacgaaattagagtagtaatgacatatcctcgagcttacaagcagagagatacatttgatattaatgatatagattttgatggaaaccaaccaaagcagttggatggctatgaagaaataataggaattaaaagtggtagagctcaatcgtttgatagtattttattcaataagttgaatggtgttctgcaaatccaaatagaccatagtcgaaacattatcaatgaagagattgataatgctaatttaaggtactggaatatgatttcaaatgaatttaatacatggttaaagatacaatcaccatttaaaaaaataaatttgttcgataaaattaatgagttatatgttagcggcgatggtttgattaacactctatcacactcgactggaacaggatctgtaaaaaaagagaggatgaggcgtcgtgacgaagatctaagaagagaaaaatttcatcaggttgggttacaagcaataaatggagatacaaacaattataatattactaaacaatgggatggagagtgtggtacagcactgaaattgacaattgatgcaggagtagcggcaatttctcaaagcaatcctactgtaaactgtgctattattgaagggtgtatcactgaaagtgattttaactttttagtatctaaggttatatga

SEQ ID NO: 299667 - DNA, 411 bp, Proteus mirabilis
atggtaacaaaggcgcaattattagagcagatatctatagaggtcagttttgatcaagaccttatttgcgcctgtaattcaatactagactatatttgtatctcagagaaagataatctcaaacacttacctatatataaaataaataaaattattaaaaataaagaaagtagctttactttcaatgtcattaattttttgtctggtgagcagtttcctatttttaatgtgtgtttcgaatttattgatggtgattttattgaacaggtagatcatgaaacactagtttatagccagataaataatgtttattatcatcctgagaccggggaatcagttcaagattatgagtctaagatatttatgtatctatctctttctgattttgggagagagataatatgcaattag

SEQ ID NO: 299668 - DNA, 636 bp, Proteus mirabilis
atgcaattaggctcaaatgaccttacaatcgctgatttaaaaaaatttgcgctttttgataaatcagtggaaagttttctaaataagttgctatgcaatagctatgatgattttgtcaaaaatgtttataaagagctagaaacatgcattgagtttatggaagaggatccgtcagtacgtaaaaatgatggagaagatagattaactacagatattattcaccattttagggcgaaaggctatcatgcaacacatgatgaaatgatcggcggtcactcagacatagtcattaaacataaagattatatgtggttgggagaagccaaaatacattcaaattataagtatttaatgcaaggatttaaccaattatgtacaaggtattcgtctggtactaacaaaaattgcaatggtgggctagttatatatataaggacaaatgatgcctcagctgttattgatgagtggaaaaaacgattggatagcgaacagctacctgaatacagttcgactcaatgcgactccaggcaagaattaagtttccactcaatacataaacacgcccgttcaggtttaccatacaaggtaagacatatgggagttgttctcggctttgaccctaaagataaaaaataa

SEQ ID NO: 299669 - DNA, 1461 bp, Proteus mirabilis
atgaacaatacttcttatgcatggaaacaacagctactgacaactcttgatgaacagcaagtcagtagtgctgtcaatgataatgatgccgactgggaatatattgacagtgaaatgataaagttcggctcactcagtcatggtcaattagatattaaagagatccagcgtcgctgtttacatctatttgaaactcagactaaagattttcggatattagtccatttactacgtactttacaacatgctggagagccaaaagaattagtattagcagcacagatcctcactgattttaatcgtcaatattggcaaagttgctacccaaccaatatgaaattgaaatcacgtttagccaatcaagttttgaaacggtttgaaacagcgagtgagagtttttgtcatgcagccaatagcgcgatgcgtgatgatattctaggctcgttcgcctttctagcgcaattttggcatgaacaaagcccggcacttgcagaacaaattgatgatttaagcagagattataatcgtattgaaaataacgatgcgccgattattgttgcttcacctgccgagaaagaagaaaaagtacagactccgccggttaacgagtctatagaaacaccgacaaaaaatgggttaacaccaaccattaacgttaaccatcaagatgaaagacaatggaaacaaacattacttcaagtagctgatgttatctgccaacaagcccctgagagttcagtaggatatcgtatacgccgttatgcaatttggcatgcgattactgttttacctcaagctaatgctcaaggaaaaacccctttagcccccgtatcaattgaccgtgtaatggattacaaagctcaacttactcaagcgtccattacgctattaaacaatattgaacagagtctctcactctctccttactggttagaaggccatatattagctgcacaagtagcggctaaattaggttatggggaagtagaaagtggcattattgaagagttacgtatttttttagcgcgtcttcctgaacttgttaatttgcacttttcggatatgactcccttcttccctgaaagtgtacaacagtggttagagcaatataaccaaactgaaaacggtcaattgccaccatcgaatacgaatactgcgatcctagagcaagaagtcttgcaatgttatgagcaacaaggtcttgaagcagccctgaagcttattgaattaaaccttgctagcagatcagagcctagggatagattttatggacaattattgtctgcacaactatttgaattgtcaggtatggattatatggccacacagttataccaacaacttaatacctctgcctcacattattcacttgcagattgggaacccaacttaatacgacaactaatgcaaaaaatagacaaaaagtcagaaataacaatgactatggatagggatcaataa

SEQ ID NO: 299670 - DNA, 2169 bp, Proteus mirabilis
atgaacaaaatcaactccgtctgtccttattgtggcgctggctgcaaaatcaatctctgtgtcgaaaatggtcgaataatcaaagctgaaggtgctaatggtgtcactaatcaaggcgagctttgtttaaaaggtctctatggatgggattttttaaatgacaataaattactgacagccagaattcatcaaccgatgatccgccgacaaaaaggggctgattttgaaattgtcagttgggatgaagcgattgagtttacggctaaaaagttactcgcaattaaagagaaatacggtgctaaatctattatgtgtaccggctcctctcggggtacaggtaacgaaaccaattttgtgatgcaaaaatttgctcgtgctgtactaggtaataataatgttgattgctgtgcccgtgtttgtcatggcccttctgttgctggtttacaagaaacactaggcaatggggcaatgagtaattcaattgctgatattgaagattcagattgtttgttggtgtttggttataactgtgctgattctcaccctattgtggcgcgccgtgtggtgaaagcgaaacaaaaaggggccaaaattattgtttgtgatccccgtaaaatagaaacagcgaagattgctaatcaatatcttcccttaaagaatggcaccaatatggcgttagttaatgcatttgcctatacgctgattgatgaagatctttatgacaaagaatatgtcagtcgttacaccgaaggttttgaagaatataaaaaacagctggtggattatagccctgaagcagtagaacgtattgttggggtttctgcaagcgagatccgccaagctatgcgcacttatgcagccgcaaaaacagcaaccattatgtggggaatgggggtaacacaatttggtcaagcggtagatgttgtgaaagggctagcgagtttagcgttattgacgggtaatttaggcaaaccacatgcaggcgttgcccctgttcgcgggcaaaataatgtacaaggtgcttgtgatatgggggttttacccaatatgttccccggctatcaaagtgtgacagatgaaggtattcgtcaaaaatttgctcaagcttggcatattccggttgaaaaactcgatccgcaagtgggttatcgcattactgaagtccctcatttagccattgaaggtaaagtgaaagcttattacatcatgggcgaagatccacttcaaactgaggcagatttaggtctggttagaaaaggttttcaagcgctcgattttattgtggttcaagatatctttatgacgaaaacggcagagcaagcagatgtcattttaccttctaccagttggggtgagcacggtggtatttttacttgtgccgatagaggttttcaacgttttgaacaggcagtacaagcacgtggtaacgttaaacgtgattgggaaatcattagtttattagccacggctatgggctatccaatgtcttatacagataatgaagaaatttggcatgaggtaagagcattatgtccactatttttcggtgcgacctatgaaaaattagcggggctagcccatatacaatggccttgtcctgaactcgatcatccgggaacaccctatttatatttagataatcgatttacaacgccatcaggtaaaggccagctttttgctaccgcatggcgcgctcccgcagagttgcctgatgaagattatccaatgattttatcaacggtacgtgaggtagggcactactcttgtcgctcaatgacgggtaactgtaaagcattagcatcattagcagatgaaccggggtatgtgcaaattcaccctgatattgctaaagctgcaggtattgctgatcaagaaattgtttgggttgcatctcgtcgaggtaaggtgctgtcacggtgtaatctaaacgaaaacgttaataaacaagctatttatatgacttatcaatggtggattggtgcatgtaacgaactgacacaagataatctcgatcctgtttcaaaaaccccagaaactaaatattgtgctgcacgagtggtgaagattgacgatcaaaaatgggcagaaagccaagtcgctcaagataatcacggcatgagaagtcgtttaattaatttagtcgagcaagcaaaaacagcgacacactaa

SEQ ID NO: 299671 - DNA, 1557 bp, Proteus mirabilis
atggccaagaaaaaattcagcgaatccatacagcgctttggtaggaccctactcctgccaatcggtgttttagcgcctatcggtatgatactgggtatcagtggcgctttagttcagtcttatatgattgcacgctttcctttcctagggaatgaaacagtcaatgcattattagtgagtatccgctctattgcaggggtcgtgtttgataatattccactcctctttgctatgggggtggcttatgggatgagccataaagacaaggggatcgccgtttttgcctccgttgtcggctatttaaccttgattagcaccattaatatttggctagttttgacggggaaactcgctgatcctgccgtaatgactcaagtggggcagatcaaggtgttaggtattcaaaccatgaatatcagtgccgcaggggggattatcaccggattaattgccgcttgggcgacagataaattctataaccttgaacttccaaccgcttttgccttcttctccggtaaaaaatccgttgccattattatggtgggattaatgattggtgtaggggcattactaccctttatctgggaagttttggtgatgggattaacaaaactttctgcggtcttcctgagtcctgttgggccattctttacagcagggggagagcgactgtttattccatttggtttacaccatgtatggaacgtgttgtttagatttaccgaagcaggtggctcttacgttattgatggacaaacctatgtgggtgttgttcctgccatgacagaagtgttgtttaaccaagggccaagtagtgaatattggtcaatgatgccaagcttaacgcgctttatggcacaacaacaaatgctagtcaccctgttcttattcccagcaattgccttagcaatttatagaacgtcgaaaaaagagaatcgcgcagaagttaaatctatgttggtgaccatggtattaaccgccatgttaggtaacgtcactgagccattagaatttacctttgtgtttattgcgccgcttttatatctgatttacgccattattgttggtattggtgctgttttactctcttttgctggcgtggcgattggctatatccgaggtacggtatttgacttcaccatctttggtctgctctatgaacataccaactggatctacttagtgattattgggttaggtctggcggttgtcacttacttcattttctactgggccattattaagtttgatatcaaaacaccgggtcgtgaagagtcaagcaatatgaaaaatacgcttattaaagagaagcgttatggtgaaattgcggagatcttaattcgcgctttaggtggaaaacaaaatattcgtaacgttgataactgtattactagactccgtgtcgatatcggtgaagtgaatcaaattgataaagagttaatgttggaatcaggttgtacagcattctttattcctgcagcgaaccatgtccatattgtttatgggccaaaagttgagtttgttcgcaatgctgttgatgaagcaatgaagaaataa

SEQ ID NO: 299672 - DNA, 1146 bp, Proteus mirabilis
atgaatagtttgattggctcttctgtttatcgtcgccaactcacttgtggcacattaagcgtaacgccaaattgctcattagaacaccttgatgaactttttgatattgcggaaagacgcaaccctaagcgcgcttttttgtttgtcagtaaagtgttagggcgccatattcctgtttcacctaagaaaatgcgtgaaacttatcaaaaaatggccaaacaatttcctcaatcactcgaaggccctattctttttattggtatggcagaaactgcggtcggtttaggtgcggggatttttgatgaagtaagggatcgttatcctcaggcgctctatcttacgtcaacgcgccatcctattgccgaaggtgaattattctgtacgtttaaagaaaatcacagccatgcaactgatcacctactttatttacctcataacgtagaacaacgccaatggatccagcaagcgaaaactattgtgttaattgatgatgaagcaaccacaggtaatacttttcttaatttagtgtctgcattacgtcaagaaggtaaattaacacaaattaagcaaattattgctgtcacattaaccgattggagtggtgattctcttcaaaagcgctcaccattacccataacaaccttctctttggtacagggaaaatggcaatggcaagctaatcccgatgcaccattacctgttatgccaaatgttaatattactgcatcaggacaggttgccatcacaggtaaacaaagctggggacgcttagggatgaccatccctgctaatgatcttggtttatttattcatgtttctgagggtgaaaaaatattagttttaggctctggtgaatttgtctgggagccctttttattagcagaacgtttggaaaaacaaggggctattgtaaaatatagctcgacgactcgttcacctatttccactaattttgctatccaatcagcgataacttttactgataattatggattaggcattcctaactttgtctataacgtggctcatcagcaatttgatcgcattctgctttgttgtgaaaccccagccgaaagtgttgatagtcaacttattgaagctctctataaagttgcacctattgttgaagtaattagctatgactaa

SEQ ID NO: 299673 - DNA, 963 bp, Proteus mirabilis
atgtctattattcatcttgaatttgaaaagcctattgttgaattagacgagaaaatagatgcattacttgcattcaaacagtctcaagatgaaacaacggcagttgatatagacgaagaaatcgctaaacttcgccaaaaaagtctttcattaacacgctctatattttctgatttaggggattgggagatagtacagttagctcgtcatcctatgcgcccttatacattagattatatcaaggctatttttactgatttccaagagttggccggcgatcgcgcttatgctgatgataaagcaattgttgcaggattagcgcgtttagatagaaaaccagtcatgattatcggtcaacaaaaagggcgagatactaaagagaaagtaaaaagaaactttggtatgccatcaccagaaggttatcggaaagcattacgccttatgaaaatggctgaacgcttccatttacccgtgattatttttattgattccgcgggtgcttatccgggggttggcgctgaagagcggggccaatcagaagccatagcacgaaatattcttgaaatgtctcgattaaaaacaccgataatttgtacgataacaggggaaggattttctggtggtgcattagcaataggggtaggggatcgagtaaatatgttgcaatatagtacttatgctgcgatatcgcccgaagggtgtgcctctattttatggaaaaatgctgataaagcgcccattgccgcccaaactatgggaatgactgcacctaaattacaggcattgggtattatagattcgattattcctgaaccattgggaggcgcacatcgccactaccagcaagcggctgaatttgtaaaagaacagcttctcacagatttaacagaattgaatagttattctaaagaagaactgcttgagaaacgttatcacaaattaatgtcctatggttattgttaa

SEQ ID NO: 299674 - DNA, 816 bp, Proteus mirabilis
atgttatcttttttaagagatagaaaaaaaaatattatccagatagtcatattctgcctattttttctatcttattcagtcacatcgaaagcagttgaaaaaatagaaaacgatactgtggatctaactgatttcgggaaaaatggtttttcttttgtaataaaaagatatatctatctggaaagtgacataaagggtatctctatctctttaaaaaataataacaatagtgcttatttaattaatagttctattttatttaatgatgatgataaaaatgtacctatagtgaataaaaatcgtgaaagaacaccttttatgattttaccacctttgtatcgtttagaaccctctagtgaatatagctggaatattcgtcgtattagtgaaggttctaatgatatggcgttaccaaaagacagagaaagcttattttggattgcatttagagccgttcctcttaaggatagtaaaattgaggaaaagaaatctgtgtcactaacgataacacctactttctttttcaaattaatttatagacctgagtcaataatggcattggaaaataaagatgttattgatgatgttattgttgaaaaggtaaatgggaacatagttataaataataaatcaccactttatatgacttttgaatatttaaaagtaggtgaggttgaaataaaaaatgatggtagagcaataacggtaacaccattctctacggtatcagttgaagcacctaaaaatgttcaaggaaagctgagttggagattcaatgatgaaaatttctttataataaaagataaagaatattaa

SEQ ID NO: 299675 - DNA, 2535 bp, Proteus mirabilis
atgttgcataaaattctttgtatcaatctttgtgttttatctgcgacagtgccgacaatcgcattggctgataattactttgatccgaatcttttactaaataataacgataatattgatttaagtaatttcagcaaagaagactacattgcaccaggagactatagtttaagtgtttttgttaatacagagccattaggtgaaaagacaattttatttaaagcaaacaaagaaggtaaagttgtccctgttgttacaatcaaagatttgaaactatttggtgttaatgtttcagcgataagtaaactaagtcatctgcccgaagacacagaaattgataatatagaagcgtatattcctaattcaagaataacctttaatattaataaattaacgttaaatgcatcttttcctcaagttaatatggataagagctataaaggtgaaattcccgcagaattattagatgatggcgtgagtgctgttatccttaattatatggctaactttattaaaaatagaacgacaggtgattattcaagccataacaacaactttttcttgaatcttaatggtggtgtaaatataggcccttggcgtttaagaaccaattattcttataataattcgagtggttcagatcagagttcttcaagtgattctgaatttagtaatacctatgtaatgcgaaatatcgcttatttaaaatcaatgttgaaaattggtgaaattaccactggagggaatattttttcaagtattccgataaaggggatttctttagccactaaccaacaaatgttaccaagtagtatgcgtggatatgctccagtggtaagaggttttgccaacagcaatgcaaccgttaccattcgtcaaaatggtcaaattatctataaatcctttgttgcccctggtaattttattattaatgatatttccgccggtggtattggtggggaccttgaaataaccattgaagaagaagatggctctaaacgcgtatatacacaagcctattcatcgttgcctattatgctgcgtgaagggcaatttgagtatgagtttagtgcggggcaatatgatggtggtatcacgaccgattccaaaaaaagtaaatttgctttaggaacgtttagttatggtttcaataactcaattactgcatacggtggtttattaattgccaatggttatacctctggtgttattggctctggtgtttctcttggattattaggtgccttatctgcggacgttactctcgccagaactaatttggataaaacctatcaaggtcaatcatatcgggttcgttattctaaaagtttattatctacagggacttcgtttgatttaactgcattacgctattcaaccaaagattactatgactttagtgattacaataactcaggttatgaattgcgagaaggtattgcaccttggttaagccaacgccagaaatctagttttcaaacctcaatttcacaatcattaggaaaatacggttccatgtatcttcgtggtgaaaccagtcgttattgggggaatagtcgtgttaataatagtgtcacattaggctataacactgttctgaaaggtattgcatttaatatagattattctatttctcgcctaaaaagtgatgacaatacatggccagaaaatagacaaattaattttaatatgaatatgccactgagtgtgttctcaaatgcaagtggcttgcaaaatatgaatgcaagctatcttctgactcatagcaatgatggaagaacatcgcaacaagccggtttaaatggctctgcattcgataatcaactctcttatggtatctaccagaatacagataacaaggcagatagttatagtggcaatatgaatatgagttattcaggaagtaaaggaacactttctgggggttatagctatgggaaaaatagaaatagctttaatggtagccttattggtggtgttgttctgcactcaaaaggagtgaccttatcaaggatgttaggtgacagtattgccatagtcagtgcagataaagcaaagggcgcagaaatcaatggaaatgtgaaaatagatacctttggtaatgcgattgtccctcaattaagtccttatgatacaaacagtattagcgtaaatgtcagcacattacctgatgatgtgacacttaatgaaacttcaatgaaagtctatccaaccgaaggggctattttagcaagacaatttcaaactaaagtgggttatcaggttatttttgatataaaaacagcggaaaatatagcgataccttttggtgcgatggcttctttgacagatgaaaaagataaacaggcaaataccggtattatcgatgcctatcaatctctttatatgagtggattacccaatgatgggaatgtcgtggtgacttggaataacaatacgggcaaacattcatgtcaatttagttattcagagctggaaaagattgaagtatcacaacaaaacccaataagaatggtgaccgttaattgtcaataa

SEQ ID NO: 299676 - DNA, 471 bp, Proteus mirabilis
atgtctaatgatatatgtggttatattgagcctccattgaacaaaaaggccagtagtaatttgaaaaattacattgaaagtcaaattgtggggataaccaatatctccaaagatgagctatataactttcctgaagagtttttagcatcaaaggattcttatgtatttttaataagtgatcgaccaaattatccaaatgcaacctatttaattgattatcttgattatgctcctgaagtagaaataggtttcccttgcggggcgaaagaacgtcttaatattctccttaatgtgttgggtgatatttttgtaatgacgggtgcacaaaaaatggttgttgcgttgacagaatgtaatcaaatagaaaaagtaaagagaataaagttatctgaaatgagggatattattcatgctgattttgaagagtatcaagctcctccagatactctttatgaaatcattgtggattaa

SEQ ID NO: 299677 - DNA, 1011 bp, Proteus mirabilis
ttggaagaagcgggtattggcggcatagatgagctacaggagaagtttgttcgttgtaatggatcgcctgactgtgagcggaatacgcgcaatgaatatcgaataaaagaaaaagaagcaggagagaatcttgttgctctctatcagtctggtcagttaacaaaggatgaatttgattatctggtaacagagtatgcaaacagaatgttatctggtattgaaaaaggtgaaaaattaagtgataccggattcaacctcgtgggtgatatttaccggttgtcagggagtgactggactcctatgggggaaatccggaatccttatttttccgcaatcagaagcagtgagcgaataactgattggaaggctcagggattgagtaatgacaaaattaaggaattgatgttaaaggatgataccatcagttcaattatggctccggttgatgtcaatggtattatgaatttggtagataacggggctagtaaggaagagtttgctaagtttatgtctggcatgatctttggcaaattaactcaaggtaaagtaaataataacactaataaagttatcagtcagccgaaagccaatcctgaccaggtcaaagaaaatattgctgccagccaaaaaggaaatagttcaagcaattttagtaaatatcttgaaaaagaaaaattagtcaatccagcaactaataagatagttactgagcatacaatagtttcttctggaaaagctctaaaaacgtcaacaccaaattcagtttatgaagtgtcccgtgcagatggaactaagagtattacttattatgattcaagagggaatatgttctctcgagagaattatggacaacaacgaactcatggttctttaggttatggtgctaatggtaaagttccgccacatgagcataaaatcgaatataactccaaagggcaaccagtaggtaagtattatcgagaaatagataataatggtaacgctgttggagattgggttaaggaaaaataa

SEQ ID NO: 299678 - DNA, 228 bp, Proteus mirabilis
atgaaagtaattaattattttataatattattttgttgttactttgctctggctttcattgcattcgtattgcttggctttattgcagaacttatcaattatatgaaattaggtattttttacattgatatattttttttgaaaaagccaataattttagggggagtatttggtttgagttttagtggagttcatttatttgtgagttattggggacataaacattaa

SEQ ID NO: 299679 - DNA, 513 bp, Proteus mirabilis
atgggaagtacaactttgaccaacagagttaccggagcgggtattagtggtttagctaatttaggtatgcaggggtacaacatttatgaaaatccaaacacagaattcaattttaccagttttgggacgtccttagccacaggaactataacaccaggtatggggtattgggggacaactacaactaatactataggtgcagggttttctagtatgatagatggccaatctccatgggtttctatgggaggagcgtttgttggttcaacggtaggttatgggggaacgaaatggatcacaaatacccttgataataaatttaatccttggtcaagaggacttaaagagcgtccatttgttgtaatgccatcaataacagctccgccgagtgtatcgccaatgcctggaattataggtaacagccttggatctgcgggttcagaatatttaaataaagagactagcgaagtattgaagaaaattacaacagggaacgaaaatgaaagtaattaa

SEQ ID NO: 299680 - DNA, 189 bp, Proteus mirabilis
atgacaatagaaaatttatatccttgcccttgttgtggcaataaaacaataagtgaacttggtgattatgaaatttgccctatttgtggttgggaagatgatcccgtgcaatctgaggatcctgatttttccggtggagcaaattcaagcaatttaaatgatgccaagaagaaatattttaaaaagtaa

SEQ ID NO: 299681 - DNA, 579 bp, Proteus mirabilis
atggaaaactatattatgattaataaaatctattatttaaaatcagatttggaaaattatagttcttttattcaaaattatcctgatggagaagaaagtataatagggagagcgatggatcagcgatggtctaaatttactgatgactatactgcaatttcattagagttaaattctaatgattttggaagaaagaattataaatttgattttagtagttttttgtcgccatttatagtttttagtgaaaatgcattagtgtccttatctgatattttgagttcaagagggcaagtattacccgttaagactgagagcaaacggaagaaatttgttggctattatccaactaattcactttcaggatgttttgacagaaaaaattctgtttatcgggaataccccaatggattaatgattgaaaagccagttctcataaaaaataacatcactgatgagtatttatttactattgacgaatatattagtcgaatctttgttacggataaatttaaacaaagagtagaagatgcaggtttaaccgctttcgatttttcagtggaaatagaattatcgtaa

SEQ ID NO: 299682 - DNA, 300 bp, Proteus mirabilis
ttgaataaccagttactaggctttttgtgtcaaaaaaacagtcgtgatttaaaaattatcgttactagtcaatatttagcaggtaatggttatgaaagtctgtgtctgtatttcgctttaccattatcaggcaatgaacctgagtggcgagtggttgaacactggcttaaagacggtaaacgctgtttagagcataccgaactgacgtatgatttagcccaacgaacccttattacagcaaaacgaggtgcgaaaaaccttccgttatgtcaatgcattgaattaaacttgattttttga

SEQ ID NO: 299683 - DNA, 501 bp, Proteus mirabilis
atgattaaaattcaaacattacattccgaagttattacttttttaaagttatattcattttttaattcgtcagtaaaagaaagaattgaaatgttgatagctacaggagatcttgataatgaaaattcttatgaagcggtcaaacaaaaatataatcaattaattttggaaagttttaatttttctaaattaataaaaaattcttatttagagcatagaattaaagaaataacaggtaatgatattatgatactagatcataaagatgaatctattataggtgtttcttgtattgcctgtaattatattgtatttgaaagtaaagaagatgcttattatgaaatttgccctgtctgtatgtggcaaaatgatggaaaaaaagataatgaatatagtggtagtaatcattgcaccttaaatgattacaaaaatacagatgaatttagaaaaaaattaatattaggaaatgaaaaatatgttaagaatattaaagtaatatga

SEQ ID NO: 299684 - DNA, 363 bp, Proteus mirabilis
gtggatccgtgggggttatttggttgtggtccacaagccaaacagcacattctgtatggagattccactggcggtggtcatatgcatccaggtatgccaggaaaaacaacatttccagtatcttgggatgctaaaaagatcattagtgaagttgacgatattttaaattcgccatctacaacttggttcgcacaaaagggtaatggaggagcgtttactaaatcaggtgacgttgcaacatggggcgcttgggaaatcagggacggagtacaaattagggttgtctatcagccaggaataggaagagttgttacagcgtttcctgatagtgggccaataccaactttgtctagagctaaataa

SEQ ID NO: 299685 - DNA, 255 bp, Proteus mirabilis
atgatgaatgaattctataattttggattaactttttcagaacgattaactgaagaacaaatcaaatttgctttaagttatctagagtttaacgaatggggtatagcactagatactttctgtacttatctatgcgacgaggatgttaatattaaccttcatgaatatgacactttgttgaggtttaatcaagaaatggggatgcccttaagtcgtaacgtgattttatatctaagaaacctagtatcccaataa

SEQ ID NO: 299686 - DNA, 321 bp, Proteus mirabilis
atgaatgataaaaatataatttttcttctaaaaggaaaaaccttactgaaggaattgagcttaaatgatgaagagtatagagcttggttagagatagtattacaggataaagtaaagcctgcatatccatttagaaccgagccaaatgctatgatagggcattcaccctattcaaatatatgcgatgagtctaaagctaaatttaaggttcgtacctcttattttttaacaagtgacatcgaaaatggttttgactcatcttatgatcgagttggtaaatatatttatctaagttcaattgatgagttatttaacatctga

SEQ ID NO: 299687 - DNA, 264 bp, Proteus mirabilis
gtgacatatccacaaagtgctacaccagcaaaaactcagcatgtcgtttttgtaaaaacaacaaagttgggagaagtatatcatttagattataattcaacaggtaaaacttatggaagtgattattggaaagtgataaaacctaatgatcttatagaaaaagtatatggtcgtataggccatggaaatttttctcattatgataaaataaaaaattcacctgtttatattgatggtgttttgatgaatccttggagtaagtaa

SEQ ID NO: 299688 - DNA, 468 bp, Proteus mirabilis
atgggaagtaatatgagtataaatttagacgcaaatattatacctggtaagtctattggtggtatttcattaggtgataatgttaatgatattattaaatgcattgaggcggaatattttataaatgttatagaatttgaaaactttggtgttaaatatctgtgttataaaataaatgatggagctatatcttttactgttaatgagattgggcatatagtttcgttgtggtgtgagcctccatataaagggagttttaatggaaagttatatcctggaataacagcaagaaaactaaaagaaatatctagcattcaaacaataataaaaggatatttagttatagataataatccattgatttattatggaatgcctgatgatatagatgattttaactgtttttctgatttggatgatgatgttttttttaatgaattgtatgttggcgatttaaaccaatcatga

SEQ ID NO: 299689 - DNA, 1038 bp, Proteus mirabilis
atggccagcacaaatcaaccagcacatactgaagtaatcgatcgttggctggaacaagctggctcatcggtaacagagtataatttttatcaactagttgaattgttaaataaaataattcatcaagatgtcaactcaatggaggatgacagcggtattcttcgctttaaatcttattcaaatattgcatttccgacgcgagatgtcatttccattgaaaaaaataatgtcgaacaatatgaattagaaatcgcttttttaggcttacaaggaagtcagtctcccctaccaggctattatctggatgagtttgcttgggaagaggcacaacagatagaaggtatctccgcttttctcgatatcttcaatcatcgtctgatagcgttactttatcggatctggcgcaagtatcgttactacatttgctttgaaaatgaaggtcaggattcattttcacaatatatgttttctctcgttggattaggcaatggggctaatcgcggtcggatcaaaatcaaccatagcaaaatgctcgcttatgctggtcttttagcgagtccaagtcgctcttctgatgtgattagtagtcttatatctcactgtttcgacttagaaaatgtaaaagtaattggttgggagacacgccgtgttcctattcctgaatcacaacaaaacaagttaggtacgatttctcatcaatccggacaaaaatctcgcccacggatgttattaggggagaattttagtctgggctcacacatatatgattgcaatggaaaatgcaccatcgaaatcagtgaattaagtttagaacgctatatgcgctttttacctaacggcagtgatttcgcaccattagttgcctttgtttcttatatttttcatgagcaattagcttgggatttacgtcttagcattgctgaaaagcaagccgaagggttccgtttgggtcaccaacaacacaaccaattaggctggcaaagctttttaggtcaacccgcaaagaaaccggatgtcaccattacggtattggaataa

SEQ ID NO: 299690 - DNA, 780 bp, Proteus mirabilis
atgttgaaaattgctgatacgacattcacatcaaggctatttactggtacaggtaaatttgcgacaccaacactcatggctgaagccattaaagtctctggtagccaattagtcacaatggcaatgaagcgtgttgatttaaaaaatggcaatgatgatttaatcgtccctcttaaatcattaggggtaaaattattacctaatacttctggtgcaaaaacagcacaagaagccgtttttgctgcacgattagcaaaagaggcctttgatacccattggatcaaattagaaattcaccctgataccaaatacctacttcctgatccaatagaaacacttaaggcggctgaaattctcgttaaagaaggctttgtagttttaccttattgcagtgctgatccggtattatgccgtcgtttagaagaggtaggatgcgcagctgtaatgccattaggttcacctattggttccaatcagggtttacaaactcgcgattttttgcggattattattgagcaaacctcaatacccgttgttgttgacgcaggtattggcgcaccaagccatgctcttgaagctttagagttgggtgcggatgctgtacttgtcaataccgccatagccgtagctaaaaacccagttttaatggcccaagcttttaaagccgcaattgatgctggagagcttgctcgacaatctggactggctgtaccaacttcaataacacatatgcaagcacaagcctctagcccattaacccaatatttagaggctttctaa

SEQ ID NO: 299691 - DNA, 1332 bp, Proteus mirabilis
atgataagtgcatggcgttcaccgggatctaccttaaagccttttatttatggtcttgctttggatgaaggattgatccatgcagaatcactattacaagatgttccgcgtcgttttgaagattatcgtcctggtaattttgatacgggatttaacggtgccgtgagtgcgagtgaagcccttagtcgttcattaaatttaccagcagttcaattaatagaagcttacggcgcaaaaaaatttgcagctaagttgcgacataatcaccttgagatgcgtttcccttatggctctgaacctaatttagcgcttattttaggaggaacagcaacacgaatggatcaattagtggcgacttttagtgcccttgcaaggcatggaaagacagcgccgttacgttttacgccagagcaaacaatcaatgaacgtatgttaatgtcacccggtgctgcgtggatcattcggcgaattttagcgggtgaggcacggcctcgccctgatagtgctatttcagctgttgttcctttggcttggaaaaccggaacaagttatggttatcgtgatgcatggtcgataggcgttaatgcgcgttataccattggtgtttgggtgggaagacctgatggcacacctgttgcggggcagtttggatttgcaaccgctgtaccgataatgaaccaagttaataatttattgacgagttatttttatcaaaataaacagcggcctcccgttgatcctaggccaaatagtgtttcagcagcagcgatttgttggccaacgggaaaagctttgcctaaagaagatagtaactgccgagtcagccgacgaagctggatccttgataatactattcccccaacactactgaatgaaagccaagagggtattttaggcatcaatgaaaaagtatggatagataaagagggtaaacgtacagggcctaattgtcctggtgctcaattaaaggatattgctctatggccgatagcattagatgcttggttgcctgaaaaagagcgtagagcaaaacgattaccgccaatttcattaacatgcccacctattaaagaggatatgatcccattgtatatatctgggataagaaaaggggatttattgcgtccattacccggtgaaactcagcttgaaataacggtttctacacaagggggcagtggtatgcaatggtggtttttaaatggtgagcaaatcggtaaaactgaaaatggagcaacgttctcttatttattagaaaaacgcggcaaataccaactttcggtgcttgatcttagtggtcaaacggatatggtgaattttagttttcgttaa

SEQ ID NO: 299692 - DNA, 1008 bp, Proteus mirabilis
atgaaaacattaggcgaatttatcgtcgagaaacaacaagattttccccatgcaactggcgaattaactgcattactttcagccattaagcttggggctaaaattattcaccgtgatattaataaagctgggttagtcgatattcttggcactaacggtgtttctaatgttcaaggtgaagcccagatgaaactggatctttacgcgaatgagaaactaaaagcagcacttaaagctcgtggtgaagttgcggggatcggttcggaagaagaagacgatatcgttatctttgaaggtgatcgtgcggaaaatgccaagtatgtggtattaatggatccattggatggttcttctaatatcgatgtaaacgtttccgttggtactattttctctatttaccaccgtattacgcctattggccaaccagtaacgctggatgatttcctgcaacccggtaatcgccaagttgctgcgggttatgtcgtttatggctcatccactatgttggtttacactaccggttgtggtgtacatgcctttacttacgatccttctttaggggttttctgtttatctcacgaaagtgttcattttccgcctaccggaaatatgtattcaatcaatgaaggtaactacattaaattcccattaggggtaaaaaaatacattaagtattgccaagagcaggatgcagcaactaaccgtccttatacaacgcgctatattggctctttggttgcggatttccatcgtaatttgctcaaagggggaatttatatttacccaagtacggcaagtcatccaaatggtaaattacgcttactttatgaatgcaacccaatggcatttctcgcggagcaagcgggaggtaaagccagtaatggtaaagatcgtattttagatatcaaaccaacagagttgcaccaacgcatgccattctttgtgggcactaaagcgatggtcgaacaagcagaagcatttatggctcaatatccagacgaagaataa

SEQ ID NO: 299693 - DNA, 528 bp, Proteus mirabilis
atgagcctgaatcatgttcctgctggtaaagaactaccagaagatatctatgttgttattgaaattccagccaatgctgatccaatcaaatacgaagttgataaagaaagtggtgcactgttcgttgaccgttttatgtcaacagcgatgttctacccatgcaactacggttacatcaacaacacattatctttagatggtgatccagtagacgttctggttccaactccatacccattacaaccaggttcagtcattcgttgtcgtcctgttggcgtactgaaaatgactgatgaatcaggtgaagatgcaaaactggttgcggtaccacacaccaaactgagtaaagaatacgatcacattaaagatgtgaacgatctacctgaattattaaaagcgcaaatcaaacacttcttcgaacattacaaagatttagaatctggtaaatgggtaaaagttgatggttgggaaggcgtagaagcggctaaagctgaaattctgtcttcttttgaacgcgcaaaaaaataa

SEQ ID NO: 299694 - DNA, 1194 bp, Proteus mirabilis
atgcgtattgtcttcttctatatgctttttttggtattaagtgcagatggtctaatggtttttttgacacctgttattgtttatcaattaacaacaagcattgaatatgcaggattgacatacgctttatggtggttaccacgtatttttttaataccgcttattggtcaatatattgatggtctaggcgtccgccctgtttctattatttctgatagttgtaaaattatcggttgtttatttttattaatggtagatttttcctctgatttagttattgcaattagttttgggttagtaggtagcttaatttctattggtaattcacagacactgatttcatatgaaaaaatgattgccttgatgagtcgctataaagaacatcatattaatataatgtctcgaatggattttttgggcatgatcatcggtccattaataggtatgttatttattgattatggttaccattatttacttattattccctgtctattttatttcattaacgccgtgttctttttgttcttttaccaagcaccaaaacagcaccaatccgccactcagttacatagcctaacagagacattacaggtgactaaaaggatagtggtgatttttacgtctcctattttgattttttctattttaattgctatcggcaataatatgtttgatggattaattgagtcgagtggggcggcgttgctcgataaatcgatgaatttacccattaaatactatggctttattgatatttctgcggggatctgtggcgtgataggaacttatttatatggttatttaacccattatttaaatcgaaaactattaatgtctctatcaatttgtatcatcacaataagctcttttctactggttgtttttcaacataatatcacggcttttattctcttttatgctctatccattattggtaaggttttttcagggaatattttacggatgctaagaatagaaattattcctgtgacacaattagctagtatttcctcactgattattttgtttaatcaactgattttgcccattgttgggggattgctctttttctctacaggggatatttcgacagtgtatacattgatgataatcgctatggcgatcactttagtgagtggcgtaatgcttattatgcggttaaattataaaaaagagataatcataaaataa

SEQ ID NO: 299695 - DNA, 348 bp, Proteus mirabilis
atgcgaattattgtttatggaagtttacggcgaaatcagggtaaccatcactggatgacctacgcacagctattaggtgagtataaattagcggggtataagctctatgatttagggttttatcccgcggtggttgaaggtgatggtgaaatagaatgtgaagtttatcggatcacgccttccattttgacggagcttgatgaactgaaaaaaaatgatcaagattacaagcgccaattgatatcaacaccttatggtagtgcttggatctatctttatcaaaagccagttgatgggttgcgagaaatcaaaagtggagattggctaaaacgccacgaagaagagtaa

SEQ ID NO: 299696 - DNA, 807 bp, Proteus mirabilis
gtggtgcaggaattacccgagtctgcggtttcggcctcctctgatgaagtgatgttggacaaagaattacaacctatagcaccaaagcagacttctatacctattcaaagtaatttggcgattaatattggcgatgatgtcacattagatgcctttgggttgaaagctagattaacaggggcattaaaagttgctcaaagtaagcaagggttgggattaaatggtcaagtggatattcctcgcggggaattcaaagcttatggacaagatttacaagtacgtaaagggcaaatcttgttctcagggccggttgatcagccatacttaaatattgaagcgatacgtaaccctgataataccgcagataatgtcattgctggggttaaagtgacagggcttgcggataagccgaaagtggaaatattctctgagccagcaaaaacacagcaagaagcattatcctacttgttaagaggtgaaggattagcaagtggtgattctgattcagcacaaatgacagccatgctaataggattaggtgttggacaaagtggacaactcgtaggacgtattggcgaaacctttggtatttctgatttagcgttagatacacaaggtgtaggggatagttcacaagttgtcgtcagtggtaagataaccgatgatttacaagtgaagtatgggatgggtatatttgattcgctagcgacgttaacattacgttatcgcttgatgcccaggttgtatttacaagcagtgtctggtatgaatcaggcaatagatctgctttatcaatttgagttttaa

SEQ ID NO: 299697 - DNA, 438 bp, Proteus mirabilis
atgagcactcaaatactcacactaaaacgtaaaaatccaccagcaacgaacacaccaaaaagcttgcaaactaaaacgccacaggaagcctcgcagcaaccgaagaagaaaaataaggcagatgttcacgcgaagaagaaacaacaccgtatcgaccgtatagcgaagcactggacgatatttaatgaaccagaggctaaaccactgatgataggcatcaaggaagtcatgattgctgaggttaaagataaaaggctggatattccagagagccatattaaacagggattacgatcatacattagtcgtaaaacctatctgaaagcccttactctgggcggtaatcgttttgatatgaacgggcagcctaaaggagaagtcacacctcaacaacaagcattagcaaaacaaatgctggtggaatgggagagacaataa

SEQ ID NO: 299698 - DNA, 177 bp, Proteus mirabilis
atgagccaatctcaaaaaaaacattcagtcattcttaccccgtcacaatctgagctattgaaatttctgttacccaaagagcgagcaaacaaccctagccacagaaaagtaacgttacatagtattgcacgtagagcattagatataggtttagatatgatgcaaaaaaataattaa

SEQ ID NO: 299699 - DNA, 342 bp, Proteus mirabilis
atgacaggaaaatttattcaacaatttgagcgtaaaaatgccatcgtgaatataaatacatcggatggcataaagtcacttgctgtcgtgtttcgtctccccaaagaccctaatacacaaagttatcttcgaatgatccaggctattcctgaaatgtcacctacggaaattttgcttgaggttatcgaagcatgggaatttgatgagtcgcttaactcagccaatatgactaagttgattgataattgtcctcaggccgcatttgccatcatggaagcgtttgggcgtttgattcactctcgtgaaatacaacaaatctgggggcaaaaatggctgatgtag

SEQ ID NO: 299700 - DNA, 3009 bp, Proteus mirabilis
atggctgatgtagcaacaatttcgcttgaggtgagaacgtctgacttagagcgcggtacgcaaaagttaaaggagttcggcgatacagcagaaaaagtaagtagttcttcgcgaaatttaaatgaccaatttaatagaggtgttggtcatcaaaagaaaatttctgatgcaataaaaaagcaaagggaagaatttgataatttacttaactcgataaatccaaccaataaagcgtttcaaaaactagatgaatggcaagctaaattagccagcgctagcaaaaaaggtatttacccaagtgatgagattgcaaagtataaccagatacttgagcagactagagataaattaacacgagttaatatgtctcttacggctgaagggcgggcgctattagctcaagaggcggcaacaaatagagccaagcaagctgctgatgattttttaaattcactgaaaaatcaaactgaaattataggcaaaacgaggacagagattttagagctaaaagctgctcaacttggtgtgtcgcaacaagctgcgccgatgatcaacaggctaaaagagcaagaaaaagcctttatgaatggctcaatcaccattggccaatatcgaaacgctatgcggcaattgccagcccaaatgacagatattgttacgtcattagcatcaggaatgccagtctggatggtgatgatacaacaaggtggacagataaaggactcttttggtggtataggtaattcattgaaggctgtaacttcattaatcactccgttaaatgtagggcttgctgccgctgctttagccgtgggaggtttgagttatgcgacattcaaagcccagatggtacaggaagcctttaaccgagcattaataacatcaggtaagtatgctgggctttctcgaggggaaattattggttatgcgaacaccattactcaagctgggctaagtgctgattcagccacagaatcacttactaagctattagacgcggggttaaaaataggtgtcgacattggcaaggctggaaatgctattgcggaattttcccgttattcaggtaaaagcattgattcgcttgtctcgcattttgcacgattatctaatgatccgtatggtggttctattgaactaaataaacagtatcgctatttaagcgcttctgtattacagcacattaaagaactagaagaccaaggaaagaccacggaagccgtaacatatgctactgacgcattaagtggagcgatggcagatcgcgcaaatgaaatacgttcaagcatggggacactaccaagcttttttgatgagattggacgtgctgctaataaaatgtgggattcggtgatggggcttggtgctgatccttccaaagctgaacaattagctaaactagaacaacaaataaagtttgctaaatctgatcctcggaggggtacagataaaagaaaagggctttcttataaagatgataaagaattggaacttctagaaaaggaaagggatgagttactaaaatcaattgaagctgataaaaaggcagcagaactccaagagcgtagtattaacaaccaagtatattttaatcaactggttgataaaggcacagataatgccgagaaacgtaggagggagcacgaaaaattaaataaagctatacaggataatattgagctagcgaaaaaaggtgaagtcaaactctggacagatgaacaaataaaaatggccagagaggggattaataaagcctttaaagatcccgttcaacgtaaaccgtcttctcatcgagctgcttttgctgggatacgccgtgacgagggaagtcaaacctatgttctcgcgttaaaagctgagcttgaggttctgagtcaagaaagccgacatataggcacaattagtcagcaacgtagagcattatggcaagagcaagctaagtttcaaattcttgagcaagccaataaagaacgaacactgagcttggaagaacgagccttattagcaagaaaagactcaatattggcagaaaaagaaaaggccgccagtattggagatcagatagagcaacagaaacagttaaatcagttacgttattccaatgatgaccttaaagctgagatcgaactacgcaaagcaacgataggaatgactaacgaacaaatagcacagcaaagagaactactcaaattaaaaatggagtggactaaaaaaggaggggctgaaacggatgaagaatacctacgtggtgtagatttaattcaggaaaaatatgaaacagaaagctggctacgtgagcaatggcgcgaaggagttaagaaagcatatgcagaatatgtgattagtgttacagatgcaaatgcggcagcacaacaattaactaaacaagcttttgatagcatgacggggtcaatgactgactttctaacgaaaagcaaagctagttttaaagattatgctgctagtttctttaatttggcaacaaaaatgatcgtccagcttacaacgataagaacgttagaggctgggcttggtggtacaacacttggtaattttttagggataaaagggcatgccacaggtggctatactggtgatggtggtaaatatgaccccgcaggtgtagtacataaaggcgagttcgtctttaccaaggaagcaacgcaacgattaggcgtggataatctttatcgtctaatggatgagggaaaacgtggttatgcttcaggtggtcatgttggtggttctgctccgatgtcagttacacaaccaaccgcatttatcgctcgcaatcctcaaattgctggtggtgttaatgtcaatatcaaccttggagggattaatattccccctcaaaacggtgagagggagcgatcatcaaatagcggtattagcagtagacaagcagatatgttatttaaaagcaaattaagaaagtttgttgaagaagaaggtagagaagggggaacattagatttattgataaaaacaaaagtaagacgtttttaa

SEQ ID NO: 299701 - DNA, 471 bp, Proteus mirabilis
atgaaaaagttactgtttggctttattttttctttgatatgttcaactcctgcattagcaggatggcagtatactactgatgtggatgagatgagagagaatacatcctattatggtgtgttatctaatgaaactaattcaaaactagatgatgagaaattaaatattattttgtttagccctgatgatgaattaattacctccatggagatacaaacacttaaatcaccaattaactgtactagttctaattgcaaagccttagttaaatttggagataatcctatagaaactattttatatgcagtggtaactccagaacgcaattttattgttcctatcgaatatatggaatttgtaagaaaaataaaaaattcagaagtggtttatattgaactccctattgaaggcaagggaacacagcagtttaaattcaaaacagccggcttaaaatgggaagtagagcaatag

SEQ ID NO: 299702 - DNA, 588 bp, Proteus mirabilis
atgtatatagaattatttgattttagagtgataaataaaatggaaaatgtaaatttctatccttgggttggtgctaattacgaaaatagtatgtttggtataaaaatactcatacttggtgaatctcattacgctgaaaatgatgatgagccagatagtgattggactcaacatgttgtaaaacataacgcccaagatcatcctaatgcgttttttactaaaattactaaagctgtgttagggctatatagtgaagacgaactatcagaagatacacgctctaatttctgggagcatgtggcgttttacaactacgtacagggtattgttggggagtcaggacgaattaggccaacaattgaaatgtgggaagaatcagaaaagccgtttttagccgttatagaatcattgaagcccgatgtagttatagtgttaggctctatgttaggtgaatgggttcctgcgttaaatgataatattaaagtggtctatttgtatcacccatcaactggttattttaattatgaaggcgcaataccagccattaagaaagcaatggacgatgctaaacgagaaagcaattcttaa

SEQ ID NO: 299703 - DNA, 1305 bp, Proteus mirabilis
atgataaataatcaaaaaagaacaaaagtcaggttttctattgcaatattaatgacgcttgctattgcaattaattatcttgatagaacggttatgtcagcagctgcacctacgttatcagaagaactacaaatttctcctgaagcaatgggctggataatgtctgctttctttcttagttatgcattatgtcaaataccagcaggttttatcgccgaccgatttgggcaaagaagaacccttgcgggtgctgtgctatggtggtctatggctacggctgctacagcgttagctaaaacaccattcagttttatatctactcgtattttgatgggaatgggggaggcaggtgcttatccttgtaatagtggtataacagctaaatggtttcctgatagagaaagaggaagaataacagcactatttgacagtggttcgaaatttggtactgcttttgcgatgcctttagttgtctggatcatcgcaaaatggggatgggaatctgcatttattttttgcggtgcattaggattcttatgggtcattgcatggttaaaaatttatcatgatccggaacaacatccaaaagtcagtgaagccgaattaaaatatattcgtgatgggcaaattaaaaaagaaggtatcgataatattcaaccgatgaaatggtatgaactctttcgttatcgtaatgttcaagcaatgtgtatgggctttttcttgctcgattatgctatctatttctttattacatggttccctgcttatttaatgatggaaagagggatgagtttagaagaaatggggtttgctgctatgttaccaccgttatgtggcattgcgggtcaatggctaggtggatttacaacagattatctttttattaaatacaataatatcaacatagcacgaaaagttccgattgttgggggaatgttggtggcaaccagtattgcattctcaggactggtggagtcaacgtcagtgatgatgttcttactttgcttatcctatgccgcattagcttttgctgcttcagcaatatggtctttacccggtgatgttgcgcctagaaatatgacgtcagtattaggtggaatgcaaagtgcggtttcaaattgcggtggtatattggggccaatagtgacaggttatattatcggtgcaacaggctcttttatgtgggcattaatagtatcgggtattgcatgtgcggtaggggcacttatttatttagtgatgttgcgtgatattaaacctattacagccaatgaaatagaggtacaagataataatataaattaa

SEQ ID NO: 299704 - DNA, 1161 bp, Proteus mirabilis
atgaatttacctctgagtacaatcaaaattactgaaattgtggctgtgccattatttggtgaaagcccaaaaggcggatggtccaatgaaattaagccagaagactctattcacgccatcattgctgtccatacggatgcgggaataaccggctatggtagtgtttttactgatggacgactcgctgaagcgggattatcggtattacttcctctttgtattggcgaaaatgcattagagcctgaacgtgtttctgaaaaacttcgtcaacatactttctggatgggacgggggggaacgttaacacataccattagcggcattgatattgcactttgggatattttaggtaaggccagtggattacctgtaagtacactgcttggcggaaattaccgctcgaagatccaaccttattgttctcttttaatggaagagcccgataccatgtttgacgtgatcagccattataaaaaaataggatttaaagctttcaaaataggttggggaccttttggacgaacaaatgataaatcactagatagaaatattattgccgctgcacgagatgctgcaggaaaagaggcacatttattggttgatgctggtgcgagcgatgcatattggaagaatggacttaaatgggctattaacacagcaaacatgctaagtgaatatgatgttggctggtttgaagaagcactacgacctgatgacattgaagattttaaagtactacgtaaagaaagtcctgttcctatcgctggcggtgaagttctcactcgtcgtcagtcttttttaccgtggctttctcaaggtgcattcgatgttgtccaacccgatgtgactaaagttggcgggatttcagagcaacgccgtatcgcatggatggctgatgattttggcgttaaatatgtgggtcatggttggaataccgccatgggattagccgctgatctacaaatggcagcagcactacctaatgttgattttgtcgagtttattggcgggagccaatatatcgatggtattacgactacgccatttagtgttgatgctcaaggttatttggatattccacaaaaaccaggactagggatcgagttagatattgagaaactaaaaaaatataccatcaatccagaaaggttatttaaataa

SEQ ID NO: 299705 - DNA, 714 bp, Proteus mirabilis
atgagtcattcaacaaaagaaaattactggcaacccgtcaaagtaaaaacaatcgctgacgatgtagtggattccatcgtagaggctgctactcggggctttattcttcctggtgatagaattgttgaaaaagaaattgctgaaaaaatgcaagtaagccgtatgcctgtccgtgaagcattacgtgttttagaaagtcagggcatagtcgttagtgaaccttttaaaggtatacgtttagcacccgtttcagagcaacgtcttaatgaattgattgatgtcagagttgtacttgagttatatgcgattagaactttaattaaccaaaaaggacacttagtcgcagagaatattgatttatttaagcaaaaaattgagcaaatgaaaaaggcggcgctactaaaagacaattaccttttttcgcttagtgatgtcgattttcaccgtactatctgtattcttagtggaaacattaccttaacgtcgctttgggaaaatgtagcgaagcaactcaccattgtcattggtatctcaaccttgggcaaaccgatggaagaaattattcatgaacatgaaatattgctcgataaaattatcatcggtgatttacctcaattagaaaaagaatttgaagaacatatttgcgcacaaaccaagcgtgtcgatttttcaacgatcattgataataaaagaaaaaacgataaaactctctaa

SEQ ID NO: 299706 - DNA, 789 bp, Proteus mirabilis
atgatcaacaaaaagaaagttatttttattactggtgcaggagcaggtatcggagaagctattgctttacatcaggcaaaacttggccacgccgttgttatttctgatgttcattttgaagccgctgaaaaagtcaaacataaagccattgcacaaggtgccgaagatattattgcactccattgtgatatctctcaagagcacagtgttattgatgcatttaatcaatgcattagtcattttaatagcattcctactggtatcgttgcaaacgcaggcattgaaattagcaaaatggcgcatgaaatgtcgttagcggaatgggaaaaggtaattaaaactaatctaacagggacattcttaacctgccgagaagcaataaagcatctaatacataacaataccgcgggttcattagtttgtattggctcaccaagtgcaactgtcggatttgcgggtggttctaacagtgcctacggtgcaagtaaaggtggtattaatgcgctcgttaaagctttagcaattgattacgcatcccaccatattcgtgttaatgccattattcccggtgcgacaaatactgaactgttaaaagtcaccaccaataacacgactcattgcgaccttgaacaacgtattaaaacacagatcccagttcagcgtttagccgagccagaagaaattgcacaggcggcaagttggttattaagcgaacatgccagttatattacaggctcaaatttgtatgtggatggaggactaacggcgagaggtgcgaatgatttttaa

SEQ ID NO: 299707 - DNA, 963 bp, Proteus mirabilis
atgaagcgcattgcgtttattggtgaatgtatgattgagcttaacggttccccctttggcgaaatgatacaaacatttggtggagacgtactcaacagcgcactttatttaagtcgcgccctttcttgtcaacaaagcaatcagctagaagtattctttatttctgccatcggagatgatgctattagtaaaggaatgcgtgaacgctggcaacaagagcaaataaattgccaatgggtattagaagataaaaaatatcattcaggcatttatcttatacaaactgacagcaatggcgagcgtactttcctttattggcgcaataattctgcagctagccatttatttcaacatcctaatttccctttactggcaaatgcattagataaattcgatgctatttatcttagtggtatcactttagccatttatagtgatgatgataaaacacaacttatcaacttaattgctcatttagccaagctaggcaaagaaattatttttgatagtaattaccgtccccatctttgggaaaatcatcagacagcaaaatattggtatcaacaattactaccttttattagcttagcgctggttactgatgatgatgaacaaaagctatggaatgacacatccatcaatatgacaatacaacggcttcaccatacaggaataaaacatatcgttgttaagtctggtaaagatggttgttattgttcaggtttccaacctagcatattaaaagtcgctgccacaaaagtggaacatgttattgatacaacctctgcaggcgatgcctttaacgcaggatttttagcaggttatttaaatcaccttcccattcagcaagccgctgaaatgggccatttattagcgggcagagtgatccaacataaaggggcaattattcccaaagaatatactcagcctattaccatggcattttttaataatgagaaataa

SEQ ID NO: 299708 - DNA, 378 bp, Proteus mirabilis
atgtttacttcatccaaagtggcgatacaggtacaaagcgtttacattgagagccaatcttcgccagaagaacagcgctatgtttttgcttataccatcaccatacataacttgaataaacatgctattcgcctcctacgtcgctattggttgatcaccaatgcacaaggaaataccactgaagttcaaggtgaaggggttgttggtgaacaacctctgattgaagctggctcacggtatcgttataccagtggtgcagttcttgaaacgccgatgggcaccatggaaggtcattatgaaatgattgacgcacaaggacgtctgtttcaaattgacatccctgttttccgccttgctatccctacattgataaattaa

SEQ ID NO: 299709 - DNA, 216 bp, Proteus mirabilis
atgcgttttttaagattaccttttatttattggctgctacttaattgcatcccatttattggttttgaactacactcaggcaatataaaaaccggtgtttttttctatttaggtgccctaacgatcatcacttcagggatttggctatttttctgcctttacttttttatcaagcataacacttcccctaacccacatcagccccccgtcaattag

SEQ ID NO: 299710 - DNA, 1035 bp, Proteus mirabilis
atgagaataagaaaaacaaagcttgccatcggtattgttgctgttattgctgttgtatcactagcaatgatcggcaaaaaagagaatgccaataagcaatttctctctgtagcaacggcctcaacaggaggaacgtattacccgatgggagtcggtttagccaatgtttggagcacccaccttaaggatagaggtatacaagtcacagggcagtcctctgctggctcaattgaaaatatctatttaatgcaacaaaacgaagcccagctttctattctacaaagtctactagcggtggaagcttacgaaggtgtgcgtaattttgaaggcaaacctgaaaaaaacctacgttctatatcaatgctttggccaaatgtagagcactttgtcttaatgaatgacaaagtaaaaacgggaacattggatgatattcgtgccaccagtttctctgtcgggccacaagccagtggcactgaacaatcgaccattatcattcttaaaggtgtgaatttaactaaaaaagagatcactcctgaatatcttggttatggagataccgtttcagcaatgcgtgatggacgccttgatgggggtgcattacctgcgggtgttcccgcctctgcggttaccgatatgtatgctagtggtgtgaatgccaaattacttgaagtgactgataagcaacttgatgatattaatcatattgctaactcttggtttcgctttgaaataccagcaaatacctaccctcgccaaacagaaaaagtaaacaccattgcacaacctaatatcttaatgacaaccacaagtattgatgacaagttagtttatgaattaactaaaaccatgtttgaaaacttaccagaagttcatcaagtacatagtgctgcaaaatacatcaccaccgaaaatgcgttaaaaggtgtttctgtgccattacaccttggagcttatcgttattacaaagaaattggattagatatccctgactatttaattccacctgaagctcaaacgcaaactaataataaataa

SEQ ID NO: 299711 - DNA, 1680 bp, Proteus mirabilis
atgaactctcatcattggaattgcggtgctgacttggtggttaagcaattagaacaacatggtgttaaacaagtttttgggatccccggagccaaaattgaccgtgtttttgattctttggttgattcaacaattaaaactattgttgtgcgtcacgaagccaatgcggcttttatggcgggtgcggtaggacgtttaaccggtaaagcgggtgtggcgatagccacttctggtccaggttgttctaatctagcaacaggcattgcgacagcaacatcagaaggtgatcctctagttgccttaggaggctcagttaaatctacggatagacttaaactggtgcatcaaagtatggacacagtaacaatgtttaacccgatcactaagttttgtgctgaagttgattcttcacaatcaatttcagagacattagccaatgcttttcgtcatgcggaatcaggtcgtcccggctcggcttttttaacctttccaatggatatactcaataatgaggtagatagcccgttattaacacctaaatcaaaacctaacttaggcgcggcgagtgatagcgcaattcaagaagcgatcaccttattattacaagcgaaaaaccctgtgatattgatagggcttcaagccagcgatccggaaaatgctattgccttacagaattttcttgatattttccctgttcctattgtaggtacttatcaatctgcaggggctattgctcatcgccattttccactctttgctggacgaattggcttatttaacaatcagccgggggatgagttactagcacatgctgatttagttatcactttaggttatagcccgattgagtatgagccttccttatggaacagtaataatgccaatattattcatattgatgagatccaagctgaaatcgatttagcttactgccctgccttagaattaaccggcaatattaaattaacactgaatgagttaacgcaacaattaactcaccagcctaattcaaaattacaattatctaatcagagccaaggaatactggagaaaatacgtcagcaaagggaaattttgcaacaaaatagttattttagacaaggcacacctattcatcctttaactatcatacatgaaatgcaagatatcattgataacgatgtcaccctttgtattgatatggggagttttcatatttggcttgcacgttacctttatagttttagagcgagacaaatgctaatttctaatggtcagcaaaccatgggggttgcattaccttggggaataggcgcttcttttgtacgtcctagcgataaaattatctctgtttctggtgatgggggatttatgcaatcttcaatggagctagaaaccgcagttcgccttaataccaatatattgcatattatctgggttgataatgcttataatatggtggagatgcaagaagaggtaaaatatggccgtccttctggcgtaaaatttggtcccattgattttaaacgctatgcagaatcttttggtgctaaaggattttctgttgagtgtgcttctcagcttcgtgaaaccttacgtgaagcgatagctgttgatggtcctgctgttttagccattcccgttgattatcgtgataacgataaattaatgaagcacattaattataatttaattatttag

SEQ ID NO: 299712 - DNA, 402 bp, Proteus mirabilis
atgtttagtcaatcattattaaagttaaatatcccttcagagtatgctgttatcggtgaaagcgatatgcataatgaattaggctatccattagcattatcatacattgtggttattatttgtttagatggcagggcggttattaatatagattttcaaacaaaaactattaaagcgaatgatatagtggtagtcggtgatgatagaatggtcacattacaacgtaaatcagctaactttcgtattttttattgttttctgaagaaatcttttgcctctgagatcgcttatgcactttcaaatagtttgtttacatttttgcatgaaaatcccatttgtcgtccttcaacggctcacttaaacgccataaacaagtggttgccgaaagactacgtaaattaa

SEQ ID NO: 299713 - DNA, 882 bp, Proteus mirabilis
atgggcaaaacagactacatactccgtgcattatcaaaaatttcgcataaacgctgggagcactacattatcaatcgggttttccatacactgaatgacccagatattgaattcgtttgccaacagtgcattcgaaaagaaggccacttgggcaaaatataccttgctgatctactttttccacaactgagcctctatcttgagattgatgaagctcatcatgatagtgacaacgctagaaaggctgacgcggtgcgtcgattagatatcgttgaggcaactgggttccaggaggaacggatccctgccagtaacataaccctcggtgaggtaaataaactcgttgatgagtttgtccgcttagtcaaaaacaaaaaagaagatctcgaaaggcaaggcctgttttttcgctgggactatgacgaacgatactcagcaaaaaaacatataaatacaggctacatagcggtgggtcctaactcggttttccgctatcacagagatgctttgcaatgctttggataccgcaaagaggggcatcatcaatcaggtggctggactctgcctgctgaggtcgttcagtccatcggattaacaggccgcgtaatggtttggtttcctcgtttgtatgaggctggagagtggaaaaatggactctcggaagacggcaagcagataaccgaagaaagccttaatgcaacaagaaactatcaggaaacgtgggattaccgcattgttatggctcattcacgtgatgaactaaaccgcacgctgtatcgttttctaggcgtttttgctatcgacagcaaccaatcatctgataaagtcaaagtgttcaagcgcacccacaccagagtcaacgtatacctccctaaaaattag

SEQ ID NO: 299714 - DNA, 288 bp, Proteus mirabilis
atgaaattgggcatatcaccgctagcagaacaagatttagaatcgattggtgactggatagcaaaggacaatcccattagggctctgagttttatcgaggagctgtatcaaaaatgtcttcttattgcagagtccccgaccctctatgcggaacgcccagaaattttaccaggtttaagaagctgtacttatggccgatacctgttatttttccgcgtactggaagctgaagtgcgcatagagcgtatactccacggttctagagacattcctgcgcatttcagttaa

SEQ ID NO: 299715 - DNA, 264 bp, Proteus mirabilis
atgtcaacgagtgtagctttaagtccttactttgaggaatttatccaaagtcagattaagagtgggcgatacaataatgcaagtgaagtgatccgtgcaggacttcgcgcattagaagagcaggaaaatcaatcaaaacttgccacacttcaaacggcaatcgttgacggtattaatagtggtgaaagtaaagatgcgaacgcggtatttggtcggttagccagtaagtatgccacattagctgaggataacggaaacaaatga

SEQ ID NO: 299716 - DNA, 150 bp, Proteus mirabilis
atgccagaaagtaccagtacaattaaaggcaagctttgttcagcgagccgtaaaacaggaaagaaactatgtgtgctgaccgaatctggcattctcatcgaagttaaccaaggcgaaaacgccattgccagatcttatccgccgttataa

SEQ ID NO: 299717 - DNA, 801 bp, Proteus mirabilis
atgaaggaaattattacaggtttgcttctagcctcaataagcttattttctgtatcttgttcgcaagaagatacagatgtcgtcaaagtagcaatcaatactggaccagaccaagtcatttgggatgaggtgatccgtttagctaaacttaccgaaggattaaatgttgaagttgttgcatttaacgactatgaacgtcctaataaagccctagaaaatagagaagtagacgtaaatgtatttcaatctattccttatttacaatcagagataaaagcccacaattacaaatttcatattgccagtaaaacttacatttttccgttagcagcatattctaaaaaaataagcgatattagcgaactcgatcatggtgatgtggttgccattcctaatgaagcaagtatgaaagggcgagctttattgttacttgcagaaaatcatctcatttctctaaaagaaggggtcggttttttaccttccgttgaagacattattgataatcctaatgcattgatatttcatgaagttgaaacccccatgttagttgaagcccttgatgatcccgaggttacgatggcggttatcaacaataatttttcttctcaaattggcttacttgctacccgcgacggtttaattatggagaataaacattcgccttatgccaatgttgttgtcactcgtatagataatatgaatgatgagaaaataaagaaattaattactgttttacattcaagacaagtcgaattaaaggtacaagaaatgtataaaggggacgcggttaaagcgtggtag

SEQ ID NO: 299718 - DNA, 327 bp, Proteus mirabilis
atgtcccctatgaaaaaacatgtaactcctattatcatgttatcaatattactacctgtgttttctgtaaatgcttattatatctatgaaactagctgtgaatacataatggatgataataaatcaatagaaaacaaagaaattatattgaagatatcacactgtccatcaataataaaaaatactaatagcttattaaatattaaaaataacactaccaattcaataaaaaatagcacaatgacatcttttattttagataataataaagtgcttttagctaacaatattgatgagcaacttaccatttcagtacattatcaataa

SEQ ID NO: 299719 - DNA, 816 bp, Proteus mirabilis
atgagttttactgatgcctctctatctacgtcaattcttcattgtaaagataaagttgatctaaaattaattattaatgcaaggcattataaagatgatatttttaaaacaggtattcctggaattggttttaaactatcagttaataaaataccttttaacttagcaggagatgaatttaacgtaacaccaaaatatgcaaatgtctgtaactatcaaactagaaaagaaggctataaatatatatactgtactgacagttggcctcggctatatattcagttaataaaaataggtgaaatagatctcgcatctatgaacgacacatttattatacataattttcttgtctattcattagataataaaaagtttacttataatcatttgattattgagaagcctcagaataaagtttgtgagcttaatattgaccaatctaatattgaattagcgcctgtagaaaaaaacagtttaagtgattcaatacccactaatgaaactcatttttctgttcatgttatttgtaaccaagatacattagtttcattaaagcttgatgcacctgctatttataaaagtagagatactaatttattaacacttcttaataatggcaccccttctggggtcggtttattcattaaatataaagataaaaattattatttaggtaatgctatttataatagcgctcatagttcaccttcaactaaatatactttccctttctcagtagggtatgtgaagatgagcgaaaacatattgcctggcaaggtaacatcacagattaatgtaaacttagagtataaataa

SEQ ID NO: 299720 - DNA, 129 bp, Proteus mirabilis
atgaaaaaagcccgttttactgaaactcaaatcgttaatattttaaaactctctgattctgatatgaaagtggaagatatttgtcgccagaatgggatcagtaatgccacttattataattggaaataa

SEQ ID NO: 299721 - DNA, 807 bp, Proteus mirabilis
atggctgagaaaaagtcctgtgctcaggctttaaacgaggcagggttatcagtcattaaggcttgtctgctcacgtcattgcctcgatccacgttttatcggaagactcaaaattggcgcgagaaggataaaatcgttattgatgctatccaaactgtattagctaaatcacctcaagccggtttctggaaatgctatttccggctacgctttcaaggctatctgtttaatcataaacgagtttatcgcgtttactgtcgactaggactgaacttgaagcgacgggttaaaaaagtgctttcaaagcgtgaaaaaagacccttaaaaattgaaaatgtcccgaatattcaatgggcattagatttcatgcacgatagtttatattgtggtaaacgtttcagaacactcaacattattgatgaaaggacacgtgaatgtttggcaattgaggttgatacatcacttcctgcagagcgtgttataagggtgctagaacgattaagaatggaaagaggattaccaaaacagatccgagtcgataatgggcctgagctaatctcgattaatttattgaattactgcaaaactcaccacgttgagctttgccatattcaacccggcaagccacagcaaaatggctttattgaacgatttaatggctcatttcgccgtgaatttttaaatgtctatttatttgaatcattaagtcaggtgcgagaaatggtgtggttttggcagcaagattataatcagaaccgtactcatgaaagtttaaatcacctcccgccggagacatacagaaaatag

SEQ ID NO: 299722 - DNA, 1425 bp, Proteus mirabilis
atgaaatttagtcataacactttattggaatatagctatctactgattgataaatatccaatgcttagaagaattattgtcgataaatacccttatatttttattgatgagtatcaagatacgcatgagaatgttataaagctagctcgaaaattgcatctatatacacaagaaaaccataaaaaatggctggtaggttactttggagatacaaaacaaaatatctatgatgatggtgttggtggcaatattcaggcaattcattcgaatataataaatattgataaactattcaatcgacgtgctcatttacaacttactaatctaattaacaaaataagaaatgataacattcaacaagtacctattgatcccgatcgaataaatggtgatatccaatttttctatttacagaatccggatgaaaatcatagaacaagtaaaatacaagaatttatagaacagtttaaaaactcgattcctcaagaccaaaaaatagattgcttagttcctgttaatcgttcattagctagtttaggcggatttgaggctgtttataattctgtttatgactctaaaattatttattgggcagatcttaattctcagcttttatcacaccagttagagaaacttcatcctgcggtacttactttttatcatctagttatgctttataaaaaactaagaagtaagaatacgacatattacgagttattaggaaaaacaaacaatgatattacatttgataatgctaagagaataattaatttattggcaggtatgaatgttgcaaatttggaagggttactaataaatatatctcaaattatacaagaaaatgacgctgactatactaattcgacaattcaatactgccttaataactctctttcaataagctattccgatataaaaaaacataattcattttatgaatatgttaaaaatgttatttataaaaatatgtttgaagaacagaatgaaaatgaacagttcaaagaagaaaatgatcaaaagattcaaacaattctgaatgtaaatatggctgaatggttaaattgggtttcatttattaatgaagaaagagatgagaatacaaaggtaatttatcatacctatcatggaactaaaggtgctgaatacgataatgtagccattatcatggagcatagttttggggggattaatactggccgagataagtttaaaaaatatttctctcatattcaatcttctccagaggagcaacatcagaatttgcaggatacagcatataaggagcaattagaaaacactcagaatttaatttatgtggcttgttctcgtgctaagaaaaatcttcgggttttgtatttagatgatatcagcgatattcgagctgggataagtcaattattcgatagaatagatcaatttaattag

SEQ ID NO: 299723 - DNA, 963 bp, Proteus mirabilis
  misc_feature (946)..(955): n is a, c, g, or t
atgaaattatataatttaaaagatagccaagaacaagtcagctttgctcaagcggttaaacaaggtttaggaaaacagcagggactcttttttccccaagacttaccttcattttctcaagtagaaattgatgcgctattaaagttggattttgcaacgcgcagtagtcatattctaagtgcttttattggtaatgaaattcccgctgacgtgttagctgcacgtgtaaatacggcatttgcttttcctgcgccagtgacacaagtggaagatgatattagttgccttgaactctttcacgggccgacgctggcttttaaagactttggtggtcggtttatggctcaaatgttatcagaagttgccggtgatcagccggttacaattttaacggcaacatcgggtgataccggggcagcagttgctcatgctttctacaagttagataacgtacaagttgtgatcctctatccagaaggaaaaatcagcccattacaagaaaagctattttgtacattaggggaaaatattcacactgttgccattaaagatgattttgacgcttgtcaagcattagtcaaacaggcatttgatgatgaatatttaaagaaaaccatgcatttaaactcggctaactcgattaatatcagccgactattggcacaaatttgttattattttgaagccgttgcacaaattccagttgaaaaacgccaacaattagtcatttctgtaccaagtggtaattttggtgatcttacggcaggattactggctaaatctatgggattacccattaaacgctttattgctgcaaccaatgtgaatgatacggttcctcgttatttagacagtggtaaatgggaaccacatcgtacaatagcaacgctttcaaatgcgatggatgtgagtcaacccaataactggcctcgtattgaagagctcnnnnnnnnnncgtcgtaa

SEQ ID NO: 299724 - DNA, 414 bp, Proteus mirabilis
ttgacaacatcttttttaatcgaaaatattgttaagcaagaacaaatttatagtataaagagtctttctgatgatttaattgaaatgaaaataaattattttaaaaaaagtagcgataaagtaaatcaaaatattaccttagctcaatcttttgaaagtaaattatataattttatatatgatactattgctattaataataatattgaaataactgatgataatagtttaaataaaaaaatcaaagagataaaagaacaactaaataataaagaagcaaatctaggagagaaatttctcgatctattgtatcgatataaagttattaaagaagacagcattaatattacgctaaaactaaataaaggagaactagtctcattagatggagaatgctcatataaattttattaa

SEQ ID NO: 299725 - DNA, 135 bp, Proteus mirabilis
atgataaaattagatgttattatttttctgattatctgctattatcttcattgtgtagaaataaacgcttttaacacgacaacatttttccaattaaaaaataccgatactcatttaatgatgatttcaatgtga

SEQ ID NO: 299726 - DNA, 2256 bp, Proteus mirabilis
atggatattaatggtatgtctatgctgaaaagaaatttcaaatactccacattagcgacagcgatttgtctactttataccccaataattcacgctcaagttgagagactgcagactgatacactgacagttattggacaacaagatagtgaagtaacagattttcaatctgtaatagatactcgttcagcacaggcccaaactgcatcaacaacgagtcaaatgttaaaaaacgtttcaggcattacaatttctggtacggggatagctaatggcagtaacgtcatgatgcgtggctataatcaaaaaggcgtgaaaatcttcgtcgatggtattcatcaacctattgataatactatgaacaatcttggtggtctttttattgaaccttcgtttatttcgcgtattaaagttaaacatggtggatcttcagtcgaacatggaagtggtgctctaggcggtgttgtttcgttctcaactcttcatccaaatgagttattaaacgccaacaaaaatcttggagctaaattatttagctcattctcctcagcggataaacatttttcttatggtggtattatcgcaggtagatatcggttagttgaagggctattagcttatagccaaagagagcgaggcccgatacatcttgctgataactcaatgttaaataaccacgaacgcgtcaaaaattattttgcaaaagcctatatttacccgacagaagaacaaacacttattttttctgctcgtcgatataataatgcaggagagcaaagagaagttttagctcgaatggggggatatggaaaaagagacagtaacaatacgtatcgggctactgagcaaaatgatatctcactcacctatcatttaaattcatataattatagttggctcgatctcaccactcaactttattattctcaatttaaaatagcccataaatttctgacagatacacgcaaagaattatatccaagcatggaaagtgtactcggtaatttagaaaaacgcatccaatatacctatggtatgaaagtagaaaacgcctttaatttaaattactttcaagataggttgacccaagcagtcactatcggaatagatgctgaaaaacagaaaatggtatcaaataataaggctaaaaatttccctctatcacatatggatagtacctcaggttgggttaataacacgttaagtaccccactattacccattactttaattgcgggtcttcgttacaactattatcaaaatactcctaataatagtaaaactttagattactacaaagaattaaatacacaaggagacatgacttcccccgataaatatcaaaaaacatatcaaaatatttctaaaaacattgcgttacgcctaacgctgaccaaatggttacaagtctattcttcttattctgtttcctttagagcacctaccttaagcgaaatgtataatgactcagtacatttcactatccctcattatgctatactgaaatatcctttttatatagaaaactttgaagctcgttgggttccaaattccacattagaaccagagacgaatagaacatgggaacatggtgtcattttacagaaaaatgcgttgctttttgccaatgaccagctaaacattaaagcttcttattacagcactgaatcgattgatcacattacctaccaacagtggtatcatagtcgtaaaccaaaacaatcaacaattgataatagtccggcaatttcccccattaaagatcttcgcgaagttgcgttatttcaatcagttaacttgcctaaagcacttattcacggatttgatgtaagattactatattctcatccatacatcgctatggggctgaattacaaccaaactaaaaccttagagctatcatctctagaaaccatttcaatgactcgacctgaaacattaactgcttttataaatgtacccattatcaaaacaccgttttcggttgcttggtcaggaaaatttgccggtccaacagacaaaaaaggtacacatcaataccctggctcaagtgaagtgactactcggttaaaagaaaatcttcagcaataccctggctatggtgtgcatagttttgcagtcaactatcaatccaataataaagatattcaagcctcattggtactcgataatgcatttaacaaagtgtattactcaacggtaggagtacctcaagaagctagaaatatcaaaatgtctgtcagttatcgctggtaa

SEQ ID NO: 299727 - DNA, 363 bp, Proteus mirabilis
atgcctgacttttctgagaagggttggcttgctgacatcgctttacgctatgagctaaagcgaggaaagacatgtcttactgaaaaacgtcatctcggtcctttaatggttcagcgacctttttatccagagcaaggggttgcacacacctatttgttgcatcctcccggtggagtggtcggtggtgatacgttatccattaatattaatgtccaacctcacgcacatgccctattaacgacgccgggggcgacaaaattttatcgtagtgcaaggaggcactgcgttgcaaacgcagactttgacggttgcacaagagggctttttagagtggttacctcaagagaatatcttttttcctga

SEQ ID NO: 299728 - DNA, 378 bp, Proteus mirabilis
atgacattgcctaaatgttgtttttctgtcagtgcgatttcagaaggtaaaagtggacgcgttaaaggggaggtcgcatctgtatggggtaagtcttttttatcactggtttttacgtcggtattggcggtttgtttttctacgctatcaatagtaaaggccaaaggattgcgatctaattcagcgcgctctgccttaaccgcgtttaatgcggcttcaatttcattaatttgtgctgcatttacagtggtattagtgagcgatgttccgttgattgccacattgccattacctgaaataatactatcaatggtggctaatgcgatggtttcatcgttattaaaactagggtaccaatgtttagtatccttgtcatag

SEQ ID NO: 299729 - DNA, 903 bp, Proteus mirabilis
atgatagaaagacttattcaatacgcctactatgaccctaactggtctcatagccaccaagcaatttcattattagacagaactcagcgaaaaacccctgaagactatgagcatgaaatgagaggtcatttgttctgcccttcttgctacacacctatatctattcgcccaatcaatactgaagtgacttcaaatggaagaagaagagcctttttccacctccctagctatagtgaaatatattgcccgctaagaagtagaagtgctccaggtcggcgatatgcaagtgaaaccgaggctcaacaagcaatacagaatcatcaactagccgtaattagcggatttatgaataatgagcctgaaaatcaaaatattgaggaccctgaatatacaggcccaaatgaaaatattgatggccctatcattcaagcaccaataggaagacacagaggggagaattatgctcttccaagcaaaattagtactgtagcaggattatgtagaaattttgacgagaattattataaatacatatacatagctaatagtggtcaagttatacctaaattattcagagatctacttagtgatgttaatgatattgaaggtgaaattgctactccagcattttactggggaaaaattttaaggattgatagattttcaaacactgcacatatatatttcagactaaacactcaaaactcaattagtgatgttcgaataaaagttaaactggatgagctcgatagaaaaaatatcaccgataatcaaccggatcgaattgttattttctatggtccaataaaagaagtcggttctggttactggtcagatgatgttaaatggggagaatatgctttattaccagaacaatataactatcttctaattaccccataa

SEQ ID NO: 299730 - DNA, 330 bp, Proteus mirabilis
gtggattactcatcaatagctgcagggtttaagggattattacagagcacaaacaaaagtcgtgtttcttgctgtgatgatgggataatcattgattcagcggttggccaattaataaaagtaggaagaaaagacgaatacgatttgatagaaaaacactatataaagaatatttcaaaatcagtaatcgcaagggatatgaagtgttcagagggtaaaattagacaaaaactcatgatagctgaaacctttattgatgcttgtttaattatgactggtgcagttttagaaatggatgaatgggcaaataaaacaacaattgatagttaa

SEQ ID NO: 299731 - DNA, 279 bp, Proteus mirabilis
atgaacaaaaatatctgtaaacacgctcaccgatacgaccatttatttacttatctgtctgaaaatcaaggacagactggaagacataaatgtgctggatgcgcatatgaattaggtcggcatcacgctctcattggagcaccaaaagcaaaaaatgactctgttctagcatatacttcggacagtcaagcaggcacagtacgccataaagatgcttttgaggcatacaatctcggttacgattctgtggcagagaacaatatgagattgagtgcataa

SEQ ID NO: 299732 - DNA, 210 bp, Proteus mirabilis
atgaattattattatgttcacaaatacacagataatcatggtgattatgaggtgcataaggaaggctgcaatcatatgcctgatttattaaatagagagtatttaggcatattttctaattgtgctcaggcagttgctaaagcaaaaattaatggttacagaactgctgatggttgttattggtgttgtagagagtgtcatacatcataa

SEQ ID NO: 299733 - DNA, 1023 bp, Proteus mirabilis
atgcaattatacaataatgatgcattagctatattaaaaacattacctgacaattatattgatttaatcgctacggatccaccgtatttcagagtgaaatcgtgtgcatgggataaccagtgggataatgttgaggcatatctgtcttggcttgatgaggtactagttgaattctggcgagtattaaaacccaatggcagtttgtatttattctgtggttctaaattggcatcagatactgaactgcttgttcgcgggcgatttaatgtattaagccatattatttgggctaaaccatctgggccatggaaaaaacaaaataaggaaagcctacgcacctttttcccttcaacagagcggatactctttgctgaacattatcaaaagccaatcaccgctaaaggttctgaattttctttaaaatgccagaagttaaagcaaaacgtatttaagcccctgattgattattttagaaatgctcgtttagcactacaggtgagttctaaggagataaatcaagcaacagataagcaaatgttcagtcattggttcagcaatagtcagtggcaattacctagcgaggaagactacaaaaagttacaaacactgtttacacacattgctgataaacaagaaaagttatcgccgttatcccgccagtttaccgaattagagcgcgagcaggttacattacaaaaagactatcaagaattaataaaagaatatggtttattaagacgaccattctttgtaactgtagatgtaccttacaccgatgtgtgggattatccacctgttcagtattatcccggtaaacacccttgtgagaaaccatcagccatgatggaacacattattcgctctagcagtcgagagggtgacttagtagccgatttctttatgggatcaggagcaacactgaaagcagcactaaaacttaatcgaaaggtattaggtgtggagcttgagaaagagcgttttgagcaaaccgaacaagaaataaaagcatcaattcgtaagtaa

SEQ ID NO: 299734 - DNA, 303 bp, Proteus mirabilis
atgaataaaaaaatatcaaagatagttggtgcaagaataaaaatattaagacaacaacatggtatgactgggggagagcttggtgctttattaggagtaagccaacaacatcaatcacgctttgaaaatggagagtgtaatattcatgtagatgttatttacttattatcttatatttttaaagttaaattaaattatttttttcaggatataaatgatagttttgatcaagaaggaatagcctataaagaaaattattatcattctgagacgattgttgaaaaatgtgaaccatggcgttaa

SEQ ID NO: 299735 - DNA, 681 bp, Proteus mirabilis
atgtattctaacccattacgtgttttagactctaaaaatcctgaaattcagactttattgaatgatgcgcctgaacttttcgattatcttgatgacgaatcaagagaacactttgatggtttatgtgcattacttgatgctgtaggtattacttatcgtgtgaatcagcgtttagtacgtggcttagattattataaccgtactgtttttgaatgggtaaccagtgcattaggttcacaaggaacggtatgtgcaggtggtcgttatgatgggttagtgaaacaattaggtggacacccaacacctgcggtcggttttgccatggggatggagcgcatgatcttattagttcaagcggttaatcctgagtttgttgctgatactcatgtcgctgatgtttaccttgcgtcttttggtgataatagccaaagtgcagctctcatgctggcagaggagatccgtgatcaattacctacattgcgcttaatgaccaatcacggtaaaggcaactttaaaaagcaattaggacgtgctgataaacatggtgctaaaattgcattaattttaggtgaagatgaaattaacgctggcacagtagccgtgaaagatttacgttcaggtgaacagaccattgtatcgcgtagcgaactggcccaacaattgacgctgttattaggttaa

SEQ ID NO: 299736 - DNA, 840 bp, Proteus mirabilis
gtggcagaagaagtaggtattgaaggacgctgggggtatttcgatcaagcgggtcaaatgcgtgatatggtgcaaaatcacctattacaaattttgacgatgattgccatgtcaccacctgctgatttaacggctgatagtatccgccaagaaaaagtgaaagtgctacgctcgttacgtcgtattgatatgactaatgtccgtgaaaaaacggttcgtgggcaatatacggcagggtttgtacagggtaaaaaagtcccgggctatctggatgaagagggcgcgaataaagccagtaatacagagacctttgtcgcaattcgtgctgatattgataactggcgctgggcgggtgtaccgttctatttaagaacaggtaagcgtatgccaagtaaatgctctgaagtggtggtctactttaaaaagccagccttgaatattttcagtgaaacctatcaagagttaccacaaaataaactgactatccgtttacagcctgatgaaggtattgatattgaagtgctaaataaagcaccgggtcttgatcataaacatcgcttacaaaccactaaattagacttaagtttttccgaaacttttaatcaaactcacttagctgatgcttatgagcggttattgcttgaggcaatgcggggtattcaagcactatttgtccgtcgtgatgaagtagaagaagcatggaaatgggtcgattcaattatcaatgcatgggaatgtgataatgaattacctaagccataccaagcaggaacatggggaccggttgcatctgttgcaatgatcacccgtgatggtcgctcttggaatgaaattgagtag

SEQ ID NO: 299737 - DNA, 861 bp, Proteus mirabilis
atgaaacggatattagtcgcgggagcaacaggatatttgggtggttttttagttcaagaattaaaaaagcaaggatattgggtacgtgttttagtcagaaatcatcaacaagcgacaaagtttgcggatgttgatgatatattcatcggcgagatcacaaaacctgagcaactttctttaatagctcaaaatattgattgcgtgatatcaacggtagggatcactcgacaaaaagaagggttaacctatatggatgtggattatcaggcaaatgctaatttattagaagaagcgattaaatcgaaggtcaataaatttatttatatctcggctattgatggcgaaaaacaccgaaatttaaaaatttttcaagcgaaggaacgctttgttgataaattaaaacaagccaatttagcatactgtattgtaaggcctaatggctattttagcgatatgggtgattttttacagatggcggcatcgggtaaagtttatctatttggtgatggcgaacaaaaaataaatcctatctctggaaaagatttagcgcaatttattgtcgagaaaatgacaacaaatataaaagaattcactgtaggtggaccggatattttatctttgaatcaaataggtgaactagcaggaaccgcattagataaaaaaattaaaataatccatttaccagatactttaagaaaaataactatttttatattacgtcattttacgagtcaaaaattttatggaccattagagttttttttaactttcatggcaaacagtcatattggtgtgtgttatgggcatgatcatttgtcaaattattatattgaattagctgagcaaacgaagaaaaaatag

SEQ ID NO: 299738 - DNA, 1716 bp, Proteus mirabilis
atgaacataaaaaataaaatttactgtatcattggaattatcattttttatagcttctttttgccaactcaagcggcagaaggaaaggttatttatacacatcaggttaaaaaacctgatgtttttgttgcggtaaatacacatattgaacagtttttcctagtgctatcagataaattaaataaaccttttattctaagcagcgcagtaaaaaaagagcggatcagtggaaaatttgatatttcttcacctgaagatgcctttgaattaatggtaaaacgtttgtcattactttattttaatgacggaaaatctatttatatttatcgtgataatgagatacagcaacagctatttcaagtgaaaaatatcagcttgagtaaactgaaagagtatctacaagatgtcggattatatgatctccgctatccattacgtgcagggtatgatcagcgtactttttatctctcaggtccccctatttatattaacctagttaaagctgctgctgagcttttggataatgatgtacaagaacaaattaatgaaaatatcaataatcaagtgccaacaggaagctctcgttatggtgatgagtttgtgcagatatttccattaaaaaacacttttgtacaagatagaacctatatattacgtgatgaaaaagtcgttttaccgggtataacaacagttttacaacagctatttatgtcatcgggagaaaaagaaaaaacagtcagaagagcacgtgagattatcgaagataatgacaaatatcaggatgataaaattactgatgatatacaagatactcattcaccgattatcactcaaatgggcaaatataatgttgaactcgttcctttaccgggatcaaatagcctgttggttaaaacgagtcgagaaggtttagctttagttagctcacttatttcacaattagataaaccgaaaagacaagttgaattgtcattatggataattgatatttctaaaagcaaagcagatagtttgggggtgaattggcagggaagttatggctcgggtaaaaatacatttttctttaataccgctagcttaagtgctgtatctggttttagctttttaagtaaaatcaaagcattaagtgaagagggggaagctaaaatggtttctcgtcctattttgttaactcaagaaaatacccccgccatatttgataataacaccaccttttatacacaaattaaaggtgagcgagttgcttcattagaatctacgacatttggcactatgatcagtgtgttacctcgtattagtaatgctaatcaagagattgagatgattatcaatcttgaagatggtgctgagaaaaaaagtgatgatgaagatagagaagaagggattgaaaaattaccggttattaatcgcacaaatatcagcaccgttgcgcgagtttctgaaggtggtagtttattaattggcggatatacacgagaagataacataaaagcagaaaacaaaattccttttttaagcgctatacctttacttggccgagcattcagttatcagtcagataataataaaaaaatggttcgtatttttatgttacaacctcgcttattggataaaactgatacgcacacattggactctttaactgaacacccatttttaccaatggataaaaaaacatctcaagcgctaaaacaaattcaggcatttatgaggtga

SEQ ID NO: 299739 - DNA, 483 bp, Proteus mirabilis
atgacagcagttggcactaattttgatattaatcaacaaattttttatataaaagaggggagtggaacattagaacatctgattattaatgaggcactgaaagatgaaagccaattagaacctctttttgtgacaataagacacagtgaaagttactggcttatattacatctgattagttatttggatgagaaaaaaagcaatattgcacaaataggtgaacgatatggtgtatcagggacacattttagacggctgtgtaaacgttatttaggtaattgtggtaaaagtcaattacggtcatggcgtgcggcatcttctattttgacaacgctatcaacagatgaatcattgactcagattgcagtcgataatggttttagttcagcatctcatttttctaatgaaattaagacattatttggtattacaccaactgaatttcggcgaattggccaatatctttatgaacataaaaaataa

SEQ ID NO: 299740 - DNA, 390 bp, Proteus mirabilis
atgatagaaaaagcagaaaaaggtgaagacatagaattatggggggatccaaattattcaaaagatatggtttatgtggatgattttagccaaatgctctgtaaagcggtattagtggatagggatcaaggattttacaacataggaacaggtattcctgtaacattaaaacaacagatagagactattatagaagtattctctccacctgaaaaaaaatctaacattatttacatgccacataaaccatatggtggtggttttctaatggatatttcaaatgctaaaagcgaattagggtatgaacctaaatatgattgtaaaaaactttttgaagcatataaggttgaaatgaacattaaacgattcgatcagcttcgtgttaagtaa

SEQ ID NO: 299741 - DNA, 393 bp, Proteus mirabilis
atgaagcgtgttattacgtttggcacatttgatgtatttcatgtaggtcatgtaaatatcttagaaagagccgccgcattaggtgactatctaattgttggaatatcttcagatcaattaaatttcagtaaaaaacaaagatatccaatttatagtcaacaggatagaacaaaaataatttcatcattaaaatatgtaaatgaagtatttttagaagaatctctagaactaaagcttgaatatataagaaaatataaagctgatattttggttatgggggatgactgggaaggaagatttgattgggtaaaatctgactgtgaagttatttatctcccaagaaccccatcaatatccacaactgaaattattgaagttgttaaacaacagtaa

SEQ ID NO: 299742 - DNA, 861 bp, Proteus mirabilis
ttgagttcatctaaagcgatttttttaagccatggaattggtggtttaccgatttcctgtatactaacgactagggttcaactttggcacggatatcctctaaaaaaaatccttcttaaaagtcaatttgataccagaaaatatcaatcaaatctactgaataccatatatttattactatataaattaagaatcaagcttagctattcatacttaattacatcgaattcaatattagggaatgaattagtcgagagctttaattataaaactaataaaattcttttttatggaagtccttctcaggaaaaagctgaacaaacaaaagtaaaaaataacaatggtagttataaaatattgtatcttcctacatggagagatggtagcgatgatattataaaaattgtaagttcacttatccagtcattagattatcacttcatgcatgagaataaatttaaacttgatattaaactacatccatatgatatgattaaaataaaagaaatagataaaaatgaatatataaattttatttctcatgatgtagaagatatgatcgaattttatagtgattatgattgcctgataacagattattctagcgcttgctttgaatacgcccctataggtggaaaagtgatatttttcactcctgatttagaaaagtatactaatcagagaggattcactataaattacaatgaattaactcaaggtaaaaacacaaataacacaaatgaattaaaagttgctataatgcgagcaaagaataataacgaatattcattagattataaaaaatatgttggtgtgagtgataactgtatggaattaatttatgttaaattcaatagatga

SEQ ID NO: 299743 - DNA, 222 bp, Proteus mirabilis
atgagtaatcaaaacttagaagtgttagctagtgcactgtcagcacaagtagaacgacaaggacagcaaatagcagagttacaaaaacagctcgctagtatgcaattaacgagctgtgagttagaggctattaagaatgccacgctcatggctatttctaataactctattgaaataaaagaaagtaatggtgctactacttgccagttaaagcctttttag

SEQ ID NO: 299744 - DNA, 237 bp, Proteus mirabilis
atggaatatgaatttgaaaaaataaaagatccacgaattaaggcagaagaaatggcgcataccacacctctgctattttcattgttagcaaaactaataactgataatgataaaaataaagaagaacgcctattcagaatgttagataaatctctagaatggaatgaacaactaccagttaaagagcaaattgcgttagtaggtcaagtaactaaaaaggctttaactggcaagtag

SEQ ID NO: 299745 - DNA, 270 bp, Proteus mirabilis
atgcgcatggacaaattaaccaatgctacctacggaacagctggcttaactgccttttttgcaagtctctcattgtatgaatggggctttgtaatagggatgggatttagcatgcttcttggattagcaacttatctgatgacacggcgagaacagcggaaacgaacagcattatttgctgaattagttcatcgaaattgttctagtgatccacaagacatagaaaagatagtcggcgagatgctgactaaagctaaaaaggacatttaa

SEQ ID NO: 299746 - DNA, 471 bp, Proteus mirabilis
atgaacctaaaacagaaagtgactgcagttgcgagtgctggtgcggtaagtattgcgataacagtgattggttactttgaaggtattcgttatgaaccttaccgcgatgttgctggaattctgacggtttgttatggacacactggaaacgacatcattcaaggtaagacatacacacaacgagagtgtgacgagttactgcagaaagactttatcagaacgcaacagcaagtcgatattctggttaaagtgccggtcgatgataaaacaaaggcgtctctatattccttcgtttttaatgtgggtaccacggcttttgcacgctctacattgcttaagaaattaaatgctggtgatcagaatggtgcctgtgaagaaatgaagcgctgggtttatgcgggtggcaaggtatggcgagggttagtcagtcgtagagaggcggagtcagcactatgtcatggaaaactttaa

SEQ ID NO: 299747 - DNA, 159 bp, Proteus mirabilis
atgtcatggaaaactttaatcatcattaccagctttatcctcatattactcatcaccgacgctggtggtatttatctcttgattgataactcatgtactaaagaccaagttagtttagaaaaacgttgtcagattgcactctcacatcatcggtactaa

SEQ ID NO: 299748 - DNA, 465 bp, Proteus mirabilis
atgaaatacaggaaactctatgccgtcattgcgatggtaggcattattgtgggtggctattgggtgattaacaggcaagctaacaggattaattcactgatagataccaacaaaaaactgacagtggctcttgaagaacagaagtctattaatactgattatcaagcacgcataatgcggttaaaccaactggatattcaatatacgcaggagctagcgaatgctaagaatgaaattagtcgcttgcgtgatattagtgagcgtaatcttgagcgggtgtatatcaaagccgagtgcccaaaaagcaaaaccactccctccaccagcttggcttctgcaaccaccgccagacctactgacaccgctatccgaaattattggttacttagagagcgaattgcagagtcagagcagatgattaaagggttacaagattacatcaggcaggagtgtgtaggtgattag

SEQ ID NO: 299749 - DNA, 582 bp, Proteus mirabilis
atgaaaacatttcatatagatcctgtgactttaactttaattaacgcaataaaagacccgcgagttaagcaaaaattacacgaacttaatttatatttctataatcgaaaacatgagaatcaaattagggatgaaattaccattgttatcaatgagaactctgattacttagcaatgacagaacatccaaaaagtaggaatggtgcagtggacttatctctttattcgttgaataaagatgaatctagtttgattgctactattgaatttaaacatcattatccgaaagatctaaccataccggcggttcaaaataacattatttctgacttaactcgtaatttatccagtcaaacaagccattttattcacattattcaacaaaggaaaatgcataaaaaaccgcccgttagtaacgtgaaattcttgcaaagaaattctgacgatattgcttattatacatgccttttagagggcttagataaattcccgttaaaatacaataaaaacagactctcaataaccgtgaaatcagaatttgttgagtccacttatactttcgatatctactctcttatgtaa

SEQ ID NO: 299750 - DNA, 219 bp, Proteus mirabilis; identical to SEQ ID NO: 294591

SEQ ID NO: 299751 - DNA, 2025 bp, Proteus mirabilis
gtgttccatgtgcaatcttcaggtaaaaatgaagtttccggtgccaatgtgctagtggcgatttttagtgagcaagagtctcacgccgcttatctactacgtaaacatgatgttagccgtcttgatgtggttaattttatctctcatggcattttaaaagatgatcaacaaaacagtgatgatcagtctgatatgggcgatataaatgcacaatctcaacaagagatgccacaaggcgatgatcgcatggataattttaccactaacttaaaccagttggcgcgtcagggtaaaattgatccgcttatcggccgtcaagcggaattagaaagaacgatacaagtcttatgtcgtcgacgtaaaaataacccattactggtcggtgaatcgggtgtcggtaaaacggcaattgcagaaggactcgcatggcgtattgaacaaaatgatgtgcctgatgtgatgaaaggctgtacgctctattcccttgatattggatctttattagcaggaaccaaatatcgtggtgatttcgaaaaacgctttaaagcgttattgaaaacacttgagaaagatgaaaaaagtatcttatttatcgatgaaattcataccatcattggtgctggtgccgcctctggtggacaagttgatgccgctaacttaattaaaccactattatcaagtggtcgtattcgtgttattggttcaaccacttatcaagaatttagtcagatctttgaaaaagatcgcgccttggctcgtcgtttccaaaaaattgatgtaattgagccttcggcagatgaaaccgtattaattattaagggattgcgtcagaagtatgaagcacatcatgatgtgcgttataccaataaggccattcaggcagctgttgatttatcggttaaatacattactgatagacaccttcctgataaagctattgatgttattgatgaagccggtgctaaaacccgtttaattgcaccaagtaaacgtaaaaagacgattaatgtctctgatattgaatcagtagtagcaaaaattgcccgcattcccgaaaaaacggtttctagcagtgataagtcaatgctgaagaatctggataaccaattaaaaatgttggtgttcggtcaagatcaagccattcatgccttggctgaatctatcaaaatgagccgagcaggtttagggcaagagaataagccggttggctctttcttatttgccggacctactggggtgggtaaaacagaagtgactgtccagttggcgaaagcgcttaatattaaactactgcgctttgatatgtctgaatatatggaacgacatacggtaagtcgtttaattggggcacctcctggttatgttggttttgatcaaggtggattactcacagatgcggtgattaaaaatccttattctgtggtgttacttgatgagattgaaaaagcacatcctgatgtgtttaacattctgctacaagtgatggataacggaacacttaccgataataatggccgtaaagctgattttcgtaatgtgattttggtgatgacaaccaatgcgggtgttcatgaaacgcaacgtaaatcgattgggtttactgagcaagatcatagcactgatgctatggttgaaatcaaaaaagcgttttccccagagtttcgtaaccgtttagatggcattatttggtttaatgcgttatcagccgatattatttctatggtggttgataaatttattgtcgagttacaagctcaattagatgataaaggggtatcgctagaggtaagtcaagaagctcgtcaatggttaagtgataaaggttacgataaagctatgggggcaagacctatggctcgcgtaattcaagaaaatctgaaaaaaccattagccaatgaaattctgtttggctcgttagttaatggcggatcggtttctgtgaccttaaatgaccaagaaaataaattacagtaccaatttactagccaagaaaaattggctaaaaaagaagataccgttatttaa

SEQ ID NO: 299752 - DNA, 2712 bp, Proteus mirabilis
atgatccaaattgatctctctactctcgttaatcgattacacccaatagctaagcatgccttagaaagtgcagcggcttactgtgtaagccaccagcagcctgaaattacgattgctcagtttctacaaaaactgatagaaacgccattaactgacattcgtatgatcagccaaaagagcgcattagatattaatgcgttatcagagttattagatatcgacattccgccacatcaagttattacacaaagttatcctagtttttcacccttattagttgaatggatgaaagatagctggctattagcgtcaactgagctaaatcacagtgaacttcgctctggtgcattgtttttaactttattacaaatgcctttgcgttatcttgcgaaacctgtcgccgatatgcttgcgcagattaaccgcgaccaattaaaactcaattttgatcaatggactgaaggctctgctgaatcgccttttgacgaaaaaacagtatcagaaaaaggtaaccttgccgctgattcattgttagcgaaatttactcataatatgactgaacaagcgcgaaagggtgagttagatccggtcttatgtcgcgataatgaaatcgacttgatgattgatattctgtgccgtcggcgtaaaaacaatcctgtggtagtcggagagcccggtgtgggtaaaagtgcgttaattgaagggctggcactgcgtattattgccggagatattcctgataaattaagaggttgtgaacttcttactcttgatttaggcgcattacaagcaggtgctgcagtcaaaggcgaatttgaaaaacgctttaaaggcattatgcaagaagtcactcaatctccccaccctatcattctatttattgatgaagcacataccctcattggtgcaggtaaccagcaaggtggcttagatgtttctaatttattaaaaccggctttggcgcgtggagaactacgcactatcgcagcaacgacttggagcgaatacaaaaaatattttgaaaaagatgccgcattagcgcgccgtttccaattagtacaagtcaaagagccatcatcggcagaagccattatcattatgcgtggcttgcgtagtatctatgaaaaatcccatcatgtctttattgatgatgaagcactgcgagcgagtgctgaattaagtgaacgttatatctctggacgtcaattaccagacaaagccattgatgtattagatacagcctgtgcaagagccgcgattaatctatcttcgccaccaaaggcattatcctctttgaaaacagaactccatcaaatcaatatggaaacggatgtattacaaagagaacactatttaggtttagatgatcattctgagcgtcttgaagcgttagcctcacaagcaagtgctattgagcaacaagcaactgatttacagcaagcatgggagcaacaaaaagagctggtatctcaaatcattacgttacgagcaacattacttaataatgctactgaagcgactaatgacgatgttgcaaataatgaagtagtcagtgataaaagaacggatagcgaagcagaaaatgctgaagataatgaaagcaatgaaagcgacgaaatagcagcacagcccccctgctcatctgaagaattaaagcaacaattacaacaattagataaacaacttgctcagttacacgacacgcatttactggtttcgccccacgtcgataaaaaacaaattgcggcggtaattgctgaatggacaggcgtaccattaaatcgattatcacaagatgcattatcaattgtcactgagttgcctacctacctagaagagagtatcaaaggccaatcattagccattcaatgtttacacaaacatttactcactgcgcgggctgatttacgccgaccgggtcgaccgctgggggctttcttattagcaggtcctagtggcgtgggtaaaacagaaacggttatccaaattgcccaattaatgttcggtggcacacaatatctcacgactattaatatgtctgagtttcaagaaaaacatactgtttctcgccttatcggttcacctcctggttatgtgggatatggtgaaggagggatcttaacagaagctattcgtaaaagaccttactcagttgttttactcgacgaagtagagaaagcgcatcctgatgtactaaacctattttatcaagcttttgataaaggagagatcgccgatggagaaggacgagtcattgattgtaaaaatatcgcatttttcctcacctctaatttaggtgaccatgttattagtgcttacgctgataaaccggacgaactagaagatgcactctaccccgaattaacaactttctttaaaccggcattacttgctcgaatggaagtgatcccttatttaccgttgcctgcagaggttttacgacaaattgttgatggtaaattagctcgtcttattaacctattaaaacagcgtttcaacgcagaaatccatgtagaagagagtgttgctacggaaattttacacagagcttctcgtgctgaaaatggtgcgcgtattttggaatctattattgatggtgcgttattgccgcctctttctttgttacttctacaatatagtgcacgtaatgaagctatctctcatattcgcttagcaactgaaaatgatgagtttattgcggaggttaattaa

SEQ ID NO: 299753 - DNA, 2376 bp, Proteus mirabilis
atgtccagcaatagcctcaccccgtgcaatgtactttggtataaccaattgggtatgaatgacgttgatcgtgttggtgggaaaaatgcttccctcggtgaaatgatcactaatcttgcggaactgggtgtgtctgttcctaatggatttgccaccacagcgcaagcgtttaatgattttctggaacaaagtggtattaatcagcgtatttatgagctactcgatagtattgatgttgatgatgtcaatcaattagcacaagcgggtaaccaaattcgccaatgggtgattgatacaccttttaccgctcagtttgagaaagatattcgtgatgcttatcagattttaagtgaaggtgaatctgaagcgtcgtttgcagtacgatcatcagcaaccgctgaagatatgccagatgcttcttttgccggccaacaagagacatttttaaacgttcaaggtatcgatgcaattttagttgcgattaaacatgtgtttgcttcactgtttaatgatcgcgcaatctcttatcgtgttcaccaaggttacgatcaccgcggtgttgctttatctgcaggcgtccaacgtatggttcgctctgatttggcctcatcaggagtgatgtttactattgatactgaatcaggctttgatcaagtagtctttattacctctgcttatggcttaggggaaatggtggttcagggggcggttaacccagatgaattctatgttcataaacccactttagcgaaaggtttaccggcaattgtgcgccgtaacttaggttctaaaaagatccaaatggtttatgctgatagtgttgagcatggtaaacaagtccgtattgaagatacgccagacgcattgcgcaatcgtttctctttaaccgatgatgaagtgcaagagttagcaaaacaagcggtattaattgaacaacattatggacgtccaatggatatcgagtgggctaaagatggtcataacggtcgtctatatattgttcaagcgcgtcctgaaaccgttcgttctaaccaacaagtcatggaacgctatcagttaaatgaaacaggcactgtgattgtagaaggtcgtgcaattggtcatcgtatcggatctggtacggttaaggttatccataacttaagtgaaatggatagaatagaggcgggtgatgtgctggtcaccgatatgacagatcctgattgggagcctatcatgaaaaaagcctctgcgattgtgactaatcgtggtggaagaacgtgtcatgcggcaattattgctcgtgaattaggtattcctgcagtggtaggttgcggcgatgcgacagagtgtattagcgaaggacaagtggttacagtctcttgtgctgaaggggataccggatttgtttatgatgggaaactcgatttttctattcaaagctccgcaatcgataacatgccagaacttggcttaaaaattatgatgaacgtcggtaatcctgatcgtgcctttgactttgctgggttaccaaatgatggggtaggccttgcacgtttagagtttattatcaaccgtatgattggtgtgcatcctcgcgctttactcgaatacgaggatcaaacagatgcactaaaagctgaaattgatgaaatgatggcgggttatgcatcacccgttgaatattatattggtaaattgaccgaaggtatcgcaacactcgctgccgcattctggccaaaacgtgtcattgttcgcttgtctgattttaaatcaaatgagtatgcaaacttagtgggtggcgatcgttatgagcctgatgaagaaaaccctatgttaggtttccgtggtgcgggtcgctacgtatcggatgatttccgtcgttgttttgctcttgagtgtgaagcagtgaaacgtgtgcgtaatgagatgggattaaccaacgtggaagtgatgatcccatttgtacgtacggtgcgccaagcagaagaagtgatagatgagttagcacgtaatggtttaaaacgtggagagaatggcttaaaagtgattatgatgtgtgaaattccatctaatgcgctattagctgatcaattcttggctcactttgatggtttctctatcggctctaatgatatgactcagctcacattaggcttagatcgtgactctggtgttgtctcatcactgtttgatgaacgtaatgatgcggtaaaagcgctattatctatggcaattcaatcagcgaaacgtcaaggtaaatatgtcgggatctgcggacagggcccttccgatcatgaagactttgcacaatggttaatggaagagggtattgatagcttatccttaaacccagataccgttattaaaacctgggtgaaattagcacaacaataa

SEQ ID NO: 299754 - DNA, 954 bp, Proteus mirabilis
atgaccaacaaattaacttctttgcgtaaactgaccacagttgttgctgacacaggtgacattgcagcaatgaaactgtatcaacctcaagacgcaactaccaatccttctttaattttaaatgccgctcaaattcctgaatatcgtaagttaatcgatgaagcgattgaatgggcgcgttcacaaagcgattctcgcgagcagcaaatcgttgatgcgtgtgataaactcgctgtcaatattggtttagaaatcttaaaactgatccccggccgtatttcaacggaagttgatgcacgtctttcttatgatacacaagcttgtatcgtcaaagcgcgtcgtttaattaaattgtataacgaagcgggtattagcaacgatcgtatcctgattaaactggcttctacatggcagggtattcgtgctgctgagcagttagaaaaagaaggtatcaattgtaacttaactctgctgttctcttttgctcaggctcgtgcttgtgctgaggctggtgtatacctgatctcgccattcgttggccgtattatggattggtataaagctaatacagataaaaaagagtttgcacccgctgaagatccaggtgttatttctgtgactgaaatttataattactataaagagcatggttataacacagtagttatgggagcgagcttccgtaatattggtgaaattttagaattagcaggttgtgaccgtctaactatttctcctgctttattgaaagagttatcagaagctcaaggtgaagtggagcataaactatcattcaatggtgaagttaaatcacgtccaacaccgattactgaagctgagttttattggcagcataatgctgatccaatggcagttgataaattatctgatggcattcgtaagtttgcggttgatcaggaaaaattagagaaaatgattgcagatttattataa

SEQ ID NO: 299755 - DNA, 528 bp, Proteus mirabilis
gtgattgatgggggaaaaggtgacgatcatattgttgtcaatgaagggcatcatattttaattgctggagaaggtaatgataatcttaatggcggaagtgggcatgatctgtttatttctacttcggggaatgattatctaagtgggggaagtggtaataatgtttatatggtgcaaaaacgtcatggtgaagtgacggtgtatgatgaaggtgaaatgagccatatttttgtatcaggattatctgaacatgaaaagttaatatcttcccaagtcggtgaagattggcagtaccgaactaccgataatcagtttattttaactgttaaaacaaaaggcgcaagcaagactggaaatagcactgtgcaggttattgaaaagcaacatatcttgtcaccacagtctcttgcggcaattattcaacagatggcaatatttaatcaacaacaactagccactatgcagggaagtgaagttattccatcgtcagcttggtcacctctcgccatggttgttgagcatttataa

SEQ ID NO: 299756 - DNA, 573 bp, Proteus mirabilis
atgactttagaaatcgaattaggctgtactggtggtgaagaagatggcgttgataacacaggtatggatagctctgcgctatatactcaacctgaagacgttgcttacgcttatgaaaaactaaatgctatcagccctcgtttcactatcgctgcatcatttggtaatgttcacggcgtttataaaccaggtaacgttcaattaacgccaaaaattcttcgtaactcacaagattatgtgtcagagaaatacaatctgccacacaatagcttaaactttgttttccacggtggttctggttcatctgcagaagaaatcaaagaagctgtaagctacggtgttgttaaaatgaatatcgatacagatactcaatgggcaacttgggacggtatcttacagttctacaaaaagaacgaaggctatttacaaagccaattaggtaatccagaaggcgctgataaacctaacaagaaatactatgatccacgtaactggttacgtcatggtcaaacatcaatggttgttcgtttagagcaagcatttaaagagctaaatgcgattgatgttctgtaa

SEQ ID NO: 299757 - DNA, 1128 bp, Proteus mirabilis
ttgaaaacgataactattaaaatcagtctttttgtattgtcactgtttttccctctcctaacaaaagcacttgttattccagataatggaacggggtatataggtgaattaacaccttctcaatcatatatgtcacttagtagtagtggtagtcgctatggagcggctgtaggtgttaataatgttgtagattattgtagtaaaaatagtgcacaatggcagagttttttattcccatttccaggaagtcaagagggggagtacggattaaaattatataataaaaatgcaagcgaagcggaaaatagggaaaattatttagttgcggctatcaatggaatagtatctatcgatgctatattttatcagaatggattatcttccccgacaagaattaccctgcgtcgaggaaaagaggtttctagaacagctgagtatgcagatcaatttgtctatcgtcacccaatgtgctggtatggttatatatctcgtgtaagagatactagcttgagaataagttcttattctatttatgctgtaggccatgttaaacccggtatttacgattttgttgctccgatatattttactacagctcaaacagcaacctcaggtggggctaatccagatctatcttcagttcctttttcatttggtaatggccctattcacgtcttaaaaacatgtaatgtgtctcctgctagctcaacaaacatacaatttcccgctcaactagcacaaaattttaagtcagccaagttacttgagcaaaatgtcgctagtatgcttgtctcttgtcctcattcaggaaatatgtacgtgacattaaaaccctataatgagctagtcaatgcaagtaaaacggggatgacaatgtctcccaatatccctttgaaaaataaagaagtcgcaccttatattactgtatctgatgcagctaaaaaaataactaatgcagtatgtaataacaattctgccgaagccttagagttttatgcaggacaatctttggggaaatataatgggggaactgtttataagtcattatcattcaacctttgtgctaatgggaatatacctacgaataattataaaggaagtattgatgtatcgttcctgattgaatga

SEQ ID NO: 299758 - DNA, 579 bp, Proteus mirabilis
gtgacacaaagtgatgttatttttgattacggagtcataagcccaacacttatccctcaatctaaaatctactcttatccagccagtatggctcaaaatacagttacggttgaatgtgatgcaaaaacatatttaacctttgttgcgtctgatacttatgataatacagaattaagcgttaataatacgtcagactggtttcatttagttgataaagcaaatcctgaaactgcagttggagcaacttattttgcatgggataatgtaactgtcgatggcaaacctgcatatatttcacgagcaaatgacgtggcaattacaggaaaaaaccacaacaacgttctatacaaagggccaactaatggttggacatcagaacaacaattagatgttaataaaaactctctaaaattaatttcaggtgaaattttccaatcaaatttcaggcagggaattgaaagtagttctaatcaaacttttattttatctagagatgaattaagtaaaaaaggaatagatttatctgatggtttagattttatgggtgaagccgtcctcacttttaactttggtgtctaa

SEQ ID NO: 299759 - DNA, 1287 bp, Proteus mirabilis
gtgacttattcattcccaaaatgggaaggtaagtttaatcaatttggtaataaaaatccttatgaatttaatgaattacaaaaagagcatgcaagaaaatctttagatgcatggtctgatattgcaaatattaaatttactgaagttgccgttgggactgttgatggaatgaaggcttctgacgtaaaaacagatattacttttggtaatatctatgatccttacggcacatttcaagcttatgcgacattacccaatacctatgcttatggaaaagatctttctggccaagcatggtttagtgattatcattatgcaggtaatactacaccagaattgggtaattatggccgtttaactattatccatgaaattggtcatacactgggtctaatgcaccctggtgattataacgccggtgagaatgttccaggttatttaaaatctgattatgcggaagatagtcgccaatatacagtaatgagctattgggatgaatatgaaacaggcgcccacttccaaggtgcttatgccggagcccctctccttcatgatatttctgctatgcaatatctctatggcgcaaatacgactaccagaacaggtgatgatgtatatggtttcaattcaaacactggaattgattattatacggctactgatagtaatgataaattaattttctctgtatgggatagtggtggtaacgatacatttgatttctcaggcttctatcaagatcaactgattgatttacgtgctggaaacttttctgatgtggggggattacagaaaaatgtttctattgcacaagatgttaccatagaaaacgcaattggtggttttggtaatgatattattcatggtaatgatgctgataatattcttattggaggtgaaggggacgatattatctatggctacagtggtaataacactatttatggtggtcgtggacaagatacattacatggtggcacaggaagcaatacctttatttataaagaaattgcagattctttagcatcagccgcagacaaaattatggatttcaaaaccggtattgataaaattgatttatcaacattaattcaagatacatttagtaacaaaattcttagctttgttgataattttacaggcaatgctggcgaagcaactcttagctataatgaagtaacgaatgcttctgaattagcaattaatgcttatggccataattataatcctgattttaaaattgatatcgtaggttttgttaattacgaaactgattttattgtttaa

SEQ ID NO: 299760 - DNA, 525 bp, Proteus mirabilis
gtgacggcttacccaggatcatataatttaaatattccttttgcatgggcttatgaagaaaataaagggtctggtggcaacagtacgggttatcttcaatttggtaatgcaatgaagccttatatgaatagttatattaatattcctgtgagtatcacaagtaaatgtaatattaaaaaccaagttattaacttatctcatggaaatatgaccccagaagaatctattaacaatgttaccccgccttataactatcaactaacgtgtgattatgatgcatcagtatccgtttcattaattggaagtgcacctgtttctggaaaaacggaaaactatacaaaatgtggtaatggtggctcttgtgagttgaaatataacgataccgaatataaaggtaaatttaaacttaacgcaggtgctgcgaaaacattttctatcacatcaacctttcatcctaatgatataagaaaccctgttgaaggtagttttcaaggaagtgctattttgcgggtattggttgactga

SEQ ID NO: 299761 - DNA, 525 bp, Proteus mirabilis; identical to SEQ ID NO: 299760

SEQ ID NO: 299762 - DNA, 339 bp, Proteus mirabilis
atggcgatcttatttttagctttctatttttttcatatttttattttaactgactatatgaataaatctgtaataagcgatcagccatctgttttaattaaagtttgggatgataatgcactatctatcggaggagttaagtacgatgatagtaaagaaacgatgagactaagacaagaagctataaacccgaataataaatggtatttaaaaaataaaagaatgctgagctctgatgagttgaattgtttgaattatggttttttctctaccaccatgattaaaggaaacattgatatcatttgtgatgatggtgaaaaaatcatttacataaactaa

SEQ ID NO: 299763 - DNA, 1137 bp, Proteus mirabilis
atgtctggaagtagacccataatcatgggtaaggcaatggctttaaatggagacaaaacgacaacgggagccaattgcatcgcgactattgaaacggtaacttgctttaataaaaaagcattacgagttggagatccaacaacaaaatgccccaaatgtggtcaggctggggtagtcatctctgggcagcaagggtttttaaatcatggtaagcttcaagcggttcatgattcactggttcaatgcggatgtccatctggttcaaatagagttatcgccatatcagtcccagctaacattcaaagtaactctttcaaagtagcacgtaatgcaatagataatgtcaatacaatagcacaaacatccaactcacaaaaaatcacccctttcgtcttatctatccaaaaagtttgcctatactgccaacggtcaatcacacacagtaatacctgcctacctaaattcaaagaggttattcgagaatttattgattctgataaggatatcaatggcgtatttaaagaactctgtgactattacatcaaacattttgatatatggaagacaacatacattgataatatgttttctgacttacatgatgtggtaggaaagaattactattctcaaccagtcgaagatcaaagaagatttaaactgctaatttcaaagcagaaaaatactatgttttttggtgacatgtatagtcctgacaaaaatgaccccaattatgacaaagtgcaacatatcattgcaggattatggctcggctcaaattatacatatgcatcaggagtcatgactgcatggtcagttgagaaagtagatacatacaaagcaatctttggtgaattaaccggaacaagaaaaccacatcatattggctttgattggtatgattacgcattcacagttgctggggctgctttaggtcacttgcttaaatatgtcgatgataacaggtgcttaaaagctttaaataagtttgcaactggacaagtaaagtttgattctttttatacaccaccaaaattggactatttaggtatgggaaaaattgatcccatattcccaatatccggcggtaacgctgaaaaaatagataaatccctcgatgaaatattcaagaaattttaa

SEQ ID NO: 299764 - DNA, 276 bp, Proteus mirabilis
atgccacactcaccagcagaaaaaaaagccgcgttaacccgtgtaagaaaaatcaaagggcaaattttggcattagaaaccgcccttgaaaacgaaaatgaatgcggtcaagttttacaacaaattgctgccattcggggtgctatcaatggcctgatggcgggcgtactcgaaagtcatttacgtgaaggtctaatggatgccgtcgcttctcctgaagatcaaaaaaactccgttgatgatgcaatctcactaatacgcacttacctgcgctaa

SEQ ID NO: 299765 - DNA, 1113 bp, Proteus mirabilis; identical to SEQ ID NO: 299407

SEQ ID NO: 299766 - DNA, 336 bp, Proteus mirabilis
gtggttgaacatatagaaagtaaaactatagatattacgcaggatgaagttaatgcattaaaaaaactaataatgtacgttaaattttcttgtgaagaaaatgagtcgctacaatatgcaagtagttattcaattaatagtttttttgataaattaattgacattgattgctttggaaaagcagccaaggagttttatagtaagaggaatattaataacgaaaattttatcacaaaaaaaatcaatgatgatcaagaaaaaagtataaataaaatggatgaaagtgtattacaagaagtatttaaagaagcacttcatccttttaagattaaataa

SEQ ID NO: 299767 - DNA, 447 bp, Proteus mirabilis
gtgaatctctacagatatgtccataatccgctgtcttgggttgaccctttgagattacttggtgaaaacacctttattcattatacggataaagctggttttgacagtataatgaaaactggtgttttgaatcctaatagccaagggaaagtctatgtaaccgacatattaatgacacctgatgatgttacacgaaatctcctcatcaataatcctaagtatgtaggacgtggtgattatgcgattatatttaaagttgatcctgtgcaactgaataatattaataaagtttctgaatttgagtatattcattcaggtaaattgaaaatgaaggaaatcttacatgccggaaaaaaaccatattctgttgtgtcatatatagattatgaaacacgcaataaaatgactaataaccaactcgatgctaggagtaaatgcggtggttga

SEQ ID NO: 299768 - DNA, 423 bp, Proteus mirabilis
atggtgaaagctgaagaaattggttatgtcgatacggtttttaagttttttggtgccaatcataaaattgttattgaagcttttgatgatcctgaagtcaaaaatgtcacttgctatttaagccgtgctaaaacagggggcatttccggtagtctaggacttgctgaagataccgccgatgcggctatttcttgccaacaagtagggccaatcgaattaagcgaaaaggtcttaaaaggtaaaaatcgtggtgatgttgtttttcaaaaaagaacgtcactggtctttaaaaagctacaagtggtgcgtttttacgataaaaaccgccatgcactgatataccttacttactctgataaggttatcgatggttcaccgaaaaatgccattagtgctgtgcccatcatgccatggaaagagtaa

SEQ ID NO: 299769 - DNA, 1263 bp, Proteus mirabilis
atggcttatttgtcattaaagttaacattaatctttcttgccactatcccactttattttatcttagctaaattaattgctcctaaaatagaaaaaaccgtacaacagctttatcaatattcagcaataaatagtgcttttttaacagaaacgctaggaggtatagaaaccataaaaagcctttcattagaaccacgttttacacaacagtggcatgcacaaattcatcaactgactaatgaaaatataaaattacaaaatattgataacttatcgcaatacattgtttcatttttacaaaaaataacgacggcaactcttttatgtctaggtgcctttgaagtcatttcacttgcaatgacaataggtcaactaatcgcgtttaatatgctattaaaccactgtctacaacctttaagttctgcaatagaagtttggggaaagtatatacgagccaaaacggctatttataatttacaagacattcttaatctcccgatagagcaagaaaaagccaataagaaaataacattacaaggtgaagtgagttttgagaatgtgagttttagttatcaacatgatgctcctcctattgtaaagcaaatttcatttagaataaaaaaatatgaaactattggtatcgtcggaatgtctggatcaggaaaaagtacattagcacgcatcatcgcagggctttatatcccacaattaggtcaggttaaacttgatggcattccggtttgtgaaattccccccaccgtattacgtcaacaaatagggtttgtcttacaagagaattttttatttcatttaaccgtgctcgacaatatccgtttaacgcaaccatcagcctcgttagatgaggttattcatgtagctaaattagcaggtgctcatgagtttattttaaaacttcctttagggtacgacacgctaattgctgaaaatggcaaatctttatctggggggcaatgccaacgtattgcgattgccagagccttactctcatcccctaaaattttaatttttgatgaagccaccagcgcattagatggcgagtctcaaaccataatcgaaaaaaatcttcccctgattacacaagataagaccgtcattatgattgctcatcgcctttccacaataaaaaactgtgaccgcattattgtattagaaaaaggccagataatcgaagaaggcaaacataatgaattgattagaaaagatggcgcttataaaaaactttggcaacatcaacaaggataa

SEQ ID NO: 299770 - DNA, 357 bp, Proteus mirabilis
atgcaggactatttaaggcctaaaacattatttcataaaaataattgtactgaatatcttgataaagcgaagaaatggcatttaaaagggaggccagcatatcgaaatgggcaatgtttaaaacccggggaaataccgattgaaattgattatgcagaaagagacagtacgtttaatttactatttagctcagcatggaagcccaaaacagcacttcaaattctagctaaaaaaatggctttacagcgtggtttagggcatatgcatattcacaaggctaggtctgtttggaaagaaatttggtatcagtcggcccaattaattgctcgttcaacaattacagataagatcgcataa

SEQ ID NO: 299771 - DNA, 246 bp, Proteus mirabilis
atgtattggtactgtgtttgtccaatttgtgatggacaaggtagattagttataaaaaaggatattgaaaaaaataaattattttttcattgtgatgaatgcgaatcgtcatgggagtcagctagtgatataggaaatggtcatagagtatttttaggttataaaataaaatcgtcatatgccactgaaaatgatataaaaaattttggatgggaaaaatataaaaaaaatgtttatataaaatag

SEQ ID NO: 299772 - DNA, 372 bp, Proteus mirabilis
gtggatccgtggggttggagttgtgggtcaaagattaaacaacggggagcgctaaattggaaagctatagtctccgaaagtggtgaaactcgaattcagcatgtgattaaagggcatggaacattaaacccagaaaaacctatacagactctattttataaaaatcctataagtgaaattaatcgagcatggcgtagacgtatgaaaagaaatcctagcccagattattctaatgatgtaaccgatatatttatcattgatattaataaaactattggttataaccgagatacaggagaacaattaagtaaaataaaaattatagttaagcgtaatacgaataaaattataacgggatttcctacaaattga

SEQ ID NO: 299773 - DNA, 429 bp, Proteus mirabilis
atgataattgtctttttaagcgcgtggtatgtattgcatcacacacgtttaggccgctatatctatgcccttggaggaaacgaagctgcaacccgtttatccggtattagtgtcgataaaatcaaaattattgtttatgcgctttgcggtttattagcagctcttgccagtgtcattgaagttgcccgtctttcttctgcccaacccatggcaggcaatggctatgaactggatgctatcgccgctgtcgtcttaggtggtaccagtcttgctggcggtaaaggacgcataatgggaacacttattggggcgttaattttgggctttctcaataatgcactcaatttattaggcatatcatccaattatcaaatgatagtcaaagctgttgtcatcttacttgccgtgctggttgataacaaaaaataa

SEQ ID NO: 299774 - DNA, 456 bp, Proteus mirabilis
gtgaagatagattgggtatattgtgttggtaataaattaagctcatcaacattgtacgagatattaaaacttagaaataaagtgtttattgttgagcaaaaatgcccatatcaagatattgatgatatggatttatcagaaaatacaatgcatgttattggcacttacaatggtgcaatagcggcttattctagggtattaaatactaatcctgaaacagaatgcgtgattatcggtagagttatcgttgcacaaaaatttagaggtgaaagtttaggggttgagttgataactaaaacaattgaacaaataaaactactgaaaatcaataaaccaataatgctttcagctcaatcgcatcttactaaattctatgggaagtttggctttaccgagatatcggatgagtatttagaagacaatattcctcatatcgatatgatattgaaagtgtaa

SEQ ID NO: 299775 - DNA, 207 bp, Proteus mirabilis
atgacatacctctgttatacctataatgagtctgctgttgtttctgtggttaatttggcattatcagaaggtatagataactggcatattatcgctgaacaaattaataaggccggctatcaaacgaaaggcggtaaagtgtgggattgtgggataaagatatttattcagcatggaaacgtcacaaaaatattactggcaaactaa

SEQ ID NO: 299776 - DNA, 759 bp, Proteus mirabilis
atggatgcacaactgtataaagagtttaaaattatagaaaaagcgttttggtcagagatatgtgaaaacaatattcgtattggtgatcatacccactgctttatgacaccgatggacgcgcctatttttaattttatctatcttcgtcaaggcgctagcgaaaatactttccaacaagcaagtacgctgttctcctcgcaaaaaaaaggtcacatgctggttctgccggaatctctgttgcctgaatttgaagagataataaaaaaagcaggttatacgggtgacggtatgacaaccgctatgtatctctcattgtctgatgcgacttatcccccctataaaaataacccgtgcgatattattttaactaaccatgatcttaaacagtgggcgcaaccattgaaaaccgcctttcctgttggtgacgatacgataactaatgaatatattcgttatcaccaaaaagcgttagataatggtgcgacgatccttcattatgcattattagttgcagggcagcctgtctcatcattaacgctgacattacatgataaactagcacgatttgacgacattgggacggatattgcttatcaaggcaatggttatgcgacacatttaattacccacgtattagagttttgtcgggagcaaggcgtagagcgttgttttttagatgcgtcagcggatggtctagcgctatatcgcaaatttggttttaagccactttttaactatttaagttttattaacgaataa

SEQ ID NO: 299777 - DNA, 915 bp, Proteus mirabilis
atgatggatacattactacaaacagtcagtcagaatagtattaatagtgatacaatagaagatgcgtttaaaacatatttaacttcatttgaacaaattgctaatttagaggtaattagtggttatcatgatggtgattcattagaagatggcattacctattttatcggtcgtaaccctgctgatccgatgagttattattggcgtagtgcagatcacagtaaaataaaagcaggtgtaatggcagccaatacatggactgagtggactaaaattgagaatggatcaaatcctcataataatttaattcgtcccgttatttttaataatcgattgtatattgcttggattgaaagtagcgaaattgctagtacagacgaaaaatcacctacggagatccataaagagacaaaatatagcttaaatgtatctcatattcgttatgatggtacttggagttcatcaactcgtttcccattaacggatacttttcttaaagaaaagaatgggaattttcatttaagttataatcaagatattgataagttatttattttgacctatgtaacaagtagtgaatatctagaagatagtgataactatcatatttattctattgataataagatggtatttactgatgtttatgtttcaggctcaaaagataaagatgcaaaagagatttatcttaatgtgaagtctgagtttgatatacttaacgatacacttattaagcatattaataataaatttatgttaagagggcgattagcgtattcattaactcatgatcctattgataatgtgaaaagtagcgaatctaaagctgtttcgcttacagggagcacaataaatggagtcagtgcagaggttaataatcaagttgtatcgtgttatctttctgcttttgtttga

SEQ ID NO: 299778 - DNA, 423 bp, Proteus mirabilis
atgtcccgcttgcctttgcgttcaatcttgcccgattttttaacttccgttgctcgtgtacttctaggtacactgcgcgacggcttgaaaaaatcgaccaaccttgttagcaaatgctacgctattttcggtgatgttattgcatcactcagtgcgaggcacttgagtgatggggctcctactgcttgtacgtacacggtttcaggttctttttcactcccctcgccggggttcttttcgcctttccctcacggtactggttcactatcggtcaatcaggagtatttagccttggaggatggtccccccatattcagacaggataacacgtgtcccgccctactcgtcgagttcacaataacagcatcttcagatacggggctatcaccctttactgccggactttccagaccgttctcctga

SEQ ID NO: 299779 - DNA, 435 bp, Proteus mirabilis
gtgtcaccagccgcactacctcccggcacagtcacttcggtctgtacgccatcttttagctcatcagcatttaccccgtcagtggcttctggaatggtcaccactggtgttgtgtccaccacaccatcaccgtctgtatcgcctgggatttgtccatcaacagcaaaatccactttattccctggtttagcgggattattgccttgggttaagctgacatcgacactgttttggccgttttgtaccgcgtctttaggaatatcaacggatactttaccggctgtggcttcatctttagtaactgtatgggtcactgtttcagtggttttgtctggacgagtgaccgttaaggtgatttcagccccttctgctgtccccgcaggcaaggtaacttctgcttgtaaaccgtctttcagttcatccgcattcgcataa

SEQ ID NO: 299780 - DNA, 282 bp, Proteus mirabilis
atgcccgtcacttcactgttgtcttttacattatccgcagggattgtcgctttatccccattgctgtctgggatcaacgccggtgtatcagatgtccaaccgttatcccctttttctaaggtcaccgtgtgtttatcacctttttcatcttcaaaggtgatttctaccgtatcgcctttattggcatctgttggtaagtcaactgtaactgagccatcatcctctgcttttaataccggagccgacggtgccactgtatcgacaacaaagtcagtaggttga

SEQ ID NO: 299781 - DNA, 294 bp, Proteus mirabilis
atgtattctaattcattgaagctaataaaattaattgatgcatatcttgagggtgaattattaccctctgattttgaaaagaagtatattgaactgtggcgaaaatatagagatttagatgataaaagaacaataaaaaaagaaactcagaaatatttagactcaatattctgtgctgtagatgcttattgttccgagccatctttaagagatgaaaatgatctagatgaaagtggtttgctctttgaagtaaaccagttgaatcaggattggaagcatattataactagttaa

SEQ ID NO: 299782 - DNA, 210 bp, Proteus mirabilis
atgttattcgattctactaatacaatggttccacttgagcatgatgatagaacacgtcgtacatttacttcggatgttgccggtgggaacggtaacatagaattttcattaagatatgtgggactactaaattcggatgatgatgttaccccaggtgttttctcttctgccttatcttttgaagctttcgtcactgatgatgtcgaataa

SEQ ID NO: 299783 - DNA, 255 bp, Proteus mirabilis
atgtcaaataaaggtaattgtttagataatgcggttgctgaaaacttttttggcttattaaaatcagaaatgtatcatgagcattattttcaaaatgctgatgaactaattgataaaattgaggaatatatcgagtgttacaataccaaacggagcaagatcaaattaaaagtcctgactccggttgaatatcgaaatcaggccttacaagtcacttacctaaatgcgttcaattttatgggctgcggttcatag

SEQ ID NO: 299784 - DNA, 375 bp, Proteus mirabilis
atgacagattatatcgaaaaagattttctttatgttgtttatcagaaagattctatagagggacaatttgcaacaagcttagaggaagcaattatactaactaatcacgaaaatgttcttcttcataacttaatatctaatcttaaaccaatagtttataaagaaataacgaatggtggtgtaaataaagagcaactaaaagggagctcttttagattacaacagagtcttggtaataatagtggtaagtccgaattcgcaagtaagttactttatgaactgattacgtctgatgatgctgaaaaacctaagctacctaaatatattaaagatggtttttcttggttggaaaataaactaaggaatgaggtataa

SEQ ID NO: 299785 - DNA, 1047 bp, Proteus mirabilis
atgtgtataagagacagcattaatatattgggtaaaaataaaatcccattgtttaatgtgatcaatggctatgaaacggttagttttgttgattatgtttggaaaggtgaacaagaaaaagggctatctaaagataacaaagaaggcctctctattttagaaaatagctcattaaaaacagatttcttctctctacaaggtggcgtttttaatcttgatgggaagctaatcactaacaaaatcaatattattcgtaataaagaatttaatgctaatgaaaaatcagtaatcggaattattaataaagaaaatgaatttagagaatataataaagtagagctattatccatgttagcatctatgaaattaaattttcttgaaaaagatgcaaaaaaatcagacgaaatagcatcagaattagagttagaattagaggcattagaagcattagaagaaaaaataatagagttagaccctgataatatatataaaaataaactaaaggaattaacagaactagctactgaagctaggagagttgctgatcaacagcaagcagaatataacaagatccagaatgctgtttttaaaatcgatgaagctaaacaggaagaaaaaagcaagttggatgctaagggtaaaaaaataggatcagcatttcaatatatagaaagtgacaatattaactttaaaggtaaactagctattataaatagcgaagttttgtttaatgcaagaaatattgatgttgatattgataaaacaaaaacaacttcttatttcagaaattctgatgtcacatttaatacccatcaagataataactactcaggtaaatttggtctgatgaatagcagtatcagatttttaggttatcgaaatatcccgataggagatggtaacgacgataataacttagataaaaataagcttaatgatattaatttaaataaactatctatgtttggttttggtcagatttttgcacatggagataacactgtctcttatacacatctgacgctgccgacgatctactctgtgtag

SEQ ID NO: 299786 - DNA, 939 bp, Proteus mirabilis
atgaaatactttgaaatggaaaataaagcgaatgtattattcggtgaatataatggagtgacacttcccaaacgttatacaaatgaacatgaggcttatttctcggtaagaaatagcatattaatgacagacttttctcattatggcatggtgaaaatttctggtgaagatgcttggcggttactcaattatcttatttctgcagatatttcatctattcgtgatgaacaattactttatacattgttgctagataaagaagggaagataataagtgatgcctatgtactctgtgataatgaacactacttcttaatttcagagtggatgaatagtgatgccatatgccagcagataaaaaaagtattagatgagcaagatgaacgggcagaccactaccaaattgatgcgataacttctcttaccccagattggcgtatgatctgtctggaaggcccctatgcttgggaaattttatctgaaatcgtggggatggatattattggattaccttttcatgagtttatgtatgtcgatgaagacgtcattactatgcgtgttggtaaacacggtgaatattgttatcacattatgggagatgaagagaagttaatgtctatttggcggcatttatgcactttatctgaaaaatttgatttaaagattggcggggttgatgatttaaaaaatatacgactagaaaatccttgctgggagcctcaagtgattaatccttttagtcgctgtcctattgagttacaaatgcaatgggcgattagttacgataaagatgcatttatcggtcaagatgcaataaaacaacgtgctgataatggggtagaacagaaaatagttggcgcaagaataattaatatgcctcagaatgcttcaattttaaaaggcgatgtaatctattaccaaaatgaaaaaatagtgtag

SEQ ID NO: 299787 - DNA, 333 bp, Proteus mirabilis; identical to SEQ ID NO: 297028

SEQ ID NO: 299788 - DNA, 468 bp, Proteus mirabilis
atggttaaagataggttcactttaaatgatatccaatactttgggagtataagacttatatctgtcatttcaggatatgtaggtggtattattgagccaatgggtgttggtattggtaatggtggaaaagaaatatttctaattatgaataaggttggttttgatactaactcaattacatttttaacaactcaaaatgtggaatttttaaaaccaaattcatatggtgctcaaattgcattagaaagtggattattaggattaacgtttattattatcttgtctatttattgcttttctcaaataagagtgaatacaaatgttaattgcttttatagtgcagttttagttatttctatattccaaattttatttttcagtacaacaactgttaccgcaccttggttaatgcttgctctttcattatatgctttaaaacggttaaataaaaatgaatattctttatga

SEQ ID NO: 299789 - DNA, 618 bp, Proteus mirabilis
atgaccatatccgcactcatctgtctagctaatggtagtgaagaaacagaggttgttaccaccgctgatttactcgttagagctggaattaaggtcatacttgctagtgctgaagatgatgttgatgatttagtgatcacctgctcacgagggatcaaattaattgctgatgtgccattagttcgtgttgttgatcaccattatgatgccattattttacccggaggattaataggtgcagagaccttacgagatagtcctcttgttgttgaaaaagtacggcgcatgcacagtgaaaatagattagttgctgctatttgcgctgctcctgcgactatcttagagtctcataacctctttccaataggcaatatgacaggtttccccggcttaaaagataaaatcgaacctaaaaaatgggttgattatcgggtttactttgacgaaagagtcaatcttattactagccaagcccccgctaccactatagatttcgcacttaaaattattgagcgactaaaaggtaaagcagttgcagctgacgtcgctaaacaacttgtattaccaccgggtatttataattatcaagatgaatttaccggatttggggataggtaa

SEQ ID NO: 299790 - DNA, 174 bp, Proteus mirabilis
atggcgaaatcagaaggcccacaaaagccgttaagccagttacgctcaggacaaaccattcgtttacaacgaggttcacaaggtgaagtgagtatgcttgaagtgactgacaataccggtactgttattactttcactcggctaagtgatggtagttattatcgtacaccatag

SEQ ID NO: 299791 - DNA, 534 bp, Proteus mirabilis
atggccatttgttactatggcaaagtggataagctggcaattgttgctggtcaagatcagttagattatcctgaaataaaaaaactgttgtccagtgatgtggctaatatgcaacaacaggcattatttgatcctgatggattaaagacgtggatcactgaaaatatcactgctaactggttaatggattttattttgaattatagtgccgatgttgatttggctctctatcaagaaaataaattttttcctgtttatcaagcttgcatgaaagaagcctttaaatatggaaataagggctatgctcaagatttattaatcacgatgcaaccttggggatttactccagaaatgattagcacacccacaacattatggtatggactaaaggatacgagtactgttcattctcctgattttggtaagctattgtctcaacgttttcctcatgcacaacgttatgtctatgataatgaaggcggctctttgttgtggactaaaacatcacagattttaacaaatcttattagttaa

SEQ ID NO: 299792 - DNA, 255 bp, Proteus mirabilis
gtgaatgctagttcgacagtaaatgataccaatgctcaagtagcattattcgataatgatggtttcttgattccacttgatgatgatgatagcgattactatcgtacatattattcggcagttgacggtgatagagctagcttaagattttcattagcatttgtggaaccagaatcgcttgatgatgctattaccccaggtgttttctcttctaccttatcttttgatgctttcgtcactgatgaggtctactaa

SEQ ID NO: 299793 - DNA, 666 bp, Proteus mirabilis
gtgagattagaggcaaaacacccaaataaaaataaacaagaagtatgggaagatattaatatcgttccaatttttgatgaaaataatttaatttctcattatgcatttttaagcttagatatcactgataaagtgaaattaagaaatgagttattaaataaaagttatgttgattctttaactggaatggctaaccgtctaagtattattgagaaaatagaacaggagcgattaaatatctcgaccccttcatctttttgtcttgggattattgattgtgataaatttaaaatgattaatgatcaatatggccatgctattggtgatcatgttttatgtgagatagcgcagcgtttattagccttagagcgccagcaggtttactgtgggcgacttgggggcgatgaatttgcggtacttttccctgttggattacgttcttgctctttattgttattggagatcatcgaatcgctatggcgtgggatggaaaagccgataaaaatcaataaagaaaaaacaatagttccttctattagcttaggtattgctgaatatcctaaggatggcaagacattatctgaactattaaagtcagcagataaaaagctttatgcaataaaagagaaaggaggaaataaatacggtttttattcagagtattaa

SEQ ID NO: 299794 - DNA, 603 bp, Proteus mirabilis
gtggtacctgatactagccctcgtggtgaaaatgtggctgatgatagtgcttatgatttaggacaaggtgctagtttttatctgaatgccacacaagcaccttgggatagccattataaaatgtatgactacattgttaatgaactacctaaattgattgagtcacatttccctgccaatgaacgacgtgctattagtgggcattcaatggggggacatggcgcattgatgattggtttgcgtaatttgtctcgctattgcagtatttcagcgttttcacccattgttgcaccaacccaagtcccttggggacaaaaagccttcagcgcttatttaggcgacgatatgacacaatggcaacaatatgacacgattgaattactgaataaaacacaacagacagttcccatgcgagtagatgtcggtcttgatgatcctttttaccaacagcaactacagccagaacgtttagcacaagtatgtgataaaaaacagtttgcatactgtttaaatttacatcaaggctacgaccacagttactattttgtcgcgagttttatcggtgaacacatcgcctttcatgctaagcacttaaaggcttaa

SEQ ID NO: 299795 - DNA, 363 bp, Proteus mirabilis
atgatccaagcactctcttcatacataaagcgggcattaatgggcaccataacagcgctaatttttgaatctgcacaagggaaaatcagacaatttagctacagtgaattaaatgaagagatcaacagagccgcaaatctttttcatgcctgtggtataaaaaaaggcgaccatgttgccttacatcttgataactgcccagaatttttcttttgctggtttggactggcaaaaattggcgctgttatggtgcccattaatgcccgctttatgtatgaagagagtgcttatcgtgcaacatcggttggtaaattggatagaaattatcacttgttactacaaagtgtgcttggcaatggttaa

SEQ ID NO: 299796 - DNA, 600 bp, Proteus mirabilis
gtggataatgatatttacgatcatgctaaaatagaaaaaatggggatttttaattttgtttcagacgatatgataaaattaatagatctaattgttaaatatttagaaacaatgataaaaaaatttgaagcatccagagaaatgagtgtgatgctcatgaacattgaattggatatagccgataaagtaaaagataatcttaataaaaaagccaatattatgattggatctgcaattacgagtgctggagtttctatggctatacatggtatgggagccactttttctattaaaggaatggggaaatatcttattgggaattccaatccaaccatagcggtgggaaatactatttcagctatcgcagatccatttgcaagggttgcagaccaatctatgcaatctgaaagtagcaccattgaaggtgaacaaaaagtattagatgcgagaggaaacattaataataatgtgatcaataataacaatgagatacagcgagaagtgactgaggtcataaaagcattattacaaacaatagaagctataattcatgctcagcaggatgctgcttctacgatttcttcaaatgtaagagcttaa

SEQ ID NO: 299797 - DNA, 288 bp, Proteus mirabilis
atgccttttttatctaatgaatctttagataaaataaaagcagaagatgctttccctgcagaaaagctggtagagaaaaccagacctggtgttaaatctaaactgtttttatctacattttcttgttgttttgctgtccaaccattagtgacgtctttaactataacagttttattatctgaaaagcctaccgttgcatcatttgcccggctaataaatgagggttttccatctacagtcacattgtaccaaacgaatagtattccccccacagaagtatctacctga

SEQ ID NO: 299798 - DNA, 507 bp, Proteus mirabilis
atgtttaaattaaaaggtaataaattaagagcaagtgtttattataatgatacttattattttttattaactttttctggtcattctatttatataatggatctaaaaaaaggctataaggttttacctaatgatattattgatgatgaattaggttattatgccaaactagctctgattaaaagtgaacaaataaaaggaaattcagataagtttaatcaaatgtataatgataaaaaaacttatcaagactggataaaaaaaataatcaaagaatataattataaaaataaaacagcactttttaataatatgaatcgatgtagcttagagcttacagatgatgaaattactattagtcctctaaaccatttacgtatggatcattgggtaggtgagggaatatctgatagtgcaattattacattaaaagccaattgtagtgacgaggttttaggtgcttcaataaaaaaagcttttacacgttgtattagcagtagagtttaa

SEQ ID NO: 299799 - DNA, 243 bp, Proteus mirabilis
atgccttcaacagatgactgtacactttttttattccccgatattgcgacgttgcctattgcaggaacgcccttatcaaggggcgcgaaagcagcccaaaaaataaaaattgctaagcctaacaaaaccacagtccatccaataactagaaaatttttaggatcatctgaaattttttctgacagtggtataacatttttttctatagtcatattcaattccgaaaaattaagcgttatttga

SEQ ID NO: 299800 - DNA, 402 bp, Proteus mirabilis
atgatagaagcaattgatttaggtgatacttacattgatgatattggacgtcattatccaacggcaattagtataagattttctgactgttctaatctaagattagctaaaactgtcaaccttgttcttaaaccacaaaaccaaccttatttagaaaataccattaaaaatggaaccaatgctgtagtaaaaatagtagatattaataataatcatgaaattgatttaagtgataagacagaaggggcaatgctatttacttcctctattgataaagataataatgcttactttctatttggagcagaatttatgaaacccacaggtgttgctgaagttacagcaggtgatttcaatgccagcttaacttttgatgcttttatcgatgatatgttaccataa

SEQ ID NO: 299801 - DNA, 246 bp, Proteus mirabilis
atgaatactggtcaaacaaatgctgataccaatgctcgagtagcattattaaattctcaaggtatagaggttctacttaataatgatgatgagtttcgtacatttacttcgaatgttgcgggtgatagcggtagcatacaattttcattaaaatatatggcaccagatgtgggtactcctgttaccccaggtgctttctcttctagcttatcttttgatgcttacgtcactgatgatgtcgaataa

SEQ ID NO: 299802 - DNA, 243 bp, Proteus mirabilis
atgatgataaaaacattatcaatgatcattcttgttgcaacagggattatcagtaatgcaattaccacccaaaatagggcaacagaattacgtggattagtttgtaattcaaaacgtgaaagtgtctctagcggtaacacatggcgcacttgtgttaaggttttatggagcatttttatcattagaaaaagagaagcgaagccgatgaaaaaaagtaaacagccttctcttaaccctaaatga

SEQ ID NO: 299803 - DNA, 336 bp, Proteus mirabilis
ttggcgcaacgcagtgcagaggcggcaaaagagatcaaagcattgattaatacatcaagtaacaatattaagattggctcaaagcaggtgaatgagacggtagaaacaatggaaaatattgtggttcatgtaaaaaatgtcactagtcttattggtgaaatcagccttgcatcatcagaacaaagtgcaggattaaaagagctaggtcgagccgtagagcagttagaatcaataactcatgaaaatgcagattatgtctctaaagcgtcgtcaatttccgcagagatgaaagaacaaacgaattatttagtaaaagccattcatgtatttcactaa

SEQ ID NO: 299804 - DNA, 411 bp, Proteus mirabilis
atgacaataggtacaacattaagctatgctgctgatggtgaaattaaaataatggcgggaaaaactggctatgtaggcgaaattattccagtgacaaagttagctgaaacctttcctacaagtttcactgccccttcaagcactaattattatgctaggcttggttttctgagccttaccaaccggacgggttattgtggtagtaccgatggactacaaaaaatacctgaaattaatgaatggggatttaaactagtaaataaaaactatcctacctctggctatttactattggcgataaatggaaacattggaggacaatataaaactaataattcaggtatccaaaatataagaggaatatctgtctcttatacacatctgacgctgccgacgatctactctgtgtag

SEQ ID NO: 299805 - DNA, 375 bp, Proteus mirabilis
atgattaatgatcaatatggccatgctattggtgatcatgttttatgtgagatagcgcagcgtttattagccttagagcgccagcaggtttactgtgggcgacttgggggcgatgaatttgcggtacttttccctgttggattacgttcttgctctttattgttattggagatcatcgaatcgctatggcgtgggatggaaaagccgataaaaatcaataaagaaaaaacaatagttccttctattagcttaggtattgctgaatatcctaaggatggcaagacattatctgaactattaaagtcagcagataaaaagctttatgcaataaaagagaaaggaggaaataaatacggtttttattcagagtattaa

SEQ ID NO: 299806 - DNA, 228 bp, Proteus mirabilis
atggaaaatattgtggttcatgtaaaaaatgtcactagtcttattggtgaaatcagccttgcatcatcagaacaaagtgcaggattaaaagagctaggtcgagccgtagagcagttagaatcaataactcatgaaaatgcagattatgtctctaaagcgtcgtcaatttccgcagagatgaaagaacaaacgaattatttagtaaaagccattcatgtatttcactaa

SEQ ID NO: 299807 - DNA, 303 bp, Proteus mirabilis
atggggcctgatgcgctgattatgtctgatccgggtttgatcatgatggtgcgtgaagctttccctgatatggatatccacctttcagtacaagctaacgctgttaactgggctaccgtaaaattctggcgccaaatgggcttaactcgcgttattctttctcgtgaactctctattgacgaaattgcagaaattcgtaaacaagttcctgatatggaactcgaagttttcgttcacggagccttgtgtatggcttattcgggtcgttgcttgttatcaggctatatcaataactggttttaa

SEQ ID NO: 299808 - DNA, 228 bp, Proteus mirabilis; identical to SEQ ID NO: 299806

SEQ ID NO: 299809 - DNA, 246 bp, Proteus mirabilis
atgcctgcctattatctaatggtagttgctgttgtcggtttgataacgggtataaaaatgattgaaactgccaacaaaccattacgtggtgcaacaccggcagcatcagataaatcagaagcgaaagagattttatctgagcactatgacaatatcgaacaacgtgttgaagatatcgaagcggaaattgaagcattacagaaaaaacgccaagcgcttatcgatcaacatccaaaattagattaa

SEQ ID NO: 299810 - DNA, 195 bp, Proteus mirabilis
ttgccagtcgcttcaactaaccaagccgctgcagttggtgcaacaccggcagcatcagataaatcagaagcgaaagagattttatctgagcactatgacaatatcgaacaacgtgttgaagatatcgaagcggaaattgaagcattacagaaaaaacgccaagcgcttatcgatcaacatccaaaattagattaa

SEQ ID NO: 299811 - DNA, 153 bp, Proteus mirabilis
atgccaataaacgacattttcatttgtttagatgttgtcttaaagggggaaattccttttttacgcggaaaaagagaaaattgtgtatatagcaggaatataaattatataaaaatattaatgtttgcagagtggcaaaaatacgctttataa

SEQ ID NO: 299812 - DNA, 1188 bp, Proteus mirabilis
atgatacgtaaggtttcattcttattctcattgttcttatttagctttagcgtgatagtgagtgcatcagcgaatgatattcctcaactaaaaacagatagagtgattgatagtgcaaatttattgactgcacaacaattcaaagcgttaaatactttattggttaacttcgaaaatagtcgtaatgatggatcacaatttgttgtctatatcgttccaacgacagggaaagaaaccatcgaatcctttgcttttcgtgtttttaatcaatggaagataggcagaaaagggaaagataatggattattgctcgtggtggcaattaatgatcgtaatgttcgttttgaagtcgggtatggctatgagggagcattaactgatgtactggcaggacgaattattcgcaatgaaatgttgccattttttcgttcaaataattattatgcaggcatcgaacaaggggttaaaaaggctattcaagccgttaatcatgaaccaataagtttcactaactcacagataaatactaatacacttaaaatattccacacacatttcatcctaatttatttggtaatattaggcggtgtttattgttttcagttgatattctcgacgcgaaaaataaaaaccaaaattaatcaattattagcgcctagaggaagaaaaaagaaaaatccagcagaccaaaaaggtaagttaagtataaagcaacgtaaacagttgaaaaattatctgcaatattcgtactattttcctacattttcaacgttatttttccccatgacactctgttttgcggcggcgatgttttatacacaagtctttcttgatggtattattgataattttgttttagtgataatagccatattgtcattattatgtaattttatcgtattagtggttttatttggtattatcaacctgttatttccaatttatcggcaacaacgaaaagaatggaaagcgatttgtgtcgctagtccgtttggttcaccgtttaatcaactgccatattcaaaacgtattcgtagacgtagtggttattcaggctctggtggttattcgagttcgtcttattcatcaagttcatcaagttcatcaagttcatcaagctcttctagttcttctagcggtggtggcggtggttcgagtggtggtgggggcgcttcagggagttggtag

SEQ ID NO: 299813 - DNA, 558 bp, Proteus mirabilis
atgataacgatgaatgatatttccactgaattaaaacagcttacgcaaaattatgttgatttatggcaacaagagtcagggtttcctcctgccagccatgagctttatggtgttccttctccttgtatttctcgtaccggagataatgtggtttattggttaccacagccttttaagggtcgagataaattagaaaaagttgaaaaagcgatgggaattattattcgccctgaattacatgactattttactacgcaatatgctggtgatatgcaagtccgttttgattcgctcaactttactctgcttcaaatttggagtgaagaggattttattcgcctacaagagaacatgatcggacatcttgtgacacaaaaacgattgaagcttaccccgactttgtttatcggtacaacagcgtctgaaaacgatattatttctgtatgtaatctttcaggtgaagtaatactagaaacttttggtcaaaagaaaagggaagtgcttgcagataatttatcactatttttaacaaaattaacccctgtttttgataagtaa

SEQ ID NO: 299814 - DNA, 621 bp, Proteus mirabilis
atgagtaaatataatctggaaattcaaaacgggaaaatcggcaatgacggattagctgaagttgccgggtgggtgaaatgctatgtcgctgaccctgtgacgcgtgagtatacgggagccactatggagaatgtgatgtttgatgtctcattatccgcaggtgcctatgttgatgccccggtcttgccacagaaagaacatcaggcggtcagacgtactgcagatggcagtgcatgggaaattgttgatgattaccggggattaacggcttacgatacacaaacgaaataccctttcatcattgattttattggggcattacctgagacattcacgttattaaaaccgaccagtgaatttgataaatgggatggaaaaaattgggttactgataaagaagcaatgaagaatgctcaggtggatgcggccaggcaaaaaaaacaggagttatcacaggaagcggaaaaccgcattatgcaactggaaagaaagatccgcttagggatggcaagcgaagatgagatcgcattgctgaaactatgggaagtttacaccgtaaaactcgatgacattaatcccgggtcagcaccagagattgaatggcctcaaaagccagaataa

SEQ ID NO: 299815 - DNA, 900 bp, Proteus mirabilis
atggcaacacttaacgaatccgctgtctgggaagacggtatttatcagcttgaagtctcagacccggtattaggcgggccgggaggtatcgccaaccggcaggctgaacaactggctaaccggacgaattatttaaaaaaacaggctgaaggtcagaaaaatgagctgtcagagcatctcaaagcggctaatccgcatacacagtatgcccggaaaggagtgtcatatactaaagaagagtctgacagtaaatacccggataaaagcagcgtcgcttatctgacacatgtcagacatcaggattttcagggaagtatcggggttaaaacgcagctttctgttcgcggtaccgatgatgtggccggactgacactgaaacccggcatagataagtcccttgcgttaagacataacaataaatggaattattacagctttccggatcagtcgggcaccgttgcgttagcctctgacgttgagggcgttgataattatcctgtcggagcacctatcccctggccatccgccacaccgccctccggctatttaatctgtaacggacaggtatttcagagaaccacctaccctaaattagcggaggcctatccttcaggaaagttaccggatttgaggggggaatttcttcgtggtctggataacgggcgtggcattgataagaaccgggaaatactcaccttacaaaaaagtcaggcgcctgtttccgccattcgtggtacaggaggaggctcctgggggaacagcggggaaattaaattaaacaaaaccacgacgataggtgacggagcaagtaagttagttgacgtttatcaggaaacggaagaacaacgtgaaacccgcccgcgtaacatcgcatttttatacatcgtgagagctgcataa

SEQ ID NO: 299816 - DNA, 582 bp, Proteus mirabilis
atgactgatccccttcagcttccgccgccgctggaaggcgacatccgcttcaggtcactgggcagactgaccgggcgcctgaaccttatcgacctgagcaccctgatggtctgtctcgtcgatatcgtcgacagttccgcgctgccatggctgggtgagcagttctccctgttcggtgatggctgggagctggccgaatctgacgacgtccgccgcacacttatcaaatccgcgattgaattacaccgttataaagggacgccatggtcaatccgggaaataatccggcgctttggctttggtgaagtggaattaatcgaaggactgggcggattacagtatgacggacggggtacgtttaacggtctttatcgttacggggacaaacgtgcctgggcgatttaccgggtaatactgcagcggcccatcaccaatgatcaggcgaaattattacgccgggtgttgtccttttttgccccggcccgctgtcatcttatcagcctggattatcaggctgttcctgtccggtataacgcagaggcgcattttgacggtaattataactacgggagtcatcagtaa

SEQ ID NO: 299817 - DNA, 1104 bp, Proteus mirabilis
atggcgttaactgaacccgattttattgaacgtgatgccgataaaatcacggctgaaatgattgctcagtatgagcgtgataccggaaaaaccttatatccggctcaggcagagcgtctgctgattgatttatgggcttaccgggagatgctgatccgggtggctattcaggaagcggccagacaaaatctggtggcctttgcccgggagccgatgattgattttctgggtgaactggtgggggtttaccgtctcgcggcacaaccggcttcgactctgcttcagttttccgtggataccgcactgaacagggatgtcctgatacccgcaggcacccgcgtcagtgcgtcggacagcataatttttgcaacggataccgatgtggtgctgaaggccggattactgctggttaacacccgggccacctgtactgagccgggaataaacggaaataactggcaaccggcacaaatcagccagttactggatgatatcggggatatcgacttacaggtgacgaacctgacggccagttccggcggttcagagcaggaagataacgaccggctacgtgagcgtatcaagctggcgccggaatccttcaccaatgccggaagcaaaatggcttaccgtttccatgccatgcaggcgcatcccaatgtggtggatgtggccgtgctttcgccggttcccggaacggtggaattatatccgttgctcagtaccggtctgccggatgacagtattctgacgctggtcgaaagtttttgctctgatgaaaaagtcagacccctgaccgataccgtactggctaaaccgccggtacagcgggattatgacattgtggccaatatcactgtctatcgtgatcaggatgctgtttcggtaaaagcgcatgccaataaagccgttcagaactgggtggcttcccgccggtcagttctggggcgcgatattgttccgagtcagattatcagtgagctgtctgttgccggtgtttatcaggtagagctgataagcccggcgttgctggtcattgctgaaaatgaatgggctaactgtaccactatcacccttaatatgaccggagtggccgatgactga

SEQ ID NO: 299818 - DNA, 597 bp, Proteus mirabilis
atggctaccgtaacccgtcaggtcggtactgtcagtgccgtggatgccgataaggttcaggcccgtgttcgtctgccggaatgcgataatctgcgcacgcactggctgaatgtactgcagcgcaatacccagaataacaaggattactggttgcctgatatcggtgagcaggtggaggtgctgctggatgcaaatggtgaggacggtgttatcctgggggccgtttactccagtgtggataaaccgccattcagtgacaaaaatgtccggggcaccgtgtatgcggatggggctgaattcagctataaccgggaaacacacacgctgattgtccggggcggtattgaccatatccgaattgaatgtcaggcggatgtcaccgtcaaaaccccgaaagccaccatcgatgcaccggaaaccgaaatcaccggcaatcttctggtcggcggtaaactcacttatgaggggggcatggcaggctccggcggaaatggtgctgctgccagtattcaggggaatgtggaagttaacggtaatgtccactcaaccggcagcatgttatcggatggccctaactcgaatcatcatggccactga

SEQ ID NO: 299819 - DNA, 1155 bp, Proteus mirabilis
atggctgagataaacacactgccggtcaacaccggcgtcacggatgtcctgagtccggtatttacactgtggtatcttcagaaaaatatcaccacggatattgcaccgtatgtcacgcgcgtcacttacagcgataacattaaaagtgagtcggacaccattgacgtggagctggaggattcggacggtcgctggatggataaatggtatccgggtaaaggtgacacgctcacgctgaaaatgggctataaaggcgaaaccttactgtcctgcggcacattctccattgatgaaatcgaagtcagtgcaccgccctctgttgtgtccgtcaggggtgtggccacgtctgtcaatcaggcgctgcggacaaagtccagccggggttttgaaaacaccacactggcggccattgccggacgtattgccaaaaaacatcagctgacgctgtcggggacaatcgaaaacatcagaattgaccgggtgactcagtatgcggaaacggatgtgggatttctgcgccgcctggccggtgagtatggttatgccgtgaaagtggtcagtgaccagctgattttttctcatctgacctcgttgcgcagtcaggagccggtcagacaactgacaccgcaggatatcgcccgtttttccctgcgcgataccatcaaccggatttaccggtctgcaaaagtcaaacatcagaacagtaaagataaaaaattaattgtttatgaggctgacggaggcacccgtgagagtgataaacaactcagtaagggaaaaactgtcagcgcagacacactgaaggtcaacagccgcgccggtgacccggaaagcgcccggataaaagcggattcggcactggcaaaaaataacgaatatcagcaaaacggctcactgactctcgcagggacgccgcaactgaccgccggtaataaaattgaattatccggtttcgggcagttatccggggactggctgataacatcagcccggcatgtgtttgagcggagcagcggctataccaccgaactggaggtggccagaggcccggtaacccgaacccgccgccaacggggcaaaccggcaaaaacacagacgctgacggtgtataaagcggatggctccacctcaacggtaataaaggagaaaaaataa

SEQ ID NO: 299820 - DNA, 213 bp, Proteus mirabilis
atgtttcttgagcatatcacccgtcacggagaacgctgggatacgcttgcctggcactattatggtgacccgctgggataccctcggattattgcggcgaatccgcatattgccatcacaccggtattgccttccggcgtggtggtgcttatccctgtcattgacgtcggagaggcaggcactgaggaggatattgcgccatggctgagataa

SEQ ID NO: 299821 - DNA, 885 bp, Proteus mirabilis
atgtttgcggtactgggggatatagaatttgaactgatcacgtactgggacggcttcgaaatgacgtccggtgtcgattatgccgaacatgcccgtattgaaggcaaacccggtttacagtttatcggtgaccggctggatgagatccaaatcgcgctggtttttcatcagcattattgtgtcccggataccgaactgacccggttacgtacggcaatgaaagcccatcaggcgctggcactggtcttcggcaacggagattaccggggctggtttgtcattactgatattactgcggtcagcgagcagaccgacagtaccggtaatgtgctagccatgaatgccaccatgtcattgcgcgaatataccggagacccgaaaaatccgctgaaaccgcccgccatacgcactcaggtacccggtgtcagcacactttccggtgccgtaccgaaaccgtccggtatcgctcagcttgtccgggacggggtgaattatacccggcaggcgcagtccgtactgcagacaacggtcagtgccgtccggattgcacaaaaaatgaaaaacaatccggctgctgcactgacccgtgtcccgggactgatgagtcatctgggcaatatgtctgacgcactgggtaacagcgtaccggcgttccgttcactttcagcagccatgcccgaagccatcacattagcccgggcgggcagtgaggcggtgtcgtatgtgcagcaggcccgggcgtcactgagcagtacggacagtaaaaatattgccgctgtactggacggggtctccggtcagctggggtcggcaacaaccgtgctgacccacatttcaccgacattaagtaaaatggccgccggaattatggtaaggagcgtgtaa

SEQ ID NO: 299822 - DNA, 2967 bp, Proteus mirabilis
ttggccggtaatttttctgtgggtgttgtcatcggcggcatcgttggcagcacgttccgttccgcgatgagtggtacccgccgtgcccttgactccctgggggagacttcacgtcgtctgcaggagcgtcagaacgccttaacccgggccacagagcgttacggtcagttaggtggtgcccggatgcagcagcttaaccgtgagctgttacgggtaggccgcacgatggaacagattgaacgtcagcagcgccgcctttctgccgcatccgcaaccggcgatgcactgaaagccaaccgtatggccctttatggtcagggcgttgaaacctatgccatggcacaaacggtttatcatacaatctctcctgcagttcagcagtctatgtcttttgaagacaagatgattgatatgtcaatcactgcaaaatatgacactgatactcagaatcatctcgccgcacagataaaaggatgggcattaaaatacaatcagaatcaggatgagatgcaggaggcggtaggttcactcatcagtaataatatcgacagcctgtctgatatcggatactacatgcctgatattgcccgtgcggcaacagccacacgcacagcgggggccgactgggccaaagtcgccgctgtctggcaaacgtccctgaaaggagcggcagaagacttcggggctgtacaaaatattatggcttatgccggtgatcagggttcatttgaaatccctgatcaggtcaaatggatgcagtctcttgcccctatgatggaaggtgtcgccagcggtaaagacgccgtggctgaaatcggtgccagtctgcagattgcaaaaatcggggcgggttcaactgatgaggcggcgaataactttaaaaattttctgaccaaaatttttgcccgggatacccaaaagcaatttgcagatttggggattgaccttcaggcgtctcttgaaagttataaatctgccggtatatcccccatcgaaggaatgatgaatatcattgaacgatacctgaatgccaaaagccccgaggcactgtcaggttttaaatctgccatgaaaatagaaaatgataccgccagagacgaagcgcttcaggctctggctaaaaattttggtttgggggagatgtttgcagatcagcaggtcatggcatttatccgcccgatgctggcaaatatggatcgatatcgcgaaatacgggccggtgcacttaaagcggcagataatgatcttctgggaaccgcttatgaccggcgtctgcaatccccgctcgaagccaccaaagcactgatgatcaatagtcgtgatcttgccatcacattgggagatcaacttgcaccgtcttttgtctctcttgcgcaggaattgcttccgttgatacaaaagacaaaaaactggatcacacttcatcctgagctggtcagcggtgcaatacagattgtggctgccctgctggccttcaaagcctcaaccattgccctgaagctggggctgaatcttctgctctccccctttgtcaatgtctggaaaaatctcgttttactccgggcaaactggttacgtctgacactggcattcggtgagggcggaaaactgcgctggatggcaaccgggctgagccgtgtcggtaaaggtgcagccagcctgggcaaaatactagccggaggcttactcagaggattaacgctcgccggtaaagccatactctgggtgggaaaagccttactgatgaatcccatcggtctgattattaccggtattgcggtcgccgcgtatctgctgtaccgctactgggggccgatctccgccttttttaaacgcttatgggcgcaggtaacctctgcattcagtcgtgcatggcagagtattactgccgtctggcagggcgtttcaggctggttttccggtatctggactgaaattaagacggcttttgacggcgggattgccggtgtcggccagctgattctcaactggtcgccgctgggattatttcataaagcctttgccggtgtgctgtcatggttcggtattgatatgccaaaaagttttaccgatttcggtaaaaacctgattacggggctggtcgatgggatcagtaatcagctgactgctgcaaaagaaacgattgtgaatttcggcagttctgtctcttcctggtttaaagaaacgctcgggattaattcacccagccgggtttttatggggttcggcgataacatcgtgcagggtgcggccattggtttgcaacgcacaacgccactggcagcaaaagccagccagcagctggcaaatcagatggtgccctcattaccgatgattcacactgatagccaggtctcatcactggctgacggcgttcatcataaactgaatgtggccaaaaacatggtgacccgtttgagtagtgttatgtctgatggatttaatcagacagtcggattacgccatactcctcctgatgtggtcaatgtcagtccgcgtcctgcggaacgtttattaccttttgtttcccaggagaatgaacttatgccactgattaacggtgtccgtcatattctcagtgccgttaaaaataccgtggtcagcccgggagattcacttgtcgcccggttctctgacatcctcgccgcattctcagcgataccgtcaggtatcccgcctgccatgcctccggtcttgccggggcagcatattgcggagtcaatgtcaccggcggccccccgcatcccccctgacgaggtaatgactgcggggtatgccggacaacgtgccggtaagacagacacggccccggcgattcaggtcagttttaatccgcagttttttctcaataacaaagaaacaaccgtacctgacacactgtctggtgcgttgaatatgagtctgcatgaactggaaaaaatgctggcgcgtctgctggcccagaaacaacgccgggggtacgaataa

SEQ ID NO: 299823 - DNA, 330 bp, Proteus mirabilis
atgtcacagccacaccatgatgtttttatccccgtatacccctttatgaccgcagccggttcccgtattgagcgtattgagctgaaacgactgaccgtcaaagacctgaagcaggtgcgaaaaacgtataaagacccggcagactgggatgagccgctgattgcccgcagcaccggtcttattccggaagatctggagaatatggatctggcggattatctggagttacagaaacgatttcagcaaatcactgggctgggtaaaagcgacacaggcactgatgcaggctcaggggctgctggcgaggtggttccggtttcagccgggtga

SEQ ID NO: 299824 - DNA, 282 bp, Proteus mirabilis
gtgactgtcgaaattgaagacaaaggcgggaactgtgcggcgattggtatggggaatggtacctggtttaccctcctcgatattcccggagtggaaaaactgtttaatacacagaaaaccaatgacccgattgactgtacccgttcaaaagcccgtaagctggcagacctgattgaggcatgggagccacctgaacactggttcagcggcatcggcaaagacgaaggcaaagctgtcctcatttcttttctgcgtcactgcaaaggctttcgtacgcactga

SEQ ID NO: 299825 - DNA, 522 bp, Proteus mirabilis
atgccaaagattgagattaaccgcattaccaatgccaatatttacctggacggcgcgaatctgctgggccgggctgaagaggtcaaactgccggacgtctccatgaccatgcaggagcataaagcactgggcatggtgggcaaagtggaactcccggcagggtttgacaaaatggaaggtgagatcaaatggaacagcttttaccgtgatgccatgttgtccgccgccaatccgtacaaatcgctgtcactgcagtgccgttccagtgtacagcgttacagttctcagggactgattgatgaaatcccgctggtgacgttcctgaccgtcatgttcaagaagaatccgctgggcacattcaaacagcatgagaatgccgagttctccagcagcttcacctgcacatacatcaaacaggtactggatggtgaggagctgctggagctggattatctggccaatatcttccgcgtcggcggagttgaccagttgacagactaccgcatcaatatcggaggctga

SEQ ID NO: 299826 - DNA, 1428 bp, Proteus mirabilis
atggccgctaattatctgcatggtgttgagactcttgaggtggaaaaaggggcgcgcccggtcagcatggtcaagtctgcggtgattggtctggtgggaacggccccggcaggcagtaccaacacactggtgcagtgcctgtctgaaaaagatgccgccgtgtttggcaaccagctcaccggttttaccattccgcaggcgctggatgcgatttacgaccatggtgcaggcactgttctggtcatcaatgtccttgacccggcggtacataacaccacggtggcagacgaaaaagtgacttttgacaaagcgaccgggaaagcctggctggctcatccggttgtgtcccagctggtgctgacgtcggaggatggcgcacagtcctataccgacggccaggattacgcactggatgcgcaaagcggaacaatcacgaacctcgggaaaggcatcgctgcgggagccacggtgaaagccgggtaccgttatgctgacccgaccaaagtcacggcagcagatatcattggtgcggtcaatgccgccggtaaccgtaccggcatgaagctgctcagtgacagttttaacctgttcggctatttcgccaaaatcctgattgccccggtgttctgtacccagaacagtgtggcggttgagcttaccgctatggcagagaaactgggcgcggtaacctacatcgacgcgccggtgggcaccacctttgcgcaggcgctggcaggacgcgggccggaaggcaccatcaactttaataccagctctgaccgtgtccgtctgtgttatccgcatgtcagagtctatgacgcggccaccaacagtgagcgtctggaaccgctgagccagcgtgcggcgggattacgggcgaaagtcgatctggaaaaaggctactggtggtcatcctccaatcaggagatcctcggcatcaccggcgtggaacgccagctgtccgccatgattgacgatccgcagagcgaggtgaatctgctcaacgaacagggcatcacgaccgttttcagcagctacggcagcggtctgcgcctgtggggcaaccggatggcagcctggccgacggtcacccatatgcgcaactttgaaaatgtgcgccgcaccggagacatgattaatgaatccatccgttacttcagccagcagtatatcgaccagcccatcacccaggcgctgattgatgcgctgaccgagtcggtcaatgcgttcggacgcaagctgattggtgacggtgcgcttctgggtttcagctgctggtttgatcctgcccgcaacgaagagaccgaactggccgccgggcatcttctgctgagttacaaatacacgccaccgccgccgctggagagactgacgtttgagactgaaatcacgtcggaatacctgttaaccctgaaaggaaacagctga

SEQ ID NO: 299827 - DNA, 246 bp, Proteus mirabilis
atgaaagcataccgctattccggcccggccagcggcgtcacgctgtcggacggaactgaaattctgctctggccggggaaaacacatcttctgcctgagcaacatgactatgtgaaggtactggtggcgctcgggcatctgataccggtacaggaagagacaccggccgccggaacacccgccgtgtcgttaccgaaacgccgcaatgacagtgagatgaaaaaggaggacacgcatggccgctaa

SEQ ID NO: 299828 - DNA, 465 bp, Proteus mirabilis
atgaacgttctgccggtgattgatgcggtggtggcacgcctgaaggaaaaactcccggggctgtcggtggagtattttccggaaaaaccggcggaataccggctgaatcatccggtcggggcgctgctggtgagttatgccgggtcgcgcttcgataagccggatgatatcggcgcggtgatccagcctcagacactccagttgtgtgtgacggtggttttccggcagctgaacgggaaacggggtgccattgatgtgctggatatgctccgccgcattctgggcgggtataccccgccggactgccgccgccgcatctggctgacccgggaggtttttatcggggaggtgaacggactgtggcagtacgccctcgattttgccaccgaaagcgtttttgttgaagacagcgatttaccctccgggccgctgttaaccatcgttgattatgaggaaagcgagtga

SEQ ID NO: 299829 - DNA, 447 bp, Proteus mirabilis
atgtactgcaccccggcggatttacctgaacagataccggagcggacactcatccagctgaccaatgaagagctggatttcagtgtcccggctgcggtgaacaccaccgtggtggacagctgtatccgttatgccgatgagcttatcgatgcgtatcttcgtggccgctataccctgccgctggcagaagtcccgacggtgctgcgggacattgccattacgctggtgcgttaccggctctacgcccgccgtccggaaggggctgtcccggacacggtgaaagacgaccataaagaagcccggcgacagctggaggctatccgtgacggaaaactgacactggggttgcagaccacacaaaaagatgtgccggagtccggtgaaatccgtacccgggcacgtcgtccgacctttggcggtcaggatggcttactggagaaatactga

SEQ ID NO: 299830 - DNA, 357 bp, Proteus mirabilis
atggggacaactcagcaggtcattctgaccaccaccgtgacagccggtgccgcactgacgcaacagcgctttgtcggggccgataacgcgccctgtcaggccggagccgtcgcgctcggtgtggcagaggtggatgccgctgccggtgatgccacgccggtcagcgtactgggtattgtggccgtcgaagccggcgcggccataacccggggacaggcagtgcagtccgatgccaatgcctgtgccattccccggaccgccgcgaccggagacaccgccgcgggcatctcagccgggattgcactggatgacgccactgccgccggtgaggtgatccgtatcctgcgcggggtgtga

SEQ ID NO: 299831 - DNA, 954 bp, Proteus mirabilis
atgtctgattatttaaaaggtaagcgcgttgttgacccggtgctgaccagtattgcccggggttataaaaatgccgcgttcatcggcgagcgaattttccctgtcgtccataccgataaggaaggtgtgaccgtgccgaccttcggtaaatccgcctttgtggaatacgacaccgagcgtgccgtgggggctgacagtaacgttctggtgcgcgagaaaaccggcaaactggatctggttctcaacgagcacgatctggccgcgccggtggactaccgcgagcaggcggaatcgatgttcaacgaagaggccaaagctatccgtcgtgtgacgaacggcgtcaacctgaagcgcgaactgtatgccgcccgtctggcacaggacaaaaccgtctataaagcgacaaatgtgaaaaccctgaaggccgacgaacgctgggccggaggcaaaggtgacccgatcggggttattgaagccgggattgaggcggtgcgtaacaccaccggtctgcgcccgaatctgatgaccatgggagccagtgtgatggcactgctgaaattccatccggcgattcaggcggcgattggtgccaacgagcgcaagcgcatcaccctcgacattctgaaagaccttttccaggtggacgaagtggtaatcggcgagccggtctccatggcttccatgaaagaggcgcaggacaaagacaaactcccgtctgacatctggggcgacaacctgatgctgcattacgtcggtaaagcgcaggcgggcgcagacagtgcggatgaaaacgagccgtcattcgggtacaccctgcgccgtaaagggatgccggtggcggacaaatacgacagcaacggcggcaaggtgaagtactgccgttataccgatatctacaaagtcgccgtggtcggcggcgatgccggatatctcatcaccaacatcgtgaaataa

SEQ ID NO: 299832 - DNA, 1098 bp, Proteus mirabilis
atgccagctattcatattttcaaagccggaacgcataccgatatgcacggcacaaaactgccgttcacgcaacgcgatcttgccgcctgcgtgaacgcctatgacccgtccgtccatgaagcacccctcgtgattggtcaccccagaacagacgacccggcatggggctgggtgaaatccctgtcactgaacggcggtgatctgttagccgaacccgctcagcttgatccgcagtttgcggaactggtggataacggacgtttcaaaaaagtgtctgcctcattttatcttccggactcctcaagcaatcccaaaccgggcacgctttacctgcgtcatgtcggttttctgggagcacagccgccttccgttaaggggctgaagccggtttcattcagtgaacaggaagacggcgtcgtggaatttgctgactggaatgataccaccaatgcctccttatgggggcgtctgcgggatttcctgattgcccgcttcgggctggatgagacagataaagtgcttcccgcctggcaggtagacgccctgcgtgaagaggcctgccgcgacaccgggaagccggaaccggaattcagtgaacaatccctccctcctcaacaagagagcaacacaatgactgaagaagaaatcaaagcacttcaggcggaaaacgcccgtctgaaagcggaagcctccgcccgagccgagcaggatgcgaaagcgaagcaggacaaactgcatgccgataatgtggcctttgccgaaaaactgacaggggatggccgactggctcctaaagcgaagtcggttgtcgtggccatccttgacgcgatctctgcaggcgataagccggttgaatttgccgagggtgatacccgcaccccgctggctacggcgtttaagacgttgctggacagcactgagccggtactgaatttcagtgagcatgcgaccagagagcgcgtggacacggatatcagcacaacgtcagtggagttcgcggaggctgacccggaacgtctggcactgcatgagaaagcgctggcactgtcgaaaaaagaaggcatcagctacgacgctgctgtcgcccgctgcctgtga

SEQ ID NO: 299833 - DNA, 459 bp, Proteus mirabilis
atggcttccggcaatctggtcactatcaccattaacgatcaatccctgcgtcaggcactgaaagcgctggaatcagctgcaacagacatgacacccgcgatgcgcaaaatcgccggaacgttgctgacagaaacacagtttaattttctcggtgaagggcgtccgggatggctgccgtcactggctgccactgagcgtgacggacagacacttcaggacaccgggcgtctgatggggtcagtctcaaccgaccatgacgaccggcaggcggctgtcggcacgaacgttgtttacggtgccattcaccagttcgggggaaaaacgggacgtcatgagtccgttgagcttcctgcccgcccgtatttaccactgaccggcgacaatgaactgcaaccggaggcggaaaaagccgtactggatacgattgtgcggcatcttgaagtagcggcccgtcgctga

SEQ ID NO: 299834 - DNA, 714 bp, Proteus mirabilis
atgtggcaggaggcgcatgcccgcgcctttactgtcgccaaagtgacccgtctggatattctggaagatatccgccgggccttacagcaggcgctggatgagggaaaaaccggtcgctggttccggcaggcgctggagccggagctgcagcgtaagggatggtggggaccgcgtgacaccactgacccggtgactggcgagcctgtcaccattatgcagggcagcccgtggcggctcgacaccctctttcgcaccaatatgtcggtactttacagcgccggtcgctgggcggagcaaatggagaacgttgatgacagaccgtactggatgtataccggcatcagtgaccgccgtacccgcaggagccatctggcactgcatggtctggtgctgcgttatgatgatccgttctggcaggcattctatccgccaaacggctggcgttgccgttgtggtgtgattgccctgagtgcggcagatgtacgtgcccgaggcctgaaggtgataaattcaggtgatgctatggggtgggagctgaagctggtctcagcgaaaaccggtgagatgcggaacgtcgccaccttccgtaccggcaccacgaaggtggccaccgacgtcggctggtcttatgcgccgggtgcggcttaccggcccgaccttgcccgttatcaggggacgcttcagccgctggcacaacaggaactgagaggataa

SEQ ID NO: 299835 - DNA, 1500 bp, Proteus mirabilis
atggccagaggactctggatttcgcccactgaatttgtctcgtttgccgaaccggcaaaaacactgactgcacagattgcctcccgcagtcgtgccatcgactttttcggactgggcatgtacctgcctaaccctgaccctattctgaaatcacagggccgggatatccgtatttatcgtgagttgcgtaccgacccgctggtcggtgggtgtatccgcaggcgtaaggctgcggttaaatcgcttgagcgcggacttgagcgcggtcatgctcctgcccgagtgttcagcttcatccgggatatgcttgatgacctggatttgtcccgcattatcggcgagatgacggatgccgttctctacggctatcagccctgtgagattatgtggggacgctccgcccgcgcctggcacatcaccgatatcgtgggcaaaccaccggaatggttcctgtttgacaacgacaaccggctgcgtttccgggcgaaagatgccgggacggagggggaagacgttcccctgaacaagttcgtcgttccgcgtcaggatgccacttatgataacccatatggcttccctgacctgtcaatgtgcttctggccggtgaccttcaaaaaaggcggtatgaaattctgggtgcgctttgccgagaaatacggttcaccgtgggtgattggcaagcatccgcgcggtacagcacagggggaaattgacctgctgctggactccatggaagccatggtggaagacgcggtggccgccatccctgacgattcctccattgaaatcaaggaagccgcaggtaaggccgacagcagcgatatttatcagaacctgataacgcttgcccgcagtgaaatatccatcgcgctgctggggcagaatcagaccaccgaggccaacagtaaccgcgcgtccgcgcaggccggactggaggtcaccgatgatatccgcgatgcggatgccgatatcgtggaaagtgcggtgaatcaggccatcaggatggcggtctcgatgaacttcggtgatgtcgcctgtcccgtctggaaaatgtgggaacagggaacggtcgatgatacccaggcgacccgggatgagaaactcacccgcgccggtgtggtcttcaccccgcaatacttcaaacgcgaatatcagctgcaggacggcgatattgatgagacaccaccgtctgaacgacagaagaacactatgctgccgctgtcgttcgccgaggcggttgatgccgatattcaggcacagcagcagcttgacgacgcgctggatattctgctgaacggcggcacgttaaatggcacgctggaacccgttttagcgccgctgtttaagcgggttgaagatggtgtggcaccgtccgaactgctgggggaactggccgaactttacccgcagatgaacgcggaagacctgcaggagcggctggcacggatactgtttgtggcaactgtctgggggcgtctgcatgagcgtgaccacggctga

SEQ ID NO: 299836 - DNA, 1524 bp, Proteus mirabilis
atgagccagctgactcctgttttacctgatacctcggcgctggatattcccgtcgttctgatgccctaccagcagcgctgggtggctgacacgtctccgcttaaggtgatggagaagagccgccgaaccggtatcacctgggctgaggcatccgataacgtactgaccgccgcgtcctccgtcaccgcaggcgggatgaatgtctattacatcgcctataaccaggacatgaccattgagtatattcaggcgtgtgcgatgtgggcacgggcattcaactatgccgcaggcgaaatcgaagagggtttctgggaagaggacgaagacgacaagcacatcaaaacctacaccatcagattcccggattccggcttccgcgtggtggctctctccagtcgtccgtctaacctgcgtggccgccagggtatcatcgttatcgatgaggccgcgttccatgagcaactggacgagctgctgaaggcggcgctggcaatgcttatctggggcggtaaagtgcgcgttatctccacgcataacggtgatgataatccgtttaataccctgattggcgacatccgcgccgggcgtcagggaggctgtattcaccgcattacgttcagagatgcggtggcagaaggactgttccgtcgtgtctgcctgcgtaccgggcaggaatggtcggaggcatccgagcaggcgtggatggcatcggtgtacaaattctacggtgccggtgcatccgaggagcttgactgtgttcctgccaacggcggcggtgcctggttgtcccgtgccctgattgagtcccggatgtcggctggcacgccggtgttgcgcctgacctgcccggagggctacgaactgaggcccgacgacgaacgtttccgcgagacgcaggactggctggatgaacacctgaaaccactgctgaaggcattacccgctgaggcccgttctttcctggggcgtgactttggccgcagtggtgacctgtcagtggattatcccctgttacaggaaaaaaacctgatacgacgggtgccgttcgtgctggagctgcgtaacgtgccgtttaaacaacaggagcaaatcacctggtatctgatggacggtcttcccggtttgctgggagccgcatttgacgcccggggtaacggtgcgtatctggcggaatacgccatgcagcgttacggtgccagccgggtaaaacaggtgatgccaaccgaaggctggtaccgtgagcatatgccgccggtcaaagccgctctggaagacggcaacctcgtggatttaccaaaagatgaggatacgctggacgacctgcgggcggttcaggtcgtcaacggtgttccgcgcgtgccggaacaacggtcaaaatccaaaacagacggcggcaaacgtcatggtgatgccgccattgcactggcgctggcatactttgccagccgtgaaattaacaaagggccggtgaaggcaacgtcccgtcgtcggcgtcaggcggcccggttgctggagggattctga

SEQ ID NO: 299837 - DNA, 546 bp, Proteus mirabilis
atggccagacgcagctcaatagaaaaactgccggaagacgtgcgccgctggcttgagcgggcgctgactgaatccggcttcagcgggtataacgagctggaatccctgctgcgtgaacggggttatgtcatcagcaaatccgctatccatcgttatggtcagaaaattgagcgccgctatggcgctatccgtgcggcgacagaagcagcacgcatgctgaccgaaggtgcggcagatgatcaggatgcacgctcggaggcggtcatagccctgattcagaccgaactgttcgagagcattgttcagctgcaggaggcggaagaaggtgaaattgatcccaaagagcgcgtggcgctgctgtcgaaagtagcgaagaatgtggccacgctgtcccgcgcctccgtcaacctgaagaagtttcagaccgaagtccgcaccagagcacagcaggccgccctcaacgccgagaaaattgcccgcaaaggtggcctttcagccgatgcagtgctggcgttgcgccgtgaaatcctggggattgccacatga

SEQ ID NO: 299838 - DNA, 312 bp, Proteus mirabilis
atggttgatattacccgggtgcgccgcgaatccctgcgctggagtctgttggtggcactgaataaaacccgcccttataccgccagtgaaaccctgttactgaatgtggccagggctatttatccggataccaccgcactggaattacgccgcgagctggattatctgtctgaccgtaagatggttgatctggagaagaaaccctccggtgactggtttgcggatctgacccgtctcggcgtggatattgtggagtataccgtagaatgtggccccggtattgcccgcccgcagaaatactggagtgaataa

SEQ ID NO: 299839 - DNA, 336 bp, Proteus mirabilis
atgacattacagatcgaattctggacggtggtaggttttctcatcaccttcatgagctttgtcggcggcatggccaaatggttgttcagcaaggctgaggaacgtcaggctgcccgtttcgcctcactggagcaggcattacaccagtccgcctctgaatggggagcgctggagaaagaattcatgcgtttcagggcagatttaccgctgaattacgtccgccgggaagattatatccggggacagacggtcatcgaggccaaactggacgcgctttataacaaactggaagtggtacagcagtaccggaataccggaggtcagagtcatggttga

SEQ ID NO: 299840 - DNA, 654 bp, Proteus mirabilis
gtgtggattaagctgataaaaaaactgccgtggcgcgaattgttgctgttcctgattatcagcgggtttctcgccggggtgtatcacatgggatacagcaccggtcacgataatgccgcgcgtgatggagaggcagccgttaataaactgcagtctgaatttaatcagtaccggagagtacaggccgagcgggagaacgccgcgctcaaagcctgggccgcccgctatcaggctcaggtcgctgccgggcagcaggccggggcggattaccttgagcagatagctcagcttaagacacagaaccgacaattacaggggaagattaacgatgttacccaacgctggatggatgaaaaaggcaaaagccatcccattgagtgtgtgtttactcgcggtttcgtgcgccagtacaacgccgcgctcggatatgacaacgtatccgccgacaccggtcgttcaaactccggtgcctccgctggcaccggcactggcacaacgtccggagccactgaaaccgctgacacccggctacgcgactcaggtgtcacacagcaggacatccttgccaaccttatcgacaacgcaacacagtgccgcatctggcgaacccagataaatgccctgctggatgaacgggaaggattacaacaatga

SEQ ID NO: 299841 - DNA, 729 bp, Proteus mirabilis
gtgaccatgaactggcctcagattaccttcatctttctgattgcgtttggtctgggtgtgaccgccattaagcatggcgaatcacgcaacgataaatacagcttctggtggcagctcgcaggcaacctggtgattgtctggctgctctggtgtggcggcttcttcagtcaggctaacgcggctcaacctccgcgagctgccctgcagtatcgcgatgaggtgatccgtcatgcccggattgaatggggaatgtctgcaccggtggccgattttgccgcacaactgcatcaggaaagtggctggcgtcccggtgccgtatcaccggcgggtgctcagggtatggcgcagttcatgcctgccaccgccgactggataagccgcaccgttcctgaactgtgctcgcgcgagccgtttaatccgtcctgggctgttcgggcactggtcagttatgaccactggctgtggcagcgtgtcagtgcggctgataactgcgaacgtatggccatgacgctgtcgggttataacggcggtctgggctgggtacaacgggacaaacggctggcttcacagcaggggctggacagccagcgctggtttggtcatgtcgccaccgtcaatgccggacgcagtgccgccaactggcgcgagaaccggcactatccgcagcgtattttacgggagctggcaccgcgctaccgctcctggggaggcggcagttgtgtggattaa

SEQ ID NO: 299842 - DNA, 351 bp, Proteus mirabilis
atgaaaaacctgaaaaaatttattcctcccgttaaaaaaccccgtctcatcggatggctgctgaccgctttactgctgctcggtattatcggtcttgtatcaccgcagcaactgccggtagtagtctacaaattgtcactcatcacactggctgctgtactgggctactggcttgaccggtcacttttccccaaagcccgtccgggtcagtacctgctacacgataaaaatctgatgtcggaaggtcgctatcccgttcagacaggacgccatctggtattttccgctgccctgatccgccgtgcgctgattgttgcggcagtctgcctgtctgtggcaacggggctgtga

SEQ ID NO: 299843 - DNA, 768 bp, Proteus mirabilis
atgaaacagcaatttttacccatcgtcccctggattggcgggaaacgccgtctggccaaacatattctgccattgtttcctgctcatacctgctacgtggaaccattctgcggcgcagcggcactttacttccttaagaacccctgcaaggttgaggtcatcaatgatatcaatggcgaattagtcaacctctaccgggtggtaaagcatcatctggaagagttcgtccgtcagttcaaatgggcactggtcagccgccagatttataagtggctgcaggataccccggaagaaacactcactgacattcagcgggcggcaaggttctactatctgcagaagcaggcgtttggcggtaaggtggcagaacatacattcggaatatccaccaccagtgcaccgcgttttaacctgttgcgtattgaagaggaactgtcgatggcacacctgcgcctgtccagaacactgatagagcacttggactggcaccagtgtattgagcgttatgatcgccagcatacgctgttctactgcgacccgccgtactggggaacggaaggttatggtgtggactttccgataggtaactatatccatatagcggaactggccaggagtatcaaagggaaaatgattatatcagtgaacgatatccctgaaatgcgacagatatttaacggcctgaatattcacagtgtagagattaattacagtcttgcagcgaagggaacatcacgaagtgaacttattgtaagtaatttagagtag

SEQ ID NO: 299844 - DNA, 438 bp, Proteus mirabilis
atgcatatattggagaagatgaactcggccctattgcttagattgttgattggatgtggaataggttttctctactggttcaagttgccccacatgccagtagccgcaatcccaaactttatgacaacattatccagtgtttttgcaacattactgggttttattattacagcaattgcgctactcgcatcgttgcttgataaaccgttacttaaaaatatgcaaaaaacgggacattacaggcgcttgatgagtgatgcattcgatacttgcttggttctgttagtgttggtgttgacatgcttaattgggctaatgctgcaaagcaaacatcaagagtttatagccgctattcttatcgggcttgttgccacgtctatgttatgtttattacaaacaggcagacgattgttcaatattatcaaagtaatatcataa

SEQ ID NO: 299845 - DNA, 894 bp, Proteus mirabilis
atgagtggtgatgtaagaaattatcgtattgagttttatcagttatcgtttaagtccacaaaacagttagcaaatctcggagatgcttttcagtctgtagttaataagctgacaccttcatcttcaaatcatgagggttttactagagaaatttgggggttgaaaaaacgcgtggatggttcttttagtggtgagctgaggaaatttcgcaactcgaatatcccagataaaggtgcaccaggaaagcagtctaccccgattccacttgctaaggatgaaggaatcattgaacgcaatttttttgtattttatcctcaaatcaatatagtaggttggcactacaatcatgtggcttgtggcataacccgttttagtgcatttctttcaactatctttggttcaaaggttaagcctgcgcctttgctggaaaaagatgcaattactaggctaatgaggggagatgtcaaaatgaaaaaaattcagttaacgattcctcgcccccgtaaccctgagctttaccctgatactgatttcagccaaaaaacactacaactgcttggtgatgcgggggctgatacaatgcaaattataatggggattaatactcgtcgtggcgatagtgacggtaggcttaaacagaatataaaatttgctatgcaagaattggtcgagttcggggcgaaaaaggcggtaattgatgtgtttgattctgatggtgttgtccatccaatagatttgatcgccgagcgtatttcgtcctatcaatcggtggttactgacgctcgtttccctccagccgaaaccatgtaccgcctaatcgatactgcgtatgctgaaaaccgggagagtatcaatgcatatattggagaagatgaactcggccctattgcttag

SEQ ID NO: 299846 - DNA, 393 bp, Proteus mirabilis
gtgcttctgcgactaatgtcactgtttaatgttgataacgacagtgagctggctcgtatgctgaatgttaatagacagactttagctagctggagaaagcgagactctgtgccttattcaatttgcataaacattgcagaggaaaagggtatttctcttgactggttacttacaggtaaaggcgaggataggagcgaggtattgacgattgaacctgcaacgcaaaacttcagtccagctgatcttaaaatgcttgaactcttaaatcagctagacccagaggttcgccgagatctcatgcgaggcgctgaagaaaaacagcgtgtaattgaaatggaaaaacaacttaaagaattatccgaaacaattgagcggctaaaaaatgtgggttaa

SEQ ID NO: 299847 - DNA, 225 bp, Proteus mirabilis
atgaacaaacaacaggttcgggcacgactgattgaacggggcagcagcctacgccagttcgcgcttaacgctggctatgagccacggactgttacccaggcagtaagccgctgggctggccggaatgagcttccccgtgggcgtctgacgtatcgcattctgcgagatctgtccatcgtgatcggtaaagaagttacacccggcatccttcaggaggtgtcatga

SEQ ID NO: 299848 - DNA, 306 bp, Proteus mirabilis
atgagaaaagtaaatatttccagctcaggttcccgcattttgcgtgttcttaaagctcttcgcggtcacacacttaatgggatctcaaatggtgagctggcattagcacttgaagattctccggccaatatcaaccgtgcgttaaatacactgatcgaagaagggctagcaatgaagctggataacggtcgttttgcaccgggcatccagcttttgcagatcgctgttgcgtatagcaatgagatgagccgggcacaggatcgcataaacgaaattaaccaacgggtattagctggtagtcgataa

SEQ ID NO: 299849 - DNA, 909 bp, Proteus mirabilis
atgggacgcgaaaaaatacaacctgctgaattagtagagaattcacagctatccgatgatataaacgtcaatcttaatgccatggctgagcatcgccttgaaatcatgcagcagtttggtgaaggtctgccttacgaacgtgatcgtattgtccacgaaacgaagttttacatggcacaatcggcagaagcaatgctggaagcaggtaaacgactgattattcttaaagaatgtgaacctcatggcgatttcactcaaataattacagaacaacttggtcttgcggaaagaaccgccagattggtcatgcaggcagctgttaaatattgctcaccagagttggagtcaaaacggcaagcgcttgccgttttgggaaaaacaaagttgtttgaacttatgactgaagatgatggagacctagttgaattagctgatggcggtacgatcgccggtatgagccttgatgatattgatcgcatgacaagtcgtgaactgaaggccgcactgcgcgaagcacgtgagaccaacgcagcacaacagcgcgttctcgccgataaaaacgagaagattgacacgctctccacaaagctggagaagaaatcccggatacaaccaccaaaacccgacgaagaagtgaagatgttgcgggcagaagtgaccgcattatccactgaggcggaatctgccatcactgtccgcctgttcagcgccttcgagatcctgagcgcctattgcgcagaaaaccagattgatacgccgaaagactttatggcgggactggtctgcgaactggagagcgctacccgcaacctgcgttctgcatttgatctgccggatgagccgaccggcaacgttgccccttcctggctgacagacccgatacctgagattaacgggcgggaggcataa

SEQ ID NO: 299850 - DNA, 1770 bp, Proteus mirabilis
atgagtgctgccctgactgaacgactggtttctgttgcccgcgcggcacgtgacgcggggcatggtaaacgtggtgcaatatacgacgccgcctgcacagaactgggtatatcccgtgccacactgctgcgcaagctgaaggaggtatcagtgactgacaaacgcaaaaaacgcgctgatgcaggacgcagctcactgagccgcgatgaagctgcgctgatatccgccacactgcgcgaagctacccgtaaaaatggcaagcgcctgtattccatcgcggatgcggtggaaactctgaggtcaaacggttttatcaccgcaggtagaacggacgaggccacaggcgagtttttccctctgtcagatgacaccatcagccgcgcattgcgtaactatggcctgcacccggaacagcttgatgcaccggctccatcctcagaggtagcaagtctgcaccctaatcacgtctgggagattgatgcgtcgctttgtacgctttactacttgagtaacggtcacaaggggctgcaggtaatggacagcgcgaagttctacaagaataagcctgccaaccttgcccgtatcgccagtgaccgggtatggagctatgagataaccgaccataccagtggctggatttacgttgagtacgtgatgggggcggagtccggtgagaatctctgttctgttcttattaacgccatgcaggaacgtggcggcgctgacgtgctgcacggtgtgcctaaaatactctacctcgaccccggctcggcgaacactgctggcatgacgaagaacctgtgccgttctctgggtatcgagctgacagcacacaagccgcataacgcccgcgccaccgggcaggtggaaaaggcccgtgacattatcgaacgcaaactggagccgggtctcaaattccagccggttcatagcctggacgaactgaacgcgctggcggtgaaatggcgcagccactttaacgccacagcggtccacagccgccacggtaaaacccgcacggatatctggctgaagattactgctgaccagctgaaaaaagcgccgtccgttgaagtatgccgtgagctggctgtggctgcacctgaacttcgcaaggtcacgccaaaacttcgtgtctccttccggggcactgagtttgatgtttcaacggtgccgggcgtactggtcggcgaaaaactgatgattacccgcaacccgtggcgcactgatgtggcacaggtggtactgaccggagaagacggtcacgaaacctttttcctggtcgatgaagtcagaaagaacgaattcggatttgctgaaaatgcggcggtattcggcgggaatcacaaagccctgccggaaaccccggctcagaaagcgacaaaagaaatcgaagaactgctcactggcacagataacgccaccgatgcagctgctgcacgcaaaacgaaggcgctaccgttcggcgggcgacttgacccgtacaaacatatcgatgacaccacacttccggcctatatgccgaaacgcggtcaggcttcagacgtgcgcgggccgcgtattgaacagcgtcctttaacccatgtggaggctgcaaaaatcctgcgcgagaaattcagcgctgccggtcatgcctggacaccggaacattaccgccggttaacggcacagtacccggacggcgtaccggaagccgcgctggatgaagtgatggccgttctgaccacgaccgcccacaacagcgttatcagcattgttaacggcaactga

SEQ ID NO: 299851 - DNA, 1167 bp, Proteus mirabilis
atgctggtactaaaacaacaactgaaggaggcccgcatcccgcaggcggtggtggcgagagctgtcgccgtttccgaggccacgctggcccagattgtgaatcataacgtgtggccccgtacctgtcccggagaagtgcgccagcgtcttgcatcctggctgaaaagtcagggaattgatacagcaaagagttttgaggctgtacagggcgcgaccacgccctgtacagcgggtactactgataaagcaatcctcagcgaggaagagaatatgttactaaaaaaacaggtgttatttccagcaacaaaaaaagcgtttggccttttccgtgacccgtttgctgacgaagccatacagggcgctgaggatgtgtttaccacacccgatatccgttatgtccgtgaagctctttaccagacagcccgccacggtggttttatggcggttatcggtgagtccggtgcggggaaatccacgctgcgccgtgacctgattgaacgcatcaacagcgagaacgcaccggtcattgtcattgaaccttatatcattgcgatggaagacaacgatgtgaagggaaagaccttaaaagcggcggcgatagcagaagctatcatcagtacgattgcgccgcttgagaatatcaaacgcagtcaggatgcccgtttccgccagttgcaccgtgttctgaaagacagttgtcaggctggtttcagtcacgttctggtgattgaggaggcccacagcctgcccattccgacattgaagcacctcaaacgtttttttgagctggagtccggttttaaaaagctgctgtcgattgtgctggtcgggcaaccagaactggctaccaaactgtccgaacgcaatatggaagtcagggaagtcgttcagcgctgtgaggtggtcgaacttctgcctctggacaataaccttgaagcgtttctgacgttcaaactgcaacgggccggtaaacaactgacagacattatggacgccagtgcggtggatgccatccgtgcccgcctgagtaatccgggcagcacccgtaaaaacagggtcagtctgctgtatccgctggccgtcagtaatctggttattgcagccatgaatctggctgctgaaattggtattccgcaggtcactgctgatgtggtgaaaggtgtttaa

SEQ ID NO: 299852 - DNA, 270 bp, Proteus mirabilis
atgaaaaacataacagcaattaaccagcagatgaataacgtcagcaacgctattacggcacttaacgccatgaatgccacagtgcagagcgtcatgattgcaggcagtaaaccgctaatccgtattgcccgcagcagtctctgctaccgcctgctggcacaaggtaaagcctcttacgtccatatcggacatgggcgttccggcagctttcgtcagggcgtttttgaattacatggctgccgggtcatctggtcagaattattacattaa

SEQ ID NO: 299853 - DNA, 255 bp, Proteus mirabilis
atgagtgacttaattaccgtagatattagcgcggaagcaaaggtgtattacagaagacgggtcaggatgaaacaggaggactacgtaagatatctgtctatctgtgattacgggggagaggatgctgaaatctatgaaatagctgaaaaatatcatttttttgctgattgcgaagacattgtccgtattgatgaacctgaggatattgaattcagcgaagtttcactctcagtcaattcagatgaggaaaaataa

SEQ ID NO: 299854 - DNA, 522 bp, Proteus mirabilis
atggcaaaaaatgcaaagcgaattaaagccagtgcggctgtgtggacggcacagacaaaagatgaagtcatcgccgcaatcaaacaacttggtgatttacagcgggagttaatcagaacagaggcgaaaatgaatgatgctatcggggaaattaccgccggtatgtcgccgttaattgaagaactgaaagcccgtatgaaggagttacaaagcggtatacagacatggtgtgaagcacaccgggatgaattgactaacggaggtaaagtcaagtttgccaatttaaccaccggtgaagtgcaatggcgaaatcgccctccgtcagtgaatatccgtggcgctgatgccgttatggatttcctgaagcgccttggtctgcaacgcttcatccgggtaaaggaggaaataaataaagatgccatcctgaatgaaaaggatgctgtgaaaaatattcccggtattaccataaaaagtgatattgaggatttttctattattccttttgagcaggacgtccagtaa

SEQ ID NO: 299855 - DNA, 273 bp, Proteus mirabilis
atgattacaccagaagaagccagaaagcgtacccgtgaaattatcgaaggctatgtcaatgagtgcggatgcagaaacctcaccgatgttcagcacgtactggaagcattaatcagtatggctgcacaggcggtagtggcgacaaacggcaaaacagccgccattgaggtactgaaaaaaacgcttatccatacggcactgcatgaagtgccgtatcagatggaaacaacggcggatggcgacctcaatattactgtcgcccggaaacactaa

SEQ ID NO: 299856 - DNA, 210 bp, Proteus mirabilis; identical to SEQ ID NO: 290193

SEQ ID NO: 299857 - DNA, 510 bp, Proteus mirabilis
atgcaaaacctttcgttatataaccgctcaacactttaccgtatggcactgaaaatcttcggcccggaagcacagttactgaaactgacagaagaagccgcagaactggccgcagtggcagcccgtaatataaatggtattggcaatggcgtggatttggccagtgagctggctgatgtggaaataatgactgaacaatgccgtctcaacggcatggggaaactcattgactttcagaagcagaaaaagctggcgagactggcagaacgattaggggtgatttacacccctgaaactgaaaaggcacccgccgtcttttacccgccacaattaacagcattagcgcaaaaactgccttcccgtgaactgctggaagactggtgtggtgcagtgccaaacagcgcctttatcggtgccacggacgaagagattgcggctatggcgcgttttattctttgtgttatacccctgcctgatattcacggaggctgtgatgactcagcaaaatga

SEQ ID NO: 299858 - DNA, 690 bp, Proteus mirabilis
atgactcagcaaaatgaaaaaatactggagaaattaaaaaaattactggcgctgtccaaatcagataacccgcacgaagccgctgtggcattacagcgggcacaaaaactgatgcaggcttaccacattactcaggaggatattgcactcagtgatattgatgaaagtctcagtgattactgggcgaccggcagtatccatcctccccgttacatgctggggctgttatccgttatacagaccgcatttggtgtgaaatctatccttcatcccgggataaaacccagaataggattttacggtaataaagagcgggtcagtcttgcgtcctatacatgggaggtactggccagacagttaacggctgcccgtaaacattatattcgtcagcaaaataagcggattaaaaacacgacaaaaaccagccgtggcgaccagttcgcggaaggctgggtgttagctgtccacagtgaaatccggttatttgcgatgtcagatgaggagcgggaacttgctgaacgctggattgaacacaaatacccttcccgcagtaccactcagggacgggaagccggaaatgcacgggatgctaacctgtccggctctctggggtatcaggcgggtaaaaatgtcagactgcaccgtcctgttaacgggcaggaacagcccaaactgaggggggcgcgatga

SEQ ID NO: 299859 - DNA, 216 bp, Proteus mirabilis
atgataacagaatctgttttatcttctctggttttatattttattgcgggttggtgtactgctgaattacaccgatattctggttttttctcgcgttaccgtcgtgtcggatattgtatcagctggatagtgatgtttctgtgttggcccctgttactgcctctttatgtcagttatatcggtacccgatatcagaaggagaataatgatggataa

SEQ ID NO: 299860 - DNA, 426 bp, Proteus mirabilis
atggataaatcacgtcttattcaacttattcatatcgctaaaaataaacttcaactggatgaggatacttatcgccagatgttacaggggctaacagggaaagcctcaacaaaaagcatgaatattcctgacctgaataaagtccttgatgcgatgaaaaagaaaggatttcgtatccgaccggcaaagaaagctcaatcccgtttaccgctggatgaccatccgcagtccaggaaaatccgtgcgttatggcttgaaatggctgatgcgggtatcgtgcgtgaccgttctgaagaggcgctggcccggtgggtaaaacgggaaaccggcgtcagtgcgttacgctggctcagcaacgagcaggcaagccacgttattgaaaaactgaagaagtggcagcacagagccacggggaggaagccatga

SEQ ID NO: 299861 - DNA, 378 bp, Proteus mirabilis
atgagcgacctgaaccagtttcgcagtaaagggccggaactgctggttgaactggcccagcacactgctgaaacccttcgggaaattatcgatatagacccggcagtggctgaccagataggtcaggctgttgccaatcgtatgatgcaggtctggggcggacaaaatgtgtattttccgatgggtatggtctggcgggtaagccagcgagacagggagatatttaatgagttcaacgggcgtaaccatcacgaactggcccgtaaatttggtgtctcactgcagtggatttacagtgtggtgaagagggtcagaaaagaagaattagatcggatgcagggcaaactgtttgatgctgatggcgaaattgagccgtag

SEQ ID NO: 299862 - DNA, 345 bp, Proteus mirabilis
atggcaagaccacaaacggttaatcagttacctgatcacattaaacaagagctgaacaaaaagcttactgaaaattcgttcagtggctatgtccagctagccgaatggcttaatgctatgggctatgctgtatctaaatcatcagtccatcgctacgcagagcgtcgtcagttatcgcttattgctgacagcgatgcgccgggtactacagccggaattcttgatattaaaatccggtgcctagatattgcagctcgttgtttaaaaaacgatggaaaagtaccggtcaatgatgtgacaaattatgctgaaagcttgatgagctggctctacgatcagaagtga

SEQ ID NO: 299863 - DNA, 1422 bp, Proteus mirabilis
atggggagtaatagctggcgggaagtaaaactatctgatttaggtgaggttgcacgaggtcgttcaagacatcgacctagatatgctgaacacctatatgggggagaatatccttttatccagacaggagatataaaagcttctgaaggtcgtatttcttctcatgagcagacatactctgaggctggtttggctcaaagccgtctttggccagcaggtacaatgtgtataacaatcgcagcgaacatagcagagacgggagttctacagtatcccgcatgttttcctgatagtgttattggttttattgctgataaaaataaagcagatgtctactatattgagtatgtatttagaaagttaaggaaagatattcagcggcaagcaactggctctgttcaagataatattaatctccagacttttgaacgattgaagtttaaagtacctcatgttgaagaacagcatagaattgccaactttcttaaccattttgataaaaaaattaccctcaaccgccaaatcaaccaaactctagaacaaatggcgcaaacgctatttaaatcatggtttgtagattttgatcctgtggttgataacgcgctagatgccggtttttttgagcaagatttaggcttttctgaagaattactgcatcgagttgaagtgcgtaaaacggtgcgtaaaagtgataattttaaaccgttatcagagaatattcggcggttatttcctaatgcgtttgaagaatgtgtagagtctgcattagggcttgggggatggatgccaaaggagtgggtgtataaggctgcggaaaacattgcaaatgtatcgataggaaaaacaccaccacgtaaagaaagtgaatggtttagtgaacaaaaagaaagtaatattacgtgggtttctatcagggatatgggggaatttggtacttatacaggaagtagtcgcgagtatttaactgcaaatgcagtaaaaaaattcaatataaaactagtaccaaaaggttctattttactgagctttaaattaactctaggtagagtagctattgcaagtgaagaacttacaactaatgaagcgatagctcattttgttgaacctaagcatgatattagtgcttcatatttatattgttacctgactagctttgatttcaattcattgggaagcacatcttcgatcgcaactgctgtcaattcaaaaattattaaaaatatgccaatactagtgccgacaaaaagtattttgaattgtttcaaaacaaaggtcgagccactatttagaaaaatgaaattaatagatgatgaaattgttacactaaccaaactccgcgacacgcttctccccaagctgatatccggcgaattatctcttagtgatataaaaacagacattacagaagaaatcttaatctaa

SEQ ID NO: 299864 - DNA, 927 bp, Proteus mirabilis
atgaccaatttacgcactgtatcaaaacacccagagcaattagaaaccacaccattagttgcggaaagtcatcactacgatgatcctttggagcctcaaaaactggtgtttttagaggcagttaatcaacagcgttgtgtgattaactcaccacagcgcaatagccaactcaccaatacaatacccttttttatcatattattagtgatggctttttatacgttatataattttactaataatcatcttgattctaaaacatcaatcgaaatgatggctaagcatgtagaagaaaaatatgcaaaaccaaataaaaaggatccacatgcattaaaaatgatagattcatataaacgtttttttggtgaagaaaaaattagctggtgggagtatataaaagcgtataactccggtgaattttttattgatagccaatatgataaatacctcgtcattggctggctaatttttttccccggttttttatggctatttggctatctctctttctttacgcctcctgtatatcttattgctgataggcaaagaggaatactgtatagctatggcatggggaaagtgcgtttaacccgctataaagaggcgcaatttggttatgcgggcaatatgttggcgattaaactatatgccattaatgaaaaaacaggccaattaaaaacgatcctctatcgccccaatgtgtcccactactccagtttcctaaccagtactgacagtgaaaaccaccgttttatcacttttcttaatgcctatatgcaacaaggccgagatgctgtttcatctgttgattaccaagcccgtaagccctttttatcttttggcaaaaatccacttcctgctgattttgagcaacaggtcgaacaaattttagcaaagcttgatcaggagaaaaaacaccatgcgtag

SEQ ID NO: 299865 - DNA, 939 bp, Proteus mirabilis
atgagtatttttttcaatcccgctaaacacccacatcgcttaaagccacaaccattgggggagcaaggtgagcgctataacgaagattggcccatgcctgagctcgattttttagagaccgtcgataaacaacagtgcattctagttgataaagaaatacgccgacgtgatgcgttttcttatcccggatttatcaccggaattattgcctttattatggtattccattttatttttacagaacataattcaaaatatatccgttttaataaaaatcttcatgactatacattagaatataaagctcaatatgaagataaagcccaaagagataaactaccttcatttatacttgataagtacgccccttatttcaatcaagaaaaactgtctattttagattatattcatgtttattttgaaggacatattacatcaaagccctatcaagatacgttattttttcttgctgcgtcctttgtacctttcttcttaattggcgtagggggttaccagtcttttttcaaaaaaaatccaatactcgtttttaatcgtggaagaaatctggtttatacttggcgcaaaaataaggtatttattgctcgctatcctgaaattggtatcggtaaaattggtaaaacacttacctttcaattattcgggttagataagtcaaaacaaactttagtttctgaattgtttttccctaatgtctatgtttattcagtgtacaataccagtactgactatcacgaccagcgcttcattaattttatcaatacttatatgcgcgaagggcgtgatgccattattccattcgattatcaccgtaaaaaacccaaagtatattttggcaaaaacccacctcctgctgattttgaacaacaggtcgaacagattctggcaaagcttgatcaggagaaagaacaccatgcgtag

SEQ ID NO: 299866 - DNA, 396 bp, Proteus mirabilis
atgaaagatgaattactacaaatcatagatgatcatcatatttctagagtcaaattgattggtagtacaaaagatatgctaaatgtctataaagatcatgatgttttactatgtacagcccatgctgaaggtttaccaatgacatttattgaagcgcaatctttttctttacctataatatcatatgatattaaaactggcccatctgaaataattattgatggtaaaaatggattcctcattgaagacaataatgaagaagttttcgtaaagaaaatgtttctaattgaaaacagtaaattttatgaatcattatccagaaattcattaatatcgtcaaataattattcttatgataaaattttttctaaatggagtgcattatttaatgaataa

SEQ ID NO: 299867 - DNA, 795 bp, Proteus mirabilis
atgaataacaactctatcatgttttctgtactaatgtctttatatcataaagaaaaatattattattttgataaatgtttagagagtctatattttcaaacattacctataacagaaattatattagttctagatggggctattaacgattatttaataaaaactataaacaagtggaaaaataaattaccattaaaaatctatcctcttgaagttaacgttggtttaggtaatgctttaaactttggtttaaaaaaatgtcaatttgaaattgtttttaggatggatactgatgatatttgccttcctaaccgatttgaaaaacaaattgaatatattactaataatcctgatattttattacttggttctgcaacagaagaatttgatgaaaatatggaaaactcttttggctatcgaaccaatccaacagaacataacgctatcgtcaattatgcaaaaaaaagaaacccctttaatcacatgactgttgcttttaaaaaagatgctgttttatctgttggaggatatcaacatcatttatttatggaagattataacttatggattagaatgatttcttctggatataaagtagctaatttacctgatgttcttgtaaaagttagagctggaaattctatggttacaagaagaaaaggcattaaatatataaaaagtgaatacaaattagctaaattaaaaataaaaacacatctagataggtatttctatgctaacaatcatcggtggctcaggctttattggtactcgcttatcagatcaattaactaa

SEQ ID NO: 299868 - DNA, 948 bp, Proteus mirabilis
atgctaacaatcatcggtggctcaggctttattggtactcgcttatcagatcaattaactaaagaaaatattgagtttaaaattgtggatattgctaaaagcgataaatatcctgaaaaatgggtctttggcgatgtcactaaaccagaatctttactcgagccattaaaaggctctgatgtaattatcaatttagcagcgcaacataaagataatgttcatcctattagtttgtattatgaagttaatgtcgatggagctaaaaatgtttgtgatgttgctgaaaaactaaatatcaaacatattgtatttacttcatctgttgctgtatatggttttgtcgaaaaagaaacaggtgaagatggcgagttccatccatttaatgattatggaaaatcaaaacttgaagctgaacataagtatgaagcttggtataaaaaagataatacaaatacattaatcgtaatcagaccaactgttgtatttggtgaaggaaatagaggaaatgtatacaacctattccgccaaatagcatcaggtaaatttttaatggtaggttcaggtaataataaaaaatctatggcttatgtagaaaatattgcggctttcttaaaatttgctactcaaatagaatctggtcatcatatatttaattatatagataagcctgattttactatgaatgagttaaccgatattatctatactgctctcgacaaacgccatagtcatattaaagtaccttatgctgttgggcttcttggtggctattgctttgatattctggctaaagtgacaggtaaagaatttcctgtaagtagtattcgaattaaaaaattctgtgcacgtactcaatttaaatcaaatagtattgctaacactcattttaaagcgccagtctctcttgaacaaggtattgcgaatacagttaaaaatgaatttatgtaa

SEQ ID NO: 299869 - DNA, 984 bp, Proteus mirabilis
atgcataatgttacattatcttttaaatattctcatcatataagccagtatatatatggttttttacttttaagtaaaaacaatataataaaactatctaatatagataaagatacaaatatcactggagcgcagcatatattaagagcaaatattgatggtaaaaaaataatatatgatgcaaatgatggcgatcatatagatagaggttttttttctattcctgattatgaatggtgtgacttatattttaaaagaagttattccaatcaactagcggaacaatttcctaaatgtagacctcttgggtttaattatgaaataaagcctttttatggaatgatagatcgtttttttggtgatattcgtaggttaatgggtaaagaaattgtaaagcatactgatttagaaatcatacctaacgtatcaaataatcctaaaatattatttctaactaggttgtgggagcctaacccacttaaagacaatgcgtcaaaaattgagttagaatactacaatgaaacaatacaacttaataaagtcagaatggatgcattgaatatgatccatgcccaattcaatgaaagatctactattggtattaatgatattccatattcaagaagaatggcgccagattttatattaccgaaagaaaaaacacatcgaagaaattttattaatatgatgaaagaacatgaaatatgtattacatcaactggtttacataaatcaacaggatggcgctttggagaatttgtagctgcatctcgcgctattatttctgaaccattaaattacgtagttcctggtaattttgataattaccttcctttcaataatattgaagaattatatctggcaattgaaaagctggttaatgataaagagttaagatatgacatgatgaaaagaaacaatatttattataataattatttaaaaccagataggttaatattaaatacaataacttcattataa

SEQ ID NO: 299870 - DNA, 138 bp, Proteus mirabilis
atggttagtcattcccagcgcgaaacagtgaaagagtcatataagcagtctcttaaaactcttttaccttatggtgtcaataatcatcgcggtggatttttgaagatcattgacacaaggaagaacaactctcagtag

SEQ ID NO: 299871 - DNA, 1644 bp, Proteus mirabilis
atgaaaagtagactgaaaaacctatataaatatcttattgagaacaggaaacatgaagtcaatggatggcacaaagcctatcgtgacttttacagtcaggtcactcaaattcgtgagcgaatcacatctggagaaggcttgtctcaaaatgatgaagcttttctgaagcagttaatctatgagaagagcaacggtatcgcttctcgcggacagtctgtgttgagcaatgacaatttccagtcattcattaaaaacaagaatttcatatccgcattagaaaaatttatattgattccaaacagtgaaaacttcacgattttttctgatacgtggtctaaccaaggtaaatccaacaaccctgttctcgttaatcgagtggctgcagcttgtacactcgaagtctccacaacggttgactccggtaaattcaatcaggtttttaattggcttatacgcgaaggaataattccagtatacccaacagaagaaaatcaaagttggtttgctaaaaacatttttctattaaaaagcatcaaaagcgagtttgataatgagcttcgggaaggtaaaactgatgagttttatcttagtcagtttgtttgggtgctttacgagaatttgtcaaacccattcagtttaaagaagcagattattaaatacggggcaccggggacagggaaaacttatcaagcacgcctgcaaacttcgctcatgtttgacatctggaaagaggaatttacttccaatagccgtctcacacatgcaagtcagattgagttggttcaatttcatccttctttcagctatgaagactttatggaagggctacgtccggttttgggcagtgatgggaactcccaattaaggttgcaaaatggtgtttttaaagagttttgtcgaagcgctggtaagtgggaaatcgatgtatatgggcttggacttgctcagaagtgggagtctcttactatcaaggaacttctcccgtttagagaaaagttatcaggtgagcattggcgggatgttttcgaaatatcagatacatccaagcttgtatcggaagcagtaccaccatttttctttataattgatgaggtaaaccgggctgagttgtctcgcgtttttggtgagttaatgtactgtctggaataccgaggcactagaggttgcgttaaaacccaatatgccaatctgaacaatgaacatactggtatgcttaaggacgctaaagggtatttgttcttcattccaacaaacatctatcttattggaacgatgaacacgatagacagaagtgtcgaaagttttgacttcgctttacgtcgaagattccgttgggaagaagtggtgcctgatatggcgctattgaaataccatttgaaccaattttgcaaagcttggctgcccctggtggataaccttgaacgcttgaatgaattgatagctaaagagcctttgcttggtaatgattaccaaattggtcatgcctatttgatggacttgaagtatgcaaccagccttacagtttcggaggtacgagagcgtgtatgggatgattgtattcgtccgttattacaggagtatcttcgtggaacgggtaaggagactgaactgattagctccttcggaaaggcgtttggggtttaa

SEQ ID NO: 299872 - DNA, 1428 bp, Proteus mirabilis; identical to SEQ ID NO: 295800

SEQ ID NO: 299873 - DNA, 1725 bp, Proteus mirabilis
atgtcagacactaagcacttaaatgtgttgattgcaaaagctcttttacttaaccaagatattactgatagagaacaagtagatgcgctaactgctcatatcaacggtgatattgaaaaagaagagtttaagcaatatgaccactttattaatatcacgttacttgcactttcattggttcctaatatcagtagtgaactcagtgaagaacaaatcgttaacgctattatgtcatttattgataaccctgatatgcgtagcgttcgtcatagagttaatcactttaactcattaataaatccaaaaaccgcctcaattgaggtagaaaaaaaggaagcacctcaggaaaaggtgatttttaacgcctacaaagataaccaaaacggtcaaccaaaggaagtggaagatattccaaaggaagaaaatgaccagcctgcttattttgaacctggtcgttatcccgatattcctaacgaggtgtatcacagttcaaacggcatcagtagttcgatgctaaaagatgctcgtattagtttgatgtattacgagttacgccatgtaacaaaagttattgagcgtgaaaataagcgttgtttcgacttaggtagtgcatttcacacattaacaatggaacctgaaaagtttgatgctgaattcagtgttaaaccaattattccagaaggtgcctttacaacaacggaaacaatgaagtcatggattgacgaatacaacaataagttgcctaaaaagctctcacaagatgagttaaaagcaattattgaagaacataatgccactctgacaccgcaactttccaccagcggaaaagccgaagagctaggtcagatatacatgcagttgcccgatgaatttaaaaccatccctgaagatgggaaatttactggtgcagcaatgaaagcctgtatcaaagcctataacgatactttgccaacaccattgaaaacctcaggtaatacagatgcattacttgagcagatataccaccacatcaatcctgaattatatttagcagaagtaagtaagcctgagccacttagaaaacccgtcaagaaagatgatctcatgcaggtcattaaagaagtaaaacctgatgctgtatttgaagatgaaatcattagccagtggcttagtgacgattcaaaaattcacgttcaaaccgttgactatgaaatggcaaataacatgcgtaacgctgttatgaaccacaaagaagcatccagtttattaaatcaccctaaccgtgtatcagaagtgagttaccacggcattgatgaagataccggccttgaaattcgagttcgtcctgatatcgaaattcaaacagaaaataacagattaggttttgacctcaaatcagtagcacttggtcgatttaaacaagatgctattgaaaccatgatccgcagagaaatcattaatcgcgattatcacatcagtgcagctatgtattgtgatgtggcaatgctggatcagttcttctggatattcgttaacaaagacgagcattaccactgggtcgctatcgttgaagcttctcctgaattacttgaactgggtcgcgctgagtacaaaaagacactgcgtgatatccgtgaagctatggatacaggatattggccagcgcctatcaccacaactctcactatcggtatcactgactttgagcagagaaagttagaagaactgcaaaacgaagtcgcttaa

SEQ ID NO: 299874 - DNA, 276 bp, Proteus mirabilis
atgagccaagaaattgatgctattaggctttgttacgacattcttgatggttctgtatcgccagaaaatatctcatcagaagaggtatatgccatttgtacatatctcgatgaggtagtacgtgaaaatctcacatttactcaacaaaaccctgtggcatttatggatagcgaaggtgaagtaattagtgcagtcaagaaagagtttgaacagttaactgacggtaatcacataggtttcgatattccgttaattcaattaaacaaacaaccgtga

SEQ ID NO: 299875 - DNA, 489 bp, Proteus mirabilis
atgacacatagtgatctgtgtgaaatggcggtgcgattcctgcaaaataacggatttaatgtagcctttggtgacagattccagtcaagaaacggaacaggggagcaacctgacgcgatagggttcagaagtggtataagttgtctgattgaagcgaaagtcagtcggtctgattttcttgcggacaaaaagaagtggttcagacagcaaccggaaaaaggaatgggcgactggcgtttcttcttatcgccaccggatattatttcatcggaagatttacctgctggctgggggttgctccacgtcaaaggaaagagagtcttcaaggttcacggatggcctcccaatacatattggtatgacaaaaaaccatttaaagccaataagcaggcagaatgtgaccatatgtatagcgcgttgcgccgattgcaaatacgtggacatcttcatgaaatctacgaagacattccgaaaggagttatttcatga

SEQ ID NO: 299876 - DNA, 582 bp, Proteus mirabilis
atggataaatttatacctatcacaacagctgtagctatatggttatttttagttaaagaatgctttgaatggggaaggagaagaaaaaataaaagtaatgaacttagagctttgaaaacgctaatttatgaagaggttaaagcaaatagtagaccttttagggattttatattgttttatgaaaaactaataaataacgaaattattagactaaatattcaaacatcgttaaagggtatttttattgactatgaggatagtgataatatcgataagaaatattttttcatatcaaaacactcatcaaaaataattgaaaaatatttacttgatgtatcaagagtagaccaagaacttacaagtaaaataattgatttaagaatatgcattgatcattttaatgaatttatcttaggaggtgttgaggattgcttaggtcgtaattttaaaaataatcttacaaatgagctcgtaaaagatcttcttgtgaagaataaactagtaattgaagaatatagaaaattatgtaattcagtaatgagctattgtaatatcaaacaatcaaatccgtatatgatttga

SEQ ID NO: 299877 - DNA, 297 bp, Proteus mirabilis
atgaataagcctattagaaatgctgagaaagataaaagtgatgctctaatgaattcaagaatagggctatatatgttttttgctggaatagcattacttataagcaaaagcatatggggaacagatgttagttccgcacttgttggtggtatcgctggggctggtctagtctattggggaataaattacgataaggttagtaaactaaaccggaaacttgatgaactatgttataggaaatataacaaatctcataaagattcatggaatgatattgttgatgacgaggggtattga

SEQ ID NO: 299878 - DNA, 312 bp, Proteus mirabilis
atgaaaaacttattattaataacatcgttgttatttagttttaatgcatattcttatgtgtatggtggtagcaatttatatggtagtaattatccatcattcaatgatatggaaccaagcagaccatatacagatgatcagtactcttggcagaattataaaaatgaggctgaacgctatgttgatgcagctaaagaatatgttgataaagcaaataatgatatacaacgtatacaggaagctaagtcagaagccatagaaaacgcaaatagagtaattgaagaatataacagaaatgtaagagggtattaa

SEQ ID NO: 299879 - DNA, 2325 bp, Proteus mirabilis
atgacggtatctactgaactaagccatgaagagtatgtaggtaatggcgtaacaacggattttgatttccgcttccgtatctttgaaagcaagcatttgattgttgtggttgctgacagtgagggaaatgaaacaacattaaagaatggtactgattacactattgtgggagctggttcttatcatggcggtaaggtggttttaaataaacctttagctcaaggctggaagatattattagaacgtgatttacccgttgtacaagaaactgacttacgtaatcaggggaaattctttgcagaagtacatgaagatgcctttgattatttaacgatgttaattcaaaaagcattgggcactttctctttaagcctacgcaaacccacttatttatcgaactactatgatgccaagggcaatcgtattgctaatttagcgcctcctaagctcggcagtgatagtgctaataaagactacgttgataacagtattaaggatattgatagcaagacattaagggtaaaggataatcctattcctgcattaccatctgctgaacaacgcaggaataaacagcttggttttgataatgaaggctatcctcaattacttgatcctgctgaaactggatctcttggttatgttttggttgattcttttgagaaaggcgcggagataaccacacggtatcaggcgttacattgggataataatggagaatattaccgctgggatggtgagttgccaaaaatcgttcaaatagattcaacacctgataactctggtggtattggtgcagggaaatggcttagtgttggtgatacatcccttcgtaatgaattgaaaaagccaactggaagtgaccttgtaggatataataatgggacgttaaccaaatatattgaagaaaataaccgacatacagcaaaaacaatcatcaacgtcagtgcttttggtaacacaggaacagagcagaacgggagcgatgaggcctggaataatgcatttgcttatgctctaagcattgcaccaaaatggaaaaataattatcctgccccccaggagtggtatgatttctccgggatagaatttgttgctgatggaccagtttatccgaaaacaagcataggcttcaggggtaccgtgggaggggttattaatcttacagttatagctcctgatgatattgaaaataacgcttatctcattgatatgtcaaagggacgtggaataactattgaccgagcaccaacgcaagccattatttcaggtgcgattcactgcagatataagtgcaatggcttaaatctgggaggtagcaatagttgtaccacttcaaatttatttgtaaatcagtttctgacttatggaattgatacggatgcttcagacctcagtattagcggtgggcacacaatcgggccgggtactgtagttgagcaacggtcatggtcttctggtggggatgcagacttccccgcagtggtaagagccggaacaggtatttttattcgctcccatgataatagattggtgggcgcgacagtatcatactgcaaagtgaggtgtgtacgaatccgtgggtttagtaatcgtttagttgcaggaacacacctgtattcaggaggtcgtcaggcgctactccatgaagcaactgctggtgttgtatccggtaatactttaatagattcttgctggctcgatagctctaggctgcaactagaaggctctaatataaccgtaacaaacaatcttatttatcttacacaaggtactgattccgggattggtataatttgcggcgagtctgcttcaaacatactgattactaataactccttcgctgggtggagagaaggtactccggtttactttggtaagggtgctttaggggataagaccgttgtttgttacggcaacagatacttgccgggaatgaataatgcagatgtaatcacaactcgtgttccttcattgattggtgaaagcactgctggtactgttacactagacccaagcacaggttttacagtcacctacgatggcgtctatgttaacttcacagcgacaattcgatggtcttctttcacaggaggaactggagctattggtgtttatggtttgccctttgtagctgatagaatatcaatcatgtctatgcagcagttcaccaataattcaaacttcactaattgcactgcaataaagcatacatcaggcactagcctaagattcattaagccagatggaactcctgtattagctaattccagtggagttgataatggtcatatagttatatcggggagatatattccagcataa

SEQ ID NO: 299880 - DNA, 1434 bp, Proteus mirabilis
atgaaacatttaaagctttaccacttgattgcattaatatatatactacccattcttttaggtaactataattatatagatgatttaaacagaatgcacttagggtatggttgggatggtgatggaagatttgccgccacatgggctatgcaatttttgtctggagggttttatataacagacatatatccgtatagtttgattatttcatcgttaatattagtttactctgcttcgatagttagtgaaatgctggacataccaaaaaacattagagtattcacgaacttattttttttggtttcaccatacactatagagtctctatcctatagatttgactctattcctatgtctttatctgtactactggccactattccattcctatatattgaaaaaagaactacattcttcttcgtctcattaataagtttgaatttatgcttacttacatatcaaagcaactttttcatatatcctattattttgatatgttatctttttaacagcatacttacaaataaaagcgtgtgcagaaatgatgtgagaataaccttatactcaataattgcgttccttatttcatacatattgtataaggttgagatttcaacgttttccgcaaaccttaatggtcgggatgaaacaattatgaatggggattttttatttaatgcgaagataaacattgaacgcacgtatgtttttttgatcagcccactcttaacactgtctttcttggcttactttgcacctactgtagttatttcgattgtatctctccataagttattgtactgtaaaataaaaccacttaaatcattagcgatatttataatacttatgctgctaatttttataagtgttttgatagcttctacgccaaatataatactgttaaaaccttggttcagtgttagaacggcagttcctttcgggtgcttattatttttctttgcaataattacaaagcttgagaataaaaatatactttatgcatgctactcaatagcctttgtgtatttattttcaatgatggcggcctttgcagatggattcaaatatcaggaaaatatgcgtaaaaacataacagcttatttcggaggggaaatattaaaacatcctgaagcaaagcttgttattaacggtgtcatgcctaactccaatgtatttaattcagttaccagtaaattcccccttttaaaaagagttatacccaattacatggataacaactggaactggggggtgggttacttccgagttaacgatattgtaagtggaaaggcatacccaagtaatgcattaagaaagaaaatgataagtaatatatgcctttcggattctgtgattgaaaatgagcaagctacattgcgttactcttcttttgacaatgcttttttattagattttaagaaaacaaaatgttaa

SEQ ID NO: 299881 - DNA, 918 bp, Proteus mirabilis
atgaaaatttctttagttgttccagttttcaatgaagaagaagcaatacccattttttataaaacagttcgtgaaaatgaagaactaaaaaaatatgacgttgaaattatttttattaatgatggtagtaaagattcaactgagaatatcattaatgcgttatcgttagctgatgagcgagtagtagcattaagttttactagaaactttggtaaagagcctgctctttttgctggattagatcatgccactggtgaagcaataatcccaattgatgttgaccttcaagaccctatagaagttattccacaattaatagaaaaatggaaacaaggtgccgatgttgttttagcaaaaagaactgaccgatctactgatggttggttgaaacgcaaaacagcagaatggttctataaattgcataacaaaatcagcacaccaaagattgaagaaaacgtgggtgatttccgtttaatgtctcgtgaaacagttgagaatattaaattgcttcctgaacgcaacttatttatgaaaggtgttctatcttgggtgggtggaaaagtagatattgtcgaatattctcgcgctgagcgctcggctggtgaatcaaaatttaatggatggaaactttggaatctagcattagaggggatcaccagcttttcaactttcccactccgtatgtggacttacattggcttatttgttggcgctatttcatttgtttatggtggttggatgattatagataaactgatttggggaaatcccgtgcctggttatccatctttactagtttctattttattccttggcgggattcaacttattggtattggtgttcttggtgagtatattggcagaatttatgttgagagcaagcaaagacctaaatacattttgaagggcgtaaaatga

SEQ ID NO: 299882 - DNA, 1251 bp, Proteus mirabilis
atggcaaataatacaaatctttctgaaacgttatttaaacctcgtgctaaacatgcggaaacctcaacgttaatacagtacacacaccctaaatctaatattgattcgtactctgtacttaatgggatgagccagcaaaattggtatcgcacaattcaacgtctacagtggatctggcgaggtatttcccccatagagatcgaagaagtattaagtcgcattgctatttttgatgcgccacgcagtgatgataaatttattgatacagtcgttggttatcgacgtggcaactggtcatttgaatggtctcatcaagcaatgatttggcaacaaaaagcgttacgagagacctcagaggaagcagccgctgattgttggttacgagcggcaaacctttatagcattgctgcttatccatttattaatggcgattttcttgctgatcaagcggtagtattggcgatgaaagcttttgaaaatgccatgaaattctcttcatttgaagtaaaaaaactgacgtttaaattaacaggtaaaggaactaccagtggatttttacatctacctaaagggtgtaaaggaccttatccaacagtcattttttgtggtgggttagatagtttacaaagtgattatgttaacttttttaggcgctacttatcaccaaaaggtatcgcgatgttaaccgtagatatgccatctattggttattctgttaagcagaaactcagcgaaaatacctgtcaattgcatggtgatattttacagcagttgggagatattccatggattgatcacactcgagtgggcgtaatgggatttcggtttggtgccaatattgcggtgcgtttagcctatctttatccaaaattgattaaaggtgttgtggcattagggccattaattcatgccttttttactcaagcggaattacagaagaaaatccccattatgtatctcgatgtactggcgagccgcttaggattattaaatatagatgaaaacaatctcagactatcgttaagtagttattcactgaaaaaccaagggttgattggtcgtcgtatgccagtgccgatgatgagtgtttattggaaaggggatgaaattagtcctaaagaggattcgcagctcattgctcgctcttctatggatggcgatatagtagaaataaaagaaaaaccactttataaagggcttgaacaggcattaactaaaagcgcagattggatctatgctaaattaatataa

SEQ ID NO: 299883 - DNA, 1038 bp, Proteus mirabilis
gtgaataacactgaactcgttgatatttcaacatttgaagaatttgaaagttatgtaaatcaagctattgcagacccagagtttagcttggatataactaacttaaagtttagcatatttgatgcctttaaaatgaagatagaaggggatgattcaaagtattatggtggagtaaacacaactttagcccaaggtatgagtgattttcaggtagagttaaacaaaatctttgctatcattcgatacaacaccgataatctacagaggttatcttcacaagataagaaagacctagagcttacttttctagttaatgctgggtgtactgaaatattaactagcctgactgaatttgtaaaatcaataggagatgctggagcaaaggtcatgaatggaatgactccaaaccaaaaaacactttgtgttttatttactgtcgctgtaattggcggaggatggggtatttctaattatgctaacaatgttcatgatgaaaatatggctcagatacaatctcaacagtcagcatctgagaggcagtctgaattagatagattacaacttcttaaagatgggatgttggacgctattaatgccactagcaatacagaattgaaggaaaagtcggttggaatagaaaaccatggagctaaggcatatacggatataataaaatcagctagtgatgcagataacataaccatcagtgggttaacaaatatttcgctggaccaacaaggcatacaaaatgtaatcaaaaaccctatagaaaagcttgaaaacaaggaagatactatagaagttgaaatagaaagtatcaagagaaacgcagatagcttgtcagtggcatgtagaatacctggtatggattatgtgttttcaataagtgttaatactggttttatagatagggatgagacagatttattatttgatgcgatgaaagagtcaaaaactgtaaaaatattaggtaattataaaacaagaggcggagtgattgaaaaggggaatgcttcatcaatcattatatctaattaa

SEQ ID NO: 299884 - DNA, 321 bp, Proteus mirabilis
atgaataacaaattgaccattaaaagcctgacacctgctatctctgggtggtgggctaaaatccatgataataacgaagacaaaacagaatggtactcacctgtggcggcatgggcgttatgtgatgtacgctacgaaaaagagtcgaaagtatatactcaaatcctgcctgtattaacgggagagtttggaatggagccattgcatccagacgaggcatatagcgagttactttatttgcccaatgataaatttgttcgtatgggtggtgagtgtttatttgcatggcaattgttggatgaggtgacgattaatgactag

SEQ ID NO: 299885 - DNA, 1056 bp, Proteus mirabilis
atgattaccctatgttcaataaagggtattgcctaccaagtgaataattccctactggctggtggggagtcggttaaagtggacgcccttttatccatcttgaatctaactttaagttatagtcaatcagacaaactttcgtccgatcactcggccaatattttggctcagtactcggcaaaatcatttgctcagcaatcagctaaaactttagccgatgtatcagcgaaaacttacgccaatcaatcaatcctaaccaccaatggaggatgggataaaggtaaacactcaaaaagtgaggagtttacaccatttattaaaggtgatttttctcacctttctaaagaggcgaattatcctcactggcaaggtttaatcggggtcactacacaaggcagaattgagttttttgagtccataaaaaagggcggccaatcggctacccttgggaacgtcgatattaaataccgagcaagtgagaactatgagaatagtattcatcttgttatcggtaaagatgacaaccttgagttaatacaaaaatgtgcaatacatcacttgcacttatgggtaattgttggctatagtgatcaggcactagcaaaatctagtgtcagaattggcgttctgaatcagttactggcgacacatgacgcgccttgcgtctttttttgtgtccatgcctacgcacacccattaaatgcggtattatatcgcgctgaatctatggtggcggcagcagagcaaccgaaaggttggctggattccagtaactccagtaacgccaactctactgtcgtcaccacccccgaaattggcgtttcaagtggtgactccttaactaagttactggagatcatcgttatgatggcaacccctacccaaactcaattcaaatttttgtttctgagtattaaacgctcagatacaaccgctaaaccttgtcgtattgctgttacagcaccgaatgaacacgatgcaagactgatgcttgtacgtgattacattctgtcattcgctggtcgcttacctgttaaggaggtggctcatgcgtaa

SEQ ID NO: 299886 - DNA, 834 bp, Proteus mirabilis
atgaaactaaaaaataacagcttaaatgctggtggattcgctcaccctgaaaaccactctagcgatattaaggaattatcttttgctgaaatgctgccagtaattcagggaaatattaacgggcagattattaacgcggtaagtgccaaagcattacacgaagcattaggtgtaggtcgtgatttttctacttggattattggccgtgttaatgaatacgcttttgtggaaggaacggattatcaatcagatgatgactttaatattcgctgcttacttaatgaacaatattcccccgttttggggaataatacaaaacgtggtcgccctgaaaaggattacttattaacgctaggcatggctaaagaattggcaatggttgaacgtaccgaaaaaggccgcttaatccggcaatactttatcaagtgtgaggaagctctacacaaagtcgcgccaacaatcaccaagcaattacgccatcaacttaaatcacgcctaaaagtggccagttactttaagccgatgtgttcagcgttagagctggcacgcatggagcaaggtaaaagcacactcccacaccattacacgactgagtcaaacatgctgaaccgtattgtgttaggtggactcactgccaaagcatgggcgaagcagaacggcattattggcaatcctcgtgatgctatgagcgaaacccaattagagcacctttcataccttgagcagacgaatacaacgctaattgaattaggcatggactatcacgcacgcaagggcaagttaatcagtctatctcaaaagtggttagcgcaacgtgtagaggtggcgcaatga

SEQ ID NO: 299887 - DNA, 198 bp, Proteus mirabilis
atgaataatctgattaggctttcagaggttttgcgacgcacaggttacagcaaagcttggatttatagattaattaaagaaaatgactttcctaaacaagttaaaataggagcccgttctattgctttcgttgaatcggaagttgatgaatggattgctaataaaattgctgaatcacgttctggtgaggtggcataa

SEQ ID NO: 299888 - DNA, 675 bp, Proteus mirabilis
atgaaaaaagtattaattattggttataatttaggtggatttggtggtatggaaaccgtttttaaaaaatctataaatatattggcatcgcatgctatctactcggagtttatcttttttaatgaaggggataataaagttaatgatgattggttagttgattgtaaatatagaaggctatcttctaagataaaaaatactaagttaagaaggatgagctatgcagttcagttagcaagaattcttaaacaagaaaagccagacattattatttcttatgatacggtgtgttgctatattgctaatttagcaagaaaaattgttagaagtaaagtttatatttactcatggatacatttttcattaaataatttatataaatcaatttatttacataaggctgattatcatttatcgattagttcgggtataactcggtatatgcttgatatggggatagatagagagaatatatttactatttataatcccataacagaaaataatataattataccaagaaatgataagataagatttctatatgttggaagattggttgcgtatgctcctaaaaatgttaatgaattattttatgcgctttccaaattgaatggcgattggacgcttgatattgttggggatggagaagataccgattttttaaaaagctga

SEQ ID NO: 299889 - DNA, 1527 bp, Proteus mirabilis; identical to SEQ ID NO: 16547

SEQ ID NO: 299890 - DNA, 822 bp, Proteus mirabilis; identical to SEQ ID NO: 16544

SEQ ID NO: 299891 - DNA, 1254 bp, Proteus mirabilis
atgaacattgttgatcggtttatttcttacaccaaggtgaatactacaacaaatagagaaaatggcgccgcggggattatgccttcatcggaaggtcagcgagtcctcgctttacaattagtcgaagagttaaagacgttaggtgttgaagatatcaaaattcgcgatactgccattgttaccgcgacactaccttctaaccttgattatgaggttcctaccgtggctttctttggtcacttagataccagtgcagaacaaactaatgatactaaagcacaaattttaccttataaaggtggcgacctttgcttaaacaaagaacttgagatttttttacgtcaaagtgaattccctgaattagaaaactatattggtgacgatatcatcgtaacagatggtactagcttattaggcgctgacgacaaagcggctatcgcctctattatggatatgttgcaatattttaaacaacatccagaagtcaaacacggtacagttaaaattggttttgtacccgatgaagagcaaggtttacgtggtgcaaaagcctttgatgtaacagaattcggcgcagactttgcttataccttagattgttgtggtattggtgaacttgtatatgaaaattggaatgccggtgatgttgaaataacctttatcggaacctcagcacaccctatgtcagcaaaaggtaaattaaaaaattcactgttaatggctcataaatttattgcgatgttaccgggcggtgaagcaccagaatatactgaaggtcgtgaaggttattattgggtaaaacaactggcgggtaatagcgcacgtactgtattaaaaatggatgtgcgtgatttcacagaagcaggctacgcccatcgtatgacatttttaaaacaactttcagagcaatgtgaagcgttatggggtgaagggactgttgtttgtaagcaagccgatcgttatgcaaatgtctttaatagtctacaaggtgaaaatcgatatcctatcgatattgctattgatgcttataaagccaatggtattacccctcgtccaatccctatgcggggtggctatgatggagcagcattatcgcaaaaaggattaccttgccctaatatttttaccggggcgcacaatttccactctatttatgaatatcttcccgttaaatcgctttatgctgccagcgatgtattgaaatctgtcgttaagatcaccgcagagcgttttgcccccggagctaaagcatga

SEQ ID NO: 299892 - DNA, 3030 bp, Proteus mirabilis
gtgattgctgctggaaatgaagaatactttcctgccaccaatgcgcttgttaagcagaaaagccgtgttgaatcactacaaaatgttattttacaacatcaatttgttggtaaaagaacaattgtttttgccaataaggagactttatttagttatcaaagtggtcatttatttattgaagggattgctcagcggctaaatatgcctatttatactgtgacggataacagtcttatacttgaaaatgaatacattatggtaaaaccgacgactgaaagtcagtttattggtcaccctttacttgctgatacaggtgcatctaatacgctacttactgaaacagtacctaatgagcctaatacaatgtctaataggcaaagagtagatattgaaaataaaaaatatgctgtagaaatctatcaattcgtctcacacaattacactaattatagagataatcaagagtttaagttaggttatcagaatgagattagcactatttttcctgactattctgacaatatgaccattgctgatattttaaactacattcagttaaatcgctatcagatcaattatgctcaattaggtgcaattattaggaaagtcgatcaaattaaccttaaatatcataaagaaaaacttgcagagttcagtgataaaataataaatcacgatttactcattgataatgcaattgagaaatatttggttgaattatcggcaatatttaatacgtcagataatagtttaataaaaaggaatttaattcaatcactttatgatccctctgttaataaagaatttaaccaatttttaatggatggaacgaactttgaacagtggcaagaaataactaataaagactatgggaactatagtttaacggaaagaacgtatcaagttattgaaattattcatgcaatttatgatactcctcacttaatagataatttaagtgaactatctaaaaataggcttaatgctttttttgatgagggtaataaaggtattttatcacgagtattattgagcaaaatttcaagctttgaactctataaagagaccataaataatttaaaaaaactcgctgttatcagtcagtctgatgaagagattagcgctttatcaccagtagaagcattaaataaactcaataagtttaaaggtgaagttaacttagccacaagtgaagatagctctaccatttcttctaaagtggaaattaataatcttgtcattgacaaaagattactctgttatttaggtgcaaagataaatggtgaaagtatcgatgcgatagatcttaatcagatagagaactgggataaaaaaattacttttgatcctcagcatcttaatgattattttttatctgtgacgggcaatgaaaaagataaagaagttattgcattattacgttatctattaaataacaaacaagataaaattaaatattttctttctcatatgtccagtagagctgattatgtcgcggctcatgaaagattaatgaaaataatagcattaggtagtaaacagtataatcagcaagattgggaaaatttaagaataccttcattaaaaattcccagacatatgagagttatcagtaaaattggttacgctaatattagcttcggtatatggcaatcaatcaattcaacctttatgcttgctgagcaacttaataatccgctattaacccctcaagagcatagagagaccatcaataatcttgccataacatggtcagaaatggcctataatggcttatctgaactcattgaaatcgctttagctaaaggattattaaagtaccgtaataatcctttagagtatattagtaaaaccagcactcgaataggtatcgggcttaatatcctgtctattggatttgatatctataatatctacgataactttagccgtatctcagtagaaaaaaatgaaaaacgacggattgactatattgtgaatggctctttagctatagtttccggattggttactttgggggtttctatcgcaatgcttgctggctcgacggtcgcggggcctattggtattgtcgcgggcgctgttatcgccttagccatttcaatttataatgccgcaagactgatagaagaagcgaaagaaaaaataggatttacaccactagaagaacttaataatggtttttatgcatttttaatgggggatatcttaccaagcaaaaagaatgaaatcgtctatttagagacaaaatcacagttagaaaccatgattgaccaaaatgcgcaagaacatcttaaagaaataaaaaaacaggagcctcacagttattatttttatacgaatgagaaacaactttatgaagaacatcattattataaagtgatccctcgtatattggggaaaacgttagataatatacttaatccgtttggagaaattgttgtacaacgagtggcgaaaaatttaagtaaagaagaagcagaaaagatagctgcgctttctcattatcttagtgtcgaaagaacggaatataaatactatgttcctaaagaagccatcgcaacagatgaaattctcatttttgatatggatttttatgttaatcaattaaatcgttatacgattaattttgcatttgaagatgataatcctgtttttgaggatgaggtggatatctctttttttgataaaataagaacaacaaaagaaaaaacatggcaaaatttatcatcaggagaattaacagatgatttaattaaatcaacagctgaaaaacaatattttgagccaagttggcgtgagaatgagctattttattttaatacttataatggggatgatattattgctgcaccattaataacacaaaatatatttgatgttcataatgggactaaacgattaagtggaggagaaaaagatgacacctttaatgtgttcacttctgaatctcctcgttatgccagccgtttttatggtagagaaggtaatgatacattatgtattattcagacagaaaaaaatatatag

SEQ ID NO: 299893 - DNA, 243 bp, Proteus mirabilis
atgatcgattctaactttgaaattgattttgtaagtgacaataaatataagaatattactgttgaaatttcatataaaaaacaaatgctttgtaaattaaataaagatagtggagcggataaaatagaaattgaattttttaatgatagtcggtatttaagtgaagatgtgaagcataaatttaatttagatgattttatggccattttgaatagtgcaaaattagatttaattaatgcctaa

SEQ ID NO: 299894 - DNA, 498 bp, Proteus mirabilis
atgacttctttatctgaaatacaacgcaatatcttgatagcactaaataatcgcaattatccaatgaaaccaataagcaatagtcaacttactgaattagagatacgtattggtaaggatacactggcatataatatcaattatttacaagatcaaggtttaattaaagatggtgcaattcagttaagcgggactggtaaattcggatatatcctgcctaagatggctctcacttcaaaaggatttgattatataaatgaggattccattggcaatgaactaaattcagtgactattaaaatccatcaagacactattaataaactagaatctatgattcatgatgctagtatttctgatgccgaaaagacaacgctcatccgctatataaaagaaaaaggtgttgagagtgttatcggaaaatgtattgacattttgatttctaataccggttcttttactaaattgctttctgatctagctaaaagcattatgtaa

SEQ ID NO: 299895 - DNA, 255 bp, Proteus mirabilis; identical to SEQ ID NO: 298089

SEQ ID NO: 299896 - DNA, 267 bp, Proteus mirabilis
atgaaaaagcaaacagtagatttactaaattctaatgacgaaactattttgatgatgcgaggcagacaaaccaaagagcaagttatcgatactgcaattaaagaaaacattatttgtgaaagcgataaatcggaatgggttaattgcgatcgcgtttatgtttgttattacaaggcagttcctcgtgatggttattcagcatattactatccgtcaaataaagatgttaaaggtgcatttttagcgacagctttaattatcttttaa

SEQ ID NO: 299897 - DNA, 453 bp, Proteus mirabilis
atggctgaaaaaacgaaattagctattcatatagctaaaaaattaaggaaatgttttgacgagtattacaacgagatagcaagaaatattaactttccatttcatgcattccctcataattcctgtgaaggagcttctgcactgcttggtggagtactaagtagaaaattaaatacagaagaaatatttattataaatatatatagctccactttgtcaggtgaacattactttgttgaatttgaggagttgtattacgatttaacattcgatcaattcaaacttggtaaaggtataattattgctgaagaaaaagaatatcttgatagcataacaacgaagagcatttcaagaagaaaggttattgactttcttaatgagttctatctagaaggtgagaatcataaatttaacacagagcaagctataaaaaacctaatgtaccatatttaa

SEQ ID NO: 299898 - DNA, 261 bp, Proteus mirabilis
atggatgaatcaaggcagcaatttgaagcgtggtttaattctggtcacggagaattgccttatagcgataaaggcaaggaggatttaaagactttattatttcaatcttggcaagcatcacgcgagagtttaattaatggcttagagcctgttggttatataacatcaagcgggttcgataatataaaagaatatggatatacccatctaaatgaagaaagaagtgaaaaaataaatataccactctataaattagattaa

SEQ ID NO: 299899 - DNA, 5046 bp, Proteus mirabilis
atggctgataaacatgttggtgacggtgaaaaccaattcaaagttgttgcaaccacccctgatgtttgtcaggtagggtgttctgctattccttttgatagttttcaaagcttagatgcacaaaagcaatatgccttgagtgttaaagcacgtggatattgtactttgaatgttggttcaataatcaaaggaacgcaaagtaacacgggggccggtgtattatctggaacctcattaggcggtggagattgtcaaattattacagggagcccatcggtccgtattgaaggtcaacctgctgcacaagatggttcattagtcgcaatgaacaataacaatacattagggactttaattactaatgttgcacctcctgctgagccgattgagagcaataaaatcccctgtaacaatccgcccgtgacatcagaattgttagaatcactgcaagagatgcaacgagaagaacaagaaagttttattgggcgactccgtcaacaaaaacagcaagcggataaaaaaagagatgattctctaaatgatattgacaaacaattaactgaatacattgataatattcgaattgaacacattaatacagattattcatggtggaacagtttatataatacttcaatggatggaataactggcctgactcgtggtggtcttggttttgttgaaagtacaacaaagtcagctgtggaagcttattattacataaatccaaccgatctagttcaaaacgtggctctaaatgcgagcaaaaaaaccatcgagggacttatcgaagcagaaaactggaggttggggaataactgtattgaaggtgttaaggaagacgctaaagccaaatatcgtgcattaggtaaacttatcgatgaagaaaaagaaaaattagagaataaatggaaaaaaagtgatagcgataaagtcgaaatagtaacaagaggtgggcttgaaatagcgactattgccgctgcttttttaaaagtggggaaagtcgctgaaggtgctaatgctattaataaagtagcagaaggaactaaaataactgaaatatctgaaggcacttctgcggtaaataaagctactgacgtaataaaagcgacagagaccagtaatatatccaaaggaagtgaggcaatcaaaggggcagaaatctccgccacagagaaaggaagtaatgccgctaaaggtactgaggtgatccaaagcccagaaacaccgaaaataacctcatcagataatggcattaaaattgaaggaaaaacggaaagcgtatctacagaaacgccacctaataaagctaataatagccaaacggagaataaatcgacatccagcagcaaagagtccgatggaaacagtacttctagtgcaacctgtaaaggtgagcctgttaatgtggctactggtgattttatccaacagtggccaattattcagataccgggcttgttgccgttatctctacatcgtacatataaatccacatcaaatgcaaagggactttttggaccgaagtgggcagacgaatggtcacgctgtttacatatacttgacggaaacatcatctatcaagacagtgatggtgctaattttacatttataactcccacagaggagatccgtgcaagaaatgcccatgctccccattttttactcaccggacaacgtgatggtgatttaaccctttttgatagtacgcaacaacagtttctacattttaatcacagacaaggaaaatatcgtcgattaagtgcaatcactgatttaaatcagcatcgtattgattttatatataacgagcaaagccagcttgtcagtgtgaagcgtcatgatggcatagcgttaatactcgaatatcaacaggataaattagttcgcatttgctctgaaagcacaacctcatctcctcgagattttgtacgttgcgaatacgatactcatggttatcttagtcaatgtcatgcctatcaacaaaaccacttatggcatcgttattctcctgagggactcatggtcgcttggggggatactgacagtacagaagtgatgattgattatgatgaacaaggacgtgttgtcgccacacgttcaccgtctggtttttggaatgatcgctttatctatgatgattatcagcgcatgacaacctacattgacggtgagggtggattttcacgttattattataacgatgataatctggtgactcgcactatcgatccattatggtgtgaaacgtatacggaatgggaacagcggaaaaagatagcagaaatcaatgagattggtgagcgcacagagtatggttatcactataatggactgcttgcctatatctatttacctgatggtaaagccatttactatgattataatgactatggtcaacttacccatttcacatcggcctttggcgatgaatggcagctaagctatgatgacaatggcaatttaaccatagtgacagatccgcaagggcgtcagcaggtctatgaatatagccaacatggtgaattgctcaaagccattacgcccaatggtgcgcaatggcaataccactataaccctgcacatcaactgattaaaaccaccaatccttatcaacacagcacagaatatcatagtgatgaattggggcgtttactgcactacactgatgcgttaaatcacaccacacgctatcaatacagcactgagcatgccagtaccaacggcagtctcagcaagattttattacccgatggggtcgagcaacagatagactatgacagtgagcgccgagttatcgcggtgacgaatggtgaaggaaaaaccacccgttatcgttatgggccttttgatgtcttactggcaatgatacgccctgacggcagtgaaattcgctttgaatatgattcactgacacgacttaaaaaagtagtgaatgcgaacggggaggtttatctttacgaacgggataaagcgggacaaatcattcgtgaagttgattttacggggcgtgagatttgttatcgctatgaccgactaggacgtcgcattgccactcgctatccggataaccatgaactgcgttggcgctataatgaaagtggcttagtggttgaacaaagcgaatggtttgaagatgagcaagaaagccgctgcttatccacgactcaatatagctataacgcacgtcaacaattgataaaagcgactaatcctgactcggtggttgaatttgagtatgacgaccaaggtcgtttatgcagtgaacgtattaatggacaagagattgttcatcaatggaatgatactgataatacactggcattgacccgttttggtgaacgggagttgcattatgcttttggggcactgggggagttaacttcactgcaagtcaatcagcatgcaccacttcaatttagctacaacgcggtaggacaagagtatttacgccgtagtcacgctggatttgtcaattccagtcactatacggccaccggtttactggttcatcaacgagcagggcgaggcaccgaacagtttttacaatcgatacaagcccatccccaacaaccgccattttgtacggatgtgcaccgcagttatcaatatgatcgcgcttataatgtggtgggaattgaagatgatcgctggcgacagacacgttatcactataatgccaatgaccaaatcactgagacacaatacagtccacaatggggtaatcaggacgaaaaattccagtatgataacaacctcaatattacggagcacttaacaacgccgtcttcgtcgatggtgccttcagaagcacaaggggcgatgctacagctatttcagcaacagcaagcaggacgggtgactcgccgttacacagcgaagggatatcaagattaccactatgatgttaatgggcgattagctaaaaaaattgtccatacacgcggttttcgtcccagagagtggcgctatttatggaacacacaaaatcagctaaccgcatgctttacgccgaaaggggattgttggcactatacttatgatgcttttggtcgacgtctgagtaaaaccaaaactgtcgacagtgacttagcccatattgacccattatttccgcagattaagcctaaaatcaccacgtggcgctatttatggtcgggagaccaactgatagaagaaacgccgatatatgccgatggcactcttgctaatgcgcaacaagttcaatggctgtatcaacccggagaaataacgcccaccgcgcgttatcaacagggcaaactgcactatgtggtcaccgaccaccaaggaaccccgcgagagatattcagtgaaggcggacaagccagttgggcaggaaggttgaatacgtggggccaaatgcagttttggcgttaccgcgactgtaaagcggagaatgaccctaattataccgaatgtccttttcgctttgcggggcaatatgaagatgaagaaagtggcttgtattataatcgctttcgctattatgataaggaaacagggcagtatctttccccagaccccatagggttattgggtgggctgaatccgtatgggtatgtgcattgtccgacggggtgggttgatccatttgggttggagtgttgtccaggaaaaataactggagattctaagactctaagagaaaaaattaatttagctcgatcaggagatgtttctgctcaagcagaattggcttatgctaaatatatgcgtgacaaaggacataacattcattttaatacgcctccaaatcgttctatatcaatggctgatttcacagtagatggggttcaaattgatactaagctattaagtggaataggtggtaatgcagctaaaaatattacgaaaggtgtaagacaagttggtgataatggagtggttcaagtaattagaaactcagattcacctataagcttagaacaatttcaagggtttattaatggatataagtctccaaacccttcagttaaagttgagctaatcgatcaatcggtcctgaagccttactgggatttttaa

SEQ ID NO: 299900 - DNA, 471 bp, Proteus mirabilis
atggttataaaaagtaatatattagtagaatacaagaataaaagtttgataactcttaaaatgaatgagttcttaaatctttttgatattgatttcagtgtgtcagattatgattattttgatataaatgaatataagtttctttcagaagaatataaaaacattataaatgatgaccatagattaattgatattctttctagggttaattttacatacgagatagatataggaacatcgtatacgtctatagaaagtaaatatttgcccgttataacagactatatagctcaaaagttatcttacgaattacactgcaatgttttaacttcatttaaatcgtgcaaaggtgatgatgattgctatgttagctttttttattgtgggaaagagttaatagatttatcttcgtttgatttgtcgatttgggataatgtgaaatggtcaaaacacaatgttaaactaagttag

SEQ ID NO: 299901 - DNA, 453 bp, Proteus mirabilis
atgattagcataaatacatttattaaaataaataatgattttattgatgtttttgattttgataaaaaaatcaaaaataatgattatatagatggtgcaattgagttaactatcaatggaaaaaaactaattgataaatcaatgtatgattatattgatgatctttggagttatttgtctgaaggtctattcttagtaagccaaggaagtgaatttaaatgttattttccagatcagccaattgaggttaacttcgtaccacaaaaaggaaatcgtattttagttagcattaattgtcacgaagaaataaaaacatctgttgataagtcagagtttttacatgtaatgacggaacatgcaaaaaaattctttgaaaaattagaagacttaaattcggcatcaatgggaacacgtaaatcagccttacaatttcttgataaaatcaacgtataa

SEQ ID NO: 299902 - DNA, 435 bp, Proteus mirabilis
atgaataataagcttcaagaaaaactactattacttagggcaaaaaagtatattaatagaatccgaggaattaagaatatagccgtaaacctagatgattatactcaatttcaatggcatagagatatttataataaaatattaaggagaagtgagttacctgaatataagattgctcttccagctagccaacaggacatttatttatacttgcaaccaaaaataaatatagataaaagtagttgttattatatgttttttgaaggaaaagtaattatatccttttattttgctgatttttatgatttttttcttagtcatatgttattaaataatacatttgatatgaatattctatcacttaatccagatcgagtaattgatatcagtgaagatgaatatgacttaaatatatatgatatatttagatcttaa

SEQ ID NO: 299903 - DNA, 1026 bp, Proteus mirabilis
atgagtgataatcttcctgaagcaccacagggtgaatttattttgttccgcagtgaagatggtcaaactcgtgtcgaatgccgctttgagtctgatacgttgtggttatctcaatcctcgatttgtgagctttacggtaaagctaagtccacgattagtgagcatattcgcaatatttttactgagggtgagttagtcgaagattcagttgttcggttttaccgaacaactgcggatgatgctaagcagtacaatgtaaaatacttcaatctctcaatgatccttgccattggctaccgtgtccgctctgtccgtggtactcagtttcgtcagtgggcaacgcaaacgctggaacagtatctgattaaagggtttgtgatggacgatgaacggctgaaaaatccgcctatcggtcagtcagtcgtaccggattactttgatgagatgctcgaacgcatccgtgatattcgtgccagtgagcggcgggtatatttacgggtgaaagagatcttcaccatggcagcggattacgaaccatccaataaagaaacagctcgtttcttccaaaccatccaaaacaaactgcattttgcttgtactggcatgactgctgcggagcttatagctagtcgcgcagatgccagtcagccggatatgggcttaaccagctataaatttgatgaggtgcgtaaaaccgatgtcacgattgcgaagaattatctacgcgaaaatgagctgaaagaattaaaccgtatcgtcaatatgtggctggattttgctgaagaccaagcgctgcgccgtaagcaagtttttttacaagattgggatactaagctagatcagtttttaagtttcaatgaccgtgatgtattacaaggcgcaggtggaattagtaagaaagccgctgatgaaaaagccaaagagatatttgatatttatgctcaaaaacgtcgtcggttaaaagaaaccgaaggggaaagggcaaatattgcggcattgaaagatttgctaaaaaaaggtaagtaa

SEQ ID NO: 299904 - DNA, 750 bp, Proteus mirabilis
atggctacgcaaattgattttactctctcgaataaagtggctgttattactggtggtgcggctggaattggcttatctatcgcacagatgtttatcgaaaaaggggctaaagtcgctttgttggatagatcagagcaggttgagcaagtggcgcatcgtttaaatagtgcggtggggatctggtgtgatgtttcaagtgaagagtccgtaaaacaagcggtacattcagtcattgaagaattcgatcgcattgatattcttgttaattgtgcaggtattgtcgctttagctcccgccgaatcgttatctcttgaagattggaataaaaccttatcagttaatttaacggggacttttttactgtgtcagcaagtggggcagcatatgctacaacgcgggcaaggtaagataattaacctcgcctctcaagcaggtattatcgctttaccagaacatattgcctattgtgcaagtaaagccgctattatcaatatgacaaaggtgatggcgctagagtggggacccaaaggcctacaaatcaatgcgatatcccctactattgtgatgaccgatttaggtaaaaaggcttgggaaggtgaaaaaggtgaacagatgaaagcgcaaataccggcaaggcgatttgctgagccagaagagattgctgccgcagctgtatttttagcaagcggtgcagcggatatgatcaatggccataatctggtgattgatggtggatatactattcaatag

SEQ ID NO: 299905 - DNA, 480 bp, Proteus mirabilis
atgccagaaagaataagaaagatactagatagcaatttaatagaaaaatttagggaaactgtaaatggaaataatcactatgttcgctataagtattataatataaaaggagaaaatgattggaatatagtatgtagttgtattgattggataaaggtttctgttaattacctatattcatttcctgatttttctaaaaacatagataataaagtaatgcagatgaatacattattaatatctattgacaatatattagaagcaataaaacaacttcatagagtattttatgatgaccaacgtttaaaaatatacccttttaatggaaggaacaatatctttatagataaaaaaataatctgtaaggatgacgaatcatactttaaagaaattcgtgcttgctttggtgctcatccaacaaaattaagaaataacaataaaaaatacaagattcaaaagatgctaggcttggttttctga

SEQ ID NO: 299906 - DNA, 657 bp, Proteus mirabilis
atgggatactcgatacaacatttacatatagataagaaacatatactgaccttaatcgatgagcaaacaactcttccatccttgtttgttgcaatatactcaataagaaagctttcacttctacgcttccgcactcaagaaaaggaattgttcacgctgaagtatttcttggagtattgggaaaataaattcagtaaaacatttgatttctctttcagggaatctaactacgatattgcaaattgcatttctgaattagatggtttctatcatcacttgagtaataaaaaacaccttagaagtactaaaaacatagtttcaattcaaaactcatcttttgaatcatgcagaagtaatgcggaacacttacgaacaatttctaagttctttcaatatctaaatcaacgttatatgaatcagagctttcaacaaattgaccgatatgaactctgtaagtcacgcgattggaacgaacgcagcataaaatcaatagttcggaattttagcaaagtacagccaagtggtatgaagcataatcctacttaccgtagtttaacgaaagaacaaatcttatgcctagatgaaatgctactaccctcttctcctttgatatcagaatcaaagacaatgataatttcttcacaaaagagcaactag

SEQ ID NO: 299907 - DNA, 207 bp, Proteus mirabilis
atgcaaaacttaagcaaaaaactcggtgaacgaatacggaatgagcgaattaagcaaggtatctcacaagaaaatcttgcccttttgactgatatcgatcgtagttatgtaggtcggattgaacgtggtgaagtcaacatcacagtagaaaaactatatcagattgcaaatgtgctgaaatgctcaccaagtgaactgctaccgtaa

SEQ ID NO: 299908 - DNA, 3537 bp, Proteus mirabilis
gtgaaacggtccccacagcgagaacagttttttatacattttgctgaagaaagagctaattcaggaaagttttttgtcattcctgactctagctactcaaatgagacaatagaaaaagcattggtttccgaaggggtaattagatatgagttcaatcgtggatattttattactcatgatatctatgaagaatgggcgcttgataaattcgtcgagagtcgttttttatcctcagaaaatgcagaaatattttttgatacaatacagcaatctttgcccataagaagagttttcaggcggtggttatcagaaaaacttagcgtggccaatgaagaggttaaccatcttattgtagaaacattgtcatctcagaaaatatccaatttgtggaaagatgaagttctcgtttctatgcttttatctgattattccgattatttttttaacgttaatgacgatgcattattaaaagatgacttccagcttctcaaacggatatgcttattgataagaattggatgcaaggagatagataacagtttttttgataagcttggtgtgagagcaaaagatattttatcaatggaatatgtaataactaaaccgaaaggaagcggatggaaatcacttatcaaattcatcaataataatattgaaaagataggtattaaaaatctcaattttgtattgcccgtcctctatgattggaacagtcacaacaaatctggcgatacaactaaatattctagcaaaatcgcattatcattttatcaatcggcaatcgaaagcaaagtctatcttgagggtaatgattttaccaagagtttaattctcaccattctgtatggggtgggtgaaattaaaagtgagcttgaagccatcattgatgagataattctaaataactggaaacaacatgatgccccatatcatttaatgagtgaatttattttaacaagaatggaatgctttaatgttgctattgaaattccggaaaaagtaatcgctcttgcaaaatgtttttggatgtatgaaccaccagaaagtgaagattatttttatgattcgagactagagatagaacatgagtttggtattgagaatggacatcaaaactattttccagccagtgcttatcaaacccccatatacgcgctgctgcaaaccaatttaaaattaacattaaacttcattgttgaactaataaattatgcttcaaaaaaatatgtagaatcgagccttgatgagggccagattaaaacagcaaaattgttactagatgatggaaaaaaaattgatctccctatttcaaatcgtctttggtgtatgtaccgaggtacacaggtaaatcctgatttattagaatcaatattaatgtcactggaacgcttttttcttgagagaggaaaagaaactcaatcccaaatacttgaatattatctgaattatatcttaactagatcagaatcttctgcactcgtagctgttgttgcaagtattgtatgtgcttttcatgacaaaacatttaatgtagccaaaattctatttagaacaaaggagtttttcttctttgacacagttcgaatgatacaggatcaaacacataagactcagcttatttcgttaaaaaatttcaacatcaatcgaatgaaggaatatcacgaagatgaaaggataagcgcctgtgaccaaaaacataggaagctatcattagaaaatattgcatttcacttccaactttttagaacagaagaagtaagcgaaagcgaatcagagaaaaggcttcaggaaatttgggatattcttgatgttcactacacagatttactaaataaagaacaagaaagtcatcaagataaaacatggcgcttgtgtttagcgcgtatggataaaagaaaaatggcacctgaagtgaaggaagtagaaaatggtataacaatagaatttaccccagagattaccccagagcttaaggaatatagtgaaacgtctctgcaagaagcgagcaagctgtttacatattccggtttaaatatttgggctaatagtagactctataaccgaggtgattacaaaaaatatgagtcatatgaaaatgctcctctgactgctttgggtgaagcaaaaaaaatatggaatcaactttcagaagataatatgggggaggaattacagctttatcgagcaacaccatcgtatgtgtgtgccgtattattgcgggattttaaggagaagttagcaagcacagagttagaattttgcagggaagttatatttgaatacgcaaacatcgttaacaatgactattataggcaccaaatcggtgatggccttgttcctgcgttatttgtactaccaagattaatagatgattttccggacgaacgactaactatcaaactgttattaatcaaagcactaatgaggcatgactcaatatcaataatggggatgggcagaataaattcagttgtcattcaagctgttcagtatttatggaagaatgaatttaacttcatgaagtcgctatacggtgggtatttggtgattgctcaaaaatatagagatgttcgggttcgtttaagacaagaggcatataagcagcacaaatatgaaattaatgataatgactttggacaggagttatctaaagaattagaaagtgtagtaaggtatctcgaaaatgaaactactacagaattcacaacagataatattgaaggcatagataacgatatattgataactgcttttcagcttatacctatggatggcacacataagaaatcagtgccgtttgtcgaggaaattattggaataatttcacaacaattgctttcaggaaacaaagaagatcgaattgattatacttttaggtatgagtttttaaaacactatgcccattttatccttcatctagagaataacgagaaggacagataccttaaatattttactgataatttccccctgaatgaatatgtggcagatttgttgaatgaatttattagcgctgaagactcattgaatgtgccggactcgttttggtatgtttggaatagatttaaaagccacatcattgattcaataaacaatcaaggttggaaacatgataaaaagcgcataatcgaatcttttttatttgcaagaatcccttggaaggatggagcaaagacatggcattcattttcactggataatagagcattttttagtgagttaagcggtaagataggtggacaaccatctttcatatatagcatctgtaaactcctctgtggcatcggaagcgagtttttagatgatgggattcattggatcagtcatgcaataaagacctttgatatcgatttatcccaagatgaatcagggaatacactatttttcttggaaaaatatatgagaagatatttattcaaaaatcacgacaaagtgaaacgaacaccaagcctaaaagcaccgtcaatggtggttctagattttctagtcaagcaatattccattacaggctacctccttagagaagatatagcctag

SEQ ID NO: 299909 - DNA, 795 bp, Proteus mirabilis
atgagatatttaatcaataattgtccacttattattttagggagcattgttttactattatcaggttgtcattcactaagttctaagatagatacaacatttttgcccccagaaaatggtagaacagttaaaatttcggttgatgtgccggatatggctgaattattgccaatgaaagtcatgtatcgttcaaatctttgccaaaaaacatatcataataatgaagtacctaaatatacagtacccggttttaatagtgagataatagcattagaaaaaagagagaatagctcattatatagtacagagatcccttatagcggaggcggaaaatgtgattggcaattaagtaatgttacattaagattgacattaaaaaagaataattcttttactaaagatattgttgatatagtaggaaccggagtaattattatttttgataataatcaacctcaacaaactggtcataaaccaattaaaataaagggtagttttgatatagtagagcattatttcccgtgggtaagtgattcatttaaaaatagtaatgatattagcttatggttatatggaaaagaacttttcctttattaccaatctcgtgatgctcaacaaataacatggaagcccatcattcatagtgatattgtggtttattctgaatatccagcagaggaaaaaacagaaggtgtaagtacaatctattcttatccagatggtacaaaaagtgcaaatagggatgggaagcctgattacaaaaaactactctctttaattaattcgtcatcgtaa

SEQ ID NO: 299910 - DNA, 234 bp, Proteus mirabilis
atgggttggcattgtgtgcattacaccactctgcctttgatatgggcgcaatcagtaatcagtattgatgataatatgaaattattagtttctagcggtgtgaatggtaatcaaatggtagagcaattattttggcaattttcaaataaggtaattggcctacctaaaaacacaaaagaacatccgaaggatacatttatccattggcatcgtgagcaagtgtttaagctataa

SEQ ID NO: 299911 - DNA, 252 bp, Proteus mirabilis
atggtaacagtaacaagagaaataatgaaagaatggataattgaatgcctacaagaaaaaggcggtaaagcttggcctcgtgaagtctcaaaatatgtttgggagcactatgaatctaagttgaaggcttccggcaatattttatatacatggcaatatgatattcgttgggcagcccagcagttaagaaatgatggtactcttaaagcagtgaatggcagaagagatttgccatgggagttagactcatag

SEQ ID NO: 299912 - DNA, 1056 bp, Proteus mirabilis
gtgaaactaacagatgtaataactgattgtattaatcttaagttaagtggttcggctgtagatagtatgattcagtgtttgggaggaaatgtactacaggaaagaaaacctgttttaaccatagaaatgcttaataaagaagaattactttggatgatgcgcgatgcaaatgatgttcatgtttatattagtgctgatgttttacatataaatgcgttgtataagccaacaactcattttccagcagctagaatttattttatgaaatcaagtgacctttttttgtttgctcgaataggtagctatcttgaaaataatggagttaaactgaatcctatagatgatactaatttttcaaaattaatcgatgatgttggatatatgcagcgttataaagtgtggttgaataaaagaaatatggattcaaatttttttaatggtttacttggtgggaggttgaagaatacgtctgtaaatcaaggggtttggctatcttccaatgggaaatgtttagtttgtggtgtagaaacagatcgagtagcaaccagtacaatttatggagactcaggaattatgattggtatgcaactatgtctggaacatgaggtagcatctcaggataaatcaacactactgaattatctctcagaacatttgggaggtagagtcatattttcaaaaacatccccattaactattgaagaatgtctcgagcagacttgtgatgttcttaaaacaagtcttgaatgttcgattattaaagttgatggaaatactgtaaccgcccgtagacattctggaattactatagtaattagacaacattctttatcaaattatgcctataatattttaagtgctgaaggaaaggcgctatctagggttgattcagctgatcatcatgatattttttatgggcctgatcatgttcattatgatttacgcaaatcgaaaaaaaatattgttgaaactagttttacatatggtgatgttggtttagacataaagcttcttttaaaattagtacaggaagctgaaaaaaattgtaagatatga

SEQ ID NO: 299913 - DNA, 198 bp, Proteus mirabilis
atgcttttaatcaactctcataataggcatgaatcgcaggtttctcctcaagtgatgggtattgtcgtgtgtttattggtttctagtgtgtggtcatttaaaacagaaagagaggtgatgtgcgaacgtttttatcaactacaggattttgcttcacagcaccctgaagcagaggctatcttctacctaattgattaa

SEQ ID NO: 299914 - DNA, 519 bp, Proteus mirabilis
atggcactttccgatactaaggttcgttctgcaaaatctgaagataaagcatataagctgacagatggtaacggactatttcttctggttcatcctaatggctctaaatattggcgcttccgttatcgctttggcggtaaagaaaagatgctagcatttggcgtttaccctgatgtctccctagcgaatgctcgtgaaaaacgagatgaagcaagaaagtttgtcgccagtggggtagaccctagtgagaaacgcaaagaagttaaagaagagcaacaaaaagaattcaatacctttgagaaggttgctcgtgattggcatgcaactaataagaagtggtctgaagggcatagccatcgagtattaaaaagttttgaagacaatatctttgcggctattccacaatggttaaaaatagaatccgttatctttcacaccctcgaccaattatgtcctgactatcacggggttttggtcgttttgtactttatcaaatcaaggggcttacctttaccctga

SEQ ID NO: 299915 - DNA, 909 bp, Proteus mirabilis
atgcaaaatgtgttgttaacgttatggcctttatttgcgttaattgcgctaggcgctattttaagaagaaataaagcatttgaacctgcattttgggtaggggctgaaaaattaaattattttttactctttcctgcattacttctcaatagcttggctaatgctcctttatctgatcctcaattacctcaccttgctggggctattttctcagtagtcatcattaccactattttgtgtgttattttaaaaaaaataaccggttggtctgctggccgttttggtgcgatcgttcaaggcaatattcggtttaacacttatttaggtttagctattgtcgctgatttatttggggttgagggtttaggaatagctgctttgatattagcaaccttggttcctctatcaaatgtgacttcagtgctttgtttaaccgcaggacaaaatgtaacttttcgtcaattaatcttcccaattattaaaaatccattaattatctcttgtgtaatagggattgtaatcaatttatcaggaatagggcttccttttggtagcgatcagtttctaaaattgttagctgcgactagtttacctttagggcttatctgtattggtgcggcattacatttatcaacattaaaagcagaaagtaaaatgattagtattaacacagtgactcggttgcttattgtaccgataattgcatatagtgttgctaattttttaggtttgtcttcattagttatgatgcttttagtcattttcttttctatccctacagccccaacttcttatattttaactcgacagctaggaggggattctgagctaatggcggggatcattacatcacaaaccatgcttgcagcagttaccttgccgatcgtattaagttttttaattccataa

SEQ ID NO: 299916 - DNA, 594 bp, Proteus mirabilis
atggtactcatgataccttcttttcgtggtgaaaataccaaccctggtcgctatgaaatgttttatggtgaattagaagatttagactcagctagagaatatttagcgtcattaccttatgttgatcctaaacgtatttacgtagtaggacatagcactgggggaacgagagcattattggctagtgaatacagtgataaattcagggcaatattctctttaggaggaatacctgatcttaaactacgcacagaagggcggatgatggttgaattaccctttgataaaaacaacgaagaagaatttaatgtccgttctgtataccgctatattaaatcaataaaaacaccaacattttattttgaaggtcatgattatttttgggatgaattcaatgaattacgtgtggttgcaatggaacacgatattcctctgaaaatttataatataaaaaatggagaccattttaatattattgtccctgttagccaattaattaaagacaaaatcttgcaagatactgatacaaataaagaaagcaatattcgattcactaacgaagaaattaagtggatcaataaaatggtgaaataa

SEQ ID NO: 299917 - DNA, 1026 bp, Proteus mirabilis
atgataaaaaataatgacttacctgcttttatgacgcaagtggttattactgaacccggtggcgttgataaactgcaattagaaaatagcccattaccgtcattgccccctcattatatgttggtaaaagttaatgcagcgggtgttaatcgccctgatatttttcaacgtcaaggtagttatccaccgccagccgatgcatctcctatattaggattagagattgctggcgaagtggtgaaattaggtgaacattgtacaaaatgggcaataggtgatcgtgtttgtgctttagttgctggtggcggttatgctgaatattgtttagtccatgaagatatcgctttaccgtcgcaaggattaaccgatattgaagcggcagcattacctgaaaatttatttactgtttgggcaaatctatttcaactcggtcagttaaaagccggggaatcggttttgatccatgggggcacttctgggattggctctatggcgattatgttagcacacaatcttggttgtgaaatttacacaacggtaggttcaaaagaaaaagccgaagttgcccaaaaattaggggctaatcatgttattaattaccgtgagaaagattttgctacagaaattcctgtattaactcaaggtaaaggcgttgatgtcatacttgatattatcggcggcgattatgtggaaaaaaattatcaagttgcggcgaaatttggcagagtgatccaagttggcatgatgaaaggggcccctaaaaacttaaatatgatgccactgatgcttaagcgattaattcatacaggttctaccatgcgttctagaacgccagaagaaaaaacgcatatagcacaagaattaaaacaacaagtatggccgttgattatcaaaggtcaaattaagcctattattaatgcggtcttttctttgcaagaagttgccaaagcacatcaattaatggagtctggtgacttaattggtaaagtagtgcttgagattgatatgaataaatcacttgtgtag

SEQ ID NO: 299918 - DNA, 549 bp, Proteus mirabilis
atgaccaacgcatcaaataaaatcgccactcacgagatcacgattcggccaactcaattggctgatgccaaccaactaccgaagattgaacaatcggcaggagagttatttagcagcataaaagaattaagttggatcagcgaaagtggtgtacaaagtgttgaggcgcatattcaatttatccatcaacatgctcactgggttgctgttaatcatgacaatcatcccgttggttttatcatgacgcaacaattacctgaaagtgtatttattcatgaattatcggtaagtaaagattggcaaaataaagggattggtaaattgctgatccagacagtaaaaaatgaagctaaattacagcaatttaatgcggtaacgttaacgactttccgcgatgtcccttggaatgctccctattatcagcgtttaggtttccatatcttacttgagcatcaaataccctattctttacaacaaattttagataatgaagtagagcatgggggatttgcgagagaaatgcgttgtgcgatgaagtgtgaaatttaa

SEQ ID NO: 299919 - DNA, 1452 bp, Proteus mirabilis; identical to SEQ ID NO: 296351

SEQ ID NO: 299920 - DNA, 462 bp, Proteus mirabilis
ttggcaggggggataaacttatatgcttatgcgccaaatcctttaagttatattgaccccctcggattaaaaccatgcgcgcctactagtgaatttgaccgtataactactgggaaagtttatagagtcattaggcccgatgaagatcctttatccgggttattttcccttaatccaaataatataaaatctgttgctgggcatgtaacatcaggcagtcgctctccatctcagtttatatcagcaacaaaagatttaagcattgctgaaagatgggctgcgaaatcagggaatcgtattgttgaaatagacttgcgtaaaatttctggtggcgcaattgacatatcatcccctaaaggactagatctcttaggtaatcaatttgcaaggcggctggcgaaaggttcttcagaagtgttgtttgacggccccattccagcgggtgcgattaatcctctttaa

SEQ ID NO: 299921 - DNA, 294 bp, Proteus mirabilis
atgaacgataataattttgattttaatagaactattattgatgtagtggaaatgattagattggcggatgatttagatgcaaatataattgataggctatatatgtcacttgataaagtaatgactgattatcaaagtacttcgcttatcccaaaattacttgcttatgatcttctagttcttcatgataatttggaaggttctttaaaattttactctggtaaagataacgagtatatatcaggagttaattcaaaggttagtgaatatattgaaaaaatacttttaagctaa

SEQ ID NO: 299922 - DNA, 123 bp, Proteus mirabilis
atgacaaaattattaactgataataaaataccatcacaaaaatcatccttactagatgagataatcgaaaggacagaacctcaacctttatcgggtgagccttcaatgcttccctctatctaa

SEQ ID NO: 299923 - DNA, 1482 bp, Proteus mirabilis
atggatacgcgagtttatgttaacggacgagaaatttgctctaaagcatccgatggtgtatcaacggccgcgtttccagatccttgctggtctcctggcccctcagtggttccttatcctaacacctctagcgcagatgctttatcaaatggtacagcgactgtttttatccgaaatagtatggttgcacaagaagatcgttcattcttttctattagtacaggagatgagccagcaactaatgggttagccaaaggcgtgataacaggcgttattaaaggtaaagcctattttcggtcatggtcacttaatgtgaagtttgaaggatatggtgttgcacgtcatcaagatcttatgtcacataatcatggctcttttccatctaacacaccgacatttccgtatatttctcgaggggttttgggcggtattaaagattgtagcaaagaaaatacacagattgaaaagcgctgtaaacccgataaggataactcggatgtccaacaagagttaaaaaaagaaagtgcgcttagaaaagcattagcaagaagaaaaaaaatacaaaataaaaaaaatagcaataaatggcactggacggaggatcattgtgctgggttagaaataaaaatgtcagggaaagatcctaaaaaagttgctaaagagtttatggatgatatttctgattcgatagacgcattaaaaagcgaattagattatgttagtgcattaaaaagtaaacttactgatatggcaaaggatgccgcatcaaaagcattcggtaaggtaatcacaaaggctggaataaaacaagtagcaggtagctcagttccaggttggggaaatgcggcaatggccgcatggacacttggtgatgcagtctatgcaggttttgaggttagcactattaaatcagctgctgaagagggactagaacaagttaaagtcttatctgaaaaagcggatgatataaaaaaattgatcgaacaaactgaaaattataaaaacttatcacctgaagaacagctagaaaaagcacaaaaattggctgaagatgcacaagatattcttgctagcttaaatgcttgtgttcgagcaagaaaatgcaatttagtcccttattctgtaaaaaatgcgataaaaaaaggtgccagaggaagtaaagtagagaccgcgaaaaaaggaggatgttgccaaggacaaacggggcatcatttaatttactctcatttgttaagagagacatgtaagaattatgaggagtccatagcccctactgtttgtgtggaaggtacgtcttggcatagtggtagtcatgggcgtattcatatggcgatggatgatgaaattacttatttagttgaaaataatcgattaaataataacactatgagtatgcaacaagctattgatgctgccgttaatgcccataaaaaacgtttccatatgctgattgttccaatagatgtattagagctcaattag

SEQ ID NO: 299924 - DNA, 963 bp, Proteus mirabilis
atgacatatataaaagaaaaaacttggaaagaggttctgaaaggttggataattactggttgtgcaatccgaaataaaaatattgtgtacttttgtttgcgcaaagatattccatacgaaaaggctcgaaacttatggaacagtgaaatacctagtatgttattagctatctatttagatacaccagtcacacctacagggtatgcgagtattactggatttgataatcctaaagtaggtgtttgtttaaaaccgaaagaacaagggatgcttgcatctagaggtgatgatggtgttgtggtgtgtgtaggcagtggtgctaatttgccaccagaaaaagttatggatggtgactatgcaaaccctaaaaatattaaatgtgttggtggatatgcttattatgttggctctgcacgcaaaatttataaacgtgtggatattgggaaatggcagagaattcaacatgggataccaggaggagaaaccaatacagatatggggttcactgatctcgatggtttttctgagcaggatatgtatgccgttggcggtgaaggcgatgtttggcattataatggcgaaatctggatcccctgtggttttccctctaatgagcaattaagtgcagttttatgtgcccctgatggttatgtgtatattggcggtgaagggggcagtttatggcgagggcgtgaataccaatgggaaaaactttatcacggtagttcggctattttactgaaccagttgcgttggtttgaagataaagtatgggcatgtgatgactatcgcttacagtgttggaatggtaaagaaatggtccgtcccaaggatggtgataaaaatgttatcgcctcaggtcatatggatgtccgcgatgggattttagttgtagctgatgattataatgttgatctgtatgatggaaccgcttggcataagatagtgagaccttataaataa

SEQ ID NO: 299925 - DNA, 156 bp, Proteus mirabilis
atgcatttagcgtgccaatttgtattttccgccaataaaaaattaattctcaaacagcataaaactaaccaattgaattttttaggcgccttcgcctttatggcgtatttaaaatataaaagatcagagagcgtatttttatcaggctattgttaa

SEQ ID NO: 299926 - DNA, 318 bp, Proteus mirabilis
atgaaaaagttactagtaatacttgccattctagctattaccttatctatttttgcttataataaattaaccatatttacagtacagccaataggtgcgataccagatggtgtaaccgttgttatctggaaaaagggtgatatgaagttttttgagagtccagatagcttatgtatacagaaaactggtggagtaagcctgttgtgcagaatgagaatgttaggaaacgcaattgataaagacgatatcattattagattcccgtacagcgaatatgcatacttaaaatcaaccaacggaagggtttttgataggtaa

SEQ ID NO: 299927 - DNA, 480 bp, Proteus mirabilis
atgaaaaaaatcttacttatttctgtattatcactttctagttctgtttttgctgctgactatcaaaaggttggtgattggttggtcagtaaggaagaaaataaattaacagacaaaatagattattacgcaattctttctgcaaaagataaagatgtatcacttgtgttacgttgccaaaatgataagactgaggcttatttatcaatgagggactatattggtagcggttataattccaaggtgactctgcgaatagataaagaaaaacctttaactcagtcatgggggattggagaaggtggcacatcattatttgtacctaaacctgtatcattaattaaaagtttagtgggtaaaaagagtttaatttctggatatagcccgtatggcaaaactcaagtgatagctgaatttgatctggaaaatatagatacgatagcaaaagaaatatcatccgcttgtaactggaagttataa

SEQ ID NO: 299928 - DNA, 726 bp, Proteus mirabilis
atgagtgagatcactttaacaaatagttttaacactgtcacgaacaaaactatcgatacccagaagttattatcaatgattaacgtggctcgtaagtcatgtggtgaaaatcaaattcgtaataacgtattgattgaaagagtaaaagacgaattagatggcgagacctacaaaatttttgtaggtcataaaaacggcgctcaaattgaaataattgaaatggatatcaaacaagcgcttcgtgtagccgctagagaatcaaaagctgttcgtcgtgttctggttgacaagctggaatcaatgcatatagcttctcaaaaaagtggcaaaagccaatcaggtttacctgaataccgccaagcaagaacgcttaaaatgtcggttgatgctattactaacttattcgacttaatgccgaacctgagtgatgaagcaaagcaatgtgcggcggctaatatcgtcaacccgattgttggctttgaggcggttccattaccagtacttgagcaaaagtattataccgccggtgaggttggcgaaatgcttgaagtatctgccaataaaattggtcgcatggctaataagcatgggttaaaaacagaggaatatgggaaatatttcttagataaatctgcttattcttcaaaacaggttgaagcattcagatataacgacaatggagtaaaagcattacgacacgccattcatggtgttgaagtagcttaa

SEQ ID NO: 299929 - DNA, 654 bp, Proteus mirabilis
atgctcaataaagtgaaaagaccccacccgaatgaatcgaatgaggccttaacgtcaaatacccttgcgacaggaataagtgacatgaacattgtagctaaaacagatttaactttccagaacattacatttgagccgatttatcaagatggtcagttatggttcacatcgactgaattggctaaggctttaggttatagcagaaccgacaacgttaaccgtgtttacgctcgtaattcagacgagtttatggactcaatgacaaccaccgtcaaaatgacgttggttaggaaaactggtgaagttgatgtaatggttagagttttttctttacgtggtgctcacctgatcgcaatgtttgcatccactccagtagctaaagaattccgtaaatgggtgctggatattctggatagagaagtagctgacaagaaagatttaccaatagaaaaagatagttcggtaagtgcaaacggattattagcaagattaagtctgatttgtacaacatgggatgaagctagaaaggatattgagaactttgatccgaaaatggcgaaacgtcttaattcaacaatgagtatgtttttaatgtactcacaacacatgaaaggaatagctaagacaaaacaagttaagaggttaacacattga

SEQ ID NO: 299930 - DNA, 399 bp, Proteus mirabilis
atgtcaagaatagctccataccctctacgcatgacgcctgaaatgcgagaaaggctagaaaagcaagcaaatgagaatcatagaagtttgcaacaggaaatcatctatcagttggataccatgtatcacatagatgctgtactagatagcgcctcacttaaaggtgatagttacagcagggtaatgactttattgaaggaatataaattagcctctcaacttgcaggagaagttgaaaggctgaaacatcaactatctttgcttagtggcagcgtaacaacacctgaatctgacaaattcatagaaattgaaacccaagctaacataattaaagaatcagtagataagatacttaagcaaatacctttcagaatatcggggatttcgaaaaagaaataa

SEQ ID NO: 299931 - DNA, 402 bp, Proteus mirabilis
gtgcctataaattgtgatgaattgttagcattcgctagagattgcgtcgaaagagatgatgaagttggataccggaatgcgatatcaagagcatattattcagcctatcattcagtttaccctgtattagataatgggccaaaagatagccaccaaggattgatagattatttaaaatctgatgcatggcgcggtaatgagaagtatgaaaaacagactttaattgctattgcctatatgctcaaatcacttaaagatagtcgtattattgcagattacaggctagaagcatcagagggcgtatcaaaacacaatgcagaagagtccgtagagttggcttcaagggttcactctaaagtatctgaaatgacatctcttaaattatcatccctatctaaataa

SEQ ID NO: 299932 - DNA, 696 bp, Proteus mirabilis
atgggtttactgaaagatattgataattatttttctggtttaagaaagaattatgccaaagctttagcatatagtttgatcaaagatcttaaaaaagctgaatattactttgagctatctttgcaaatacccgacgctcattatgcaacaaactatatggcaatagtaaataattatggctcaataataaaaactaaagaattgtcagaaagatttgctgaagaatatgaaagcatatctttttcaacgttggcatttgagtcatctttatactgggcagacatggagcgggctgaatattatatccaaaaagcaattaaactatctaatgatgaggacaggatgaagctaaaagatgattttgaatctgccaatcttgctttatctaggtttaaggaaaaagcaggatttgaaaaagacgaggcaaaattattatccagtataataatgaacatactggaatctaataatattagaattaaaggtattagttatatttatgagcaaaatcatgaagaaaaattaaatacttacattgttacggctcaatgtgaagacccgtctaagattgctgacatgaatatggatttagcgtttaaattagctgaatatgatgagcttctggataaaaacttcagtgccattatacgtggttgctcaactaatacagacggaggaattgctccgtgcctataa

SEQ ID NO: 299933 - DNA, 594 bp, Proteus mirabilis
atgggattggggtttgatagatctgttaggaatctatcgtatttttttgatggctatgaagatgtctatgaaaatataaaatatgaagatgatagattttttttaatggtcaaggaaacttttaaaggtaataacccaataagagcaattatcataagatacttagaacacctttttactaatctgaacgatgatgaaatgaataatcttaaaaccctattaagaggtgtattccttacatctggggcactagtaacaacaggaggagttcgtgtttacatagccacagccgcatctgaacttatatataatacggtactaagaaatgccattgcccacaagttaattagaggtggtggaaatatagcaatggcttttgtgggagggtatggcatcatagagatggcttctcaagcaaaggaaagattacgctatagcaatcctactctgtattatgaccttgttttaatgaatttagaaatggggtattttatagtagaaccaaatatatcaaaatggttatatatgataggatctgaaaagaaaagtgttgatgaagtttatcgagcaataaatggattaatttataattaa

SEQ ID NO: 299934 - DNA, 1371 bp, Proteus mirabilis
atggaattatcttcgctgacagcgatttcaccgattgacggtcgttacggtagtaaaacctcgtcgttacggactatttttagtgaattcggtcttttgaaattccgtgtacaggtagaagttcgctggctacaaaagctagcatcttgcaccgacattaaagaagttcccgcctttgaacaaaacgcaatcgattaccttgatgcaattgttgctaacttcaatgaagatgatgctacccgtatcaaaactatcgagcgcaccaccaatcatgatgtgaaagcggttgaatatttcttaaaagaaaaagtggcagctatccctgcactacagcaagtttctgagtttattcacttcgcttgtacttctgaagatattaataatttatcccatgccatcatgttagaaacagcacgccaagaagtgctactaccagcatggcgcgaactgattgatactatcagtaaaatggcgcaagcatatcgtgatttacccctgctttctcgtactcacggacaaccggcaacaccttcaacggtaggaaaagagtttgcaaacgttgcataccgtatggagcgtcaatatcgccaacttactcaagtagaaattttaggtaaaattaatggtgcagtaggtaactataatgctcacttagctgcctatcctgaagttgattggcaccaatttagtgaagaatttgttacttcattggggatcacatggaacccatatactactcaaattgagccacacgactatattgccgagctttttgattgcatcagccgctttaatacaattttaattgattttgaccgtgatatttggggttatatcgctcttaatcacttcaaacagaagaccattgccggtgagattggctcatcaacaatgcctcataaagtgaatcctatcgattttgaaaactctgaaggtaatttaggtttagctaatgccgttatggggcatctttccagcaaattaccagtttcgcgttggcaacgtgatttaactgactcaaccgtactacgtaacctaggtgtcggtatcggttatgcattaatcgcttaccaatcaaccatgaaaggcttaaataaattagaagttaatgaaagtcatcttcgtgaagagttagatagcaactgggaagttcttgctgaaccaatccaaacggttatgcgtcgctatggtattgaaaaaccttatgaaaaacttaaagagttaactcgtggtaaacggatcacggcacaagatatgattgtgtttattgacggtttagcgctaccagaacaagaaaaagcacgcttaaaagcgatgacacctgaaagctatattggttttgccagtcaacttgttgataaattagattaa

SEQ ID NO: 299935 - DNA, 480 bp, Proteus mirabilis
ttggcttatccaacatatttagcattaaaaggtaaaaatcaagggttaatttcagcaggttgttcaactcaagactctataggtaatctttaccaaataggccatgaaaacgaaatacaggttattgggttacatggaggagcatttagagaacagaacgcattatataaacctatcgtatttacaaaacctatcgataaatcatctcctcttttgtctgttgctctagataataatgagatcttagaagcttattttacattttatcgtacaagtcaaagcgggcagtttgaaaaatattatgagattaaacttacaggagtatccctgattgagatctcagacatatttccagattcaataaaagataatgaatcaatgccatatcaacgtatacaaatgaaatatgagtcaatatcacgaaaccatttaatcgcaaacacatcaagttatagtattaatagtgaaatagttcaatag

SEQ ID NO: 299936 - DNA, 402 bp, Proteus mirabilis
gtggttaaagtaaacccaataaacttaataagttcatctatcatattatttctattggctatatatggtctatatgtatcaatagctaattatctagattatttcttaatgaaagatagaatatttttctcatttttaacagggttatttggttttggaagtcctatcattctctatttttcatattttgggattatcttggcatataagaaaactccaacaaaaaaaataataaaatcagctaattatttagcaggtattgctatctttggtgttttttttagtttgtttttttctttttatattcaaatggatttggtagataaaggttattattcttgcgataaatcatccatgtttgcaccaagtgaatatgttgtttcaaagacgatgtgtaagtaa

SEQ ID NO: 299937 - DNA, 834 bp, Proteus mirabilis
atgggatatatatatgatacaacagtgattgattgggataaggaatataaatatgctaactatagtaggattaaaagtataataaatagtgaaaagaatgatgataacgttgctgcaattattaccattgaggaagcagagtatattttgaataatgagttttctcctacatcatttaagtcacctaaagatacgctctttggtataactgattttatttctaatttttccgggaatatttatgaggcatatcgtgtacaaagaataataaatgaattccgtaatgttaatatccgagcaacagaatatgttgctccaaatggtaatgtctatattagactatctggtcatgctggtgttagagctttcttgaatggcactagatatttggcaaacaatcctcgtatattgtatatgggagttggaactcaaggtatgaatgatacatctatcggtgctactcgatttgctattgttttttctcttgcttatcgggccgtggaattaatatttaaagatgaaaatacattgattaatttctttgtcaatgtaacaatggatattgctaaattggctatcgcaactcatataactactatagctacaggatctatagtaacgggattgctagccgcaggtgttagtgtcatagctgttgctataggagtctttattataggagcattaatttcctatgcattatataaattagacgataaattcggtataagtgaatctattataagagatttaaaatatcaccgtagggctaaaactgaaacaagaagtcctcagattatatttaataattggagagccttcagtcgtggttaa

SEQ ID NO: 299938 - DNA, 297 bp, Proteus mirabilis
  misc_feature (276)..(285): n is a, c, g, or t
atggaaaatattattatattcatctcaatatttattttgatagtattactttctagttcattatcttggttttatatcaaatacacattagggttactttatataacccttagccatttttatcgaaatttatgttttatcgttttactctgtgtcgccatctcgattttggagggtttttatcatcacctcacgctactgctcaaagagcaagtagcatattccaatttagggcatatcgaaatttataaaaaagataataaacaggatattacnnnnnnnnnnggatattactga

SEQ ID NO: 299939 - DNA, 681 bp, Proteus mirabilis
atgtcgaaaattgatggaacaattaatcgaataaaagatcaacaagtaggtagctcaactaaaaaagtattattagttgaaggcagtgatgatgagttagcttttggcgcttttttaagaaaaaagtttcctagttgggaacagtattgggttattgctagcacgggcaagaaacaaaatgtgttggatattttagcccaagaacaagattggcttggtattgtcgatagagatgaatgggataatgctaaaattgaggaaaaacaagaacaattacccaatttattcattcttcctcgtttttgtattgagaactatcttgttcttcctgatgaaatttggtctgcattacctgaaaataagaaaaatagcatagaaaatggatgtgaaacattaaggaaagatatcgagactcagcttgaaaattggcgaaatcatgctgcggtatgggcaatcattaatcctttatgggaaggattaagaagtttgggatttaaagaatcgttattagaacttaatacaagcaatgatacagtaaaaattgaacaatttttacaaaagtggcatcaatatcttgagccttctcaattattagaaaaactcaaggataaaaagcaagaaataaatgcatgcacagtagatcaacaatttttcgtgttgaggtttggcaatgaccattaa

SEQ ID NO: 299940 - DNA, 159 bp, Proteus mirabilis; identical to SEQ ID NO: 297225

SEQ ID NO: 299941 - DNA, 213 bp, Proteus mirabilis; identical to SEQ ID NO: 297307

SEQ ID NO: 299942 - DNA, 210 bp, Proteus mirabilis
gtggatgtcggttttccttgtgcggtattaatcacaacaatagggcagattggtatgatggattcgatgggaggaaaaacgattagagtaattctttgtgggcgaggtaaccgtattattcctcattccatgatagtggcgggacaaatgtcaacaacctcactaggtaagcagtatttttatattgatgtaagggagtatggtgggtga

SEQ ID NO: 299943 - DNA, 165 bp, Proteus mirabilis
atgctacgccatatgggttggacagaagccgctgacttaatcattaaaggtatggaaggcgcgattgaagcgaagaccgttacttatgatttcgaacgtctaatggacggcgctaaattgctgaaatgtagcgagtttggtgacgcgattatcaaacatatgtaa

SEQ ID NO: 299944 - DNA, 519 bp, Proteus mirabilis
atgtttaataaacagaggatattctttttcataacgttactttcatcattttcattaatggctgatgagacggcaaataaggcgacaatcactaacagcgaaaataatttgagattatttggcacactatttattccccctccttgtgtgatccaaaacaatgacatgattgatgttaattttggtcaccaactgggaacgagtcgcatcgatggcattaattatacaaagaccgtcaattacacgttgcagtgtgaagaaaatgcaaaaggttgggcattaggtttatccattatcggctctgcaagccaatttgatgcggctgctttacaaaccaatataacggatttagccgtacatctcacgatagatagtgagccatttattttaaataaacggtttgttattacctctgataaaccgccgattattttagctgtgcctgtaaaaaaatcaggaagtaccttaacaaaaggtgcatttgaggcaacagcaacgctacttgctgaatatcaatag

SEQ ID NO: 299945 - DNA, 798 bp, Proteus mirabilis
atgtcagaaaaccgtgaaattttacgtttattagccattatggcgcaattacgtgatcctcaaacaggctgtgagtgggatagggtacaaacctttgacaccatagtcccctatacattagaagaaacctatgaagtactggatgctattgcccgcaaagattttagcgcacttaaagaggagttaggggacttactctatcaggtcgttttttatgccagaatggcgcaagaacagcaattatttgattttaatgatgtctgcgaagctatcagcaataaattagaacgtcgtcatccacatatttttgctacagaaaatgaaaataatttagcgactgaaaagcatcgttgggaaaaaatcaaggctcaagagcgtgaagcgaaagcacaatattcattacttgatgatattcctgctactttaccggcactgatgaaagcagagaaaatacaaaagcgctgtgcctccgttggctttgattggcacgagctttctcctgtattagataaagtgtatgaagaaatagatgaagtgatggcagaagtgaaaaaagcccctagagatgatcaacgtattgaggatgagttgggggatttgcttttttctgtggttaatttatcgcgccatttaaaacaaaagccagagcaggcacttaatcgagcttgtcgtaaatttgagcaacggtttaggtttgttgaaaaaatgctcacagagcagggtataaacatagaaaatgcttcattagaagagatggagatcagttggcaaaaagcgaaggaaaaagaaattgagtga

SEQ ID NO: 299946 - DNA, 321 bp, Proteus mirabilis
atggaaaatgacgataagttaaatgaaaaaattgaacaaagaaaaaaaatgttaaagcgagtcaaagaagggcttattgaacgactcaatttaaataagagtattaatcaaattgatgatgatactccgttatttggtagtggtttaaaattagattctgttgatgccacagagataattgtctttcttaatgatgaatttaatattcaagttacagaaggtgatgatccttcttatatgagaacaataaatagcctaacaacctttattttaaataaacagcgagaaaaacaagaaagaaatgagagtaataataattaa

SEQ ID NO: 299947 - DNA, 501 bp, Proteus mirabilis
gtgctcgctttgccttatcagttaaaaagtggtgatctggtttttcgcgatggtgatgaagttattagcgacataataaagcaagttgataacagcgggttcagccacgtaggaatgttgtggataactgagcaaggtatacaggttgttcactcaacacccagtgaacatgctgatagtaaagatggtgttactatcgatagtttggatttctttatcagtcgtgctaagcctaattctgtacgcttttaccaagtgcgtggaagtgaacaagcacgacaacaagcgttagaagctgttttaaatcgagtaggggaaaacttcagtattcagcaagataaaggtgtttattgtacagagctggtggctgatgcatggttaaaagcaggggtttctatttcaacgggcacacgtacattacatatgccgtttatttctgaaagagcacttatttttcctgataatattatccattccgaaaatgttattttgattgaataa

SEQ ID NO: 299948 - DNA, 564 bp, Proteus mirabilis
atgataaataacgtttattatttaaaatcggatatggtaaattattgttcttttattcaaaattatcctgatggtgaagagagcattatgggaaggtcgagagatcagggatggagacggtttggcaatgattatactgaaatatcattagaattaagatcaaatgattttggtaagaaaaactatcaatttgattttagtagcgctctatctccattttttgttttcagtgaatcaggtgctaaccatttatttgatatcttaaatcctaggggacaatttttaggtgttagaacagcaagtaaacggaaaaaatttattgggtactatccaactaatgttttgtctgaatgtgtagataaagaaaaatctatttatactgaatatcccaaaggatttatgtttgaaaaattaattctagttaaaaataatattacagatgaatacttattttcaataaatgaaaatattagtggtgtttttgtcacagataagtttagaaagcttgttgaaaaaattggattgttaggttttgatttttctaaagaaatagagttatcgtaa

SEQ ID NO: 299949 - DNA, 2562 bp, Proteus mirabilis
atgaatagtagacgccgtcgggttgtaataaccggaatgggggttttatcatctttagctaaagatgtgcctcaatttaaacaggttctttttaatagacaatgtaatattaagcccagccaacgttatttaaaatggtttaaaaatgccaatgcatctgagattgagatggcattagattattcagatataccgcagcatatcgctcgatcactagacaatgcggcattatgggcatatcgagtctgcaatgaggcattacaacaagcaaacttaatagataatcagtctattttagataataccgcgatgatcgtgggcgtctcttcagcaggaacggaagcctttctgccattatttgaacaacatattgatgatttttcgataaaaaaagccattttatccggtggattttcatcatgctgttcgagtgtatcaagtctacttggcttacgtggtggtcttgaattagtggcgacggcctgtaccgcaagccctaacgcgataggtatggggtatgattatatccaaaatggcaaaaatcctgttgtgctagcggtcggaacagaacccatttatcttcctacctttgcgggtttttatgcccttaatgtgatgaaaacaacaccaacttccccattttcaggtactcctggtatgtctattggtgaaggtgcaggagcgttagtattagaagattatcaacatgcggttgaacgtggtgcgacaatatatggtgaaattgtctcttacgcgacatcttgtgatgcttaccatgaaactagccctgatcctcgaggaaatggtgcagtgcaagttatgtataaagcactggataatgcgggtattactcctaatgatattgattatataaatgtgcatggtacaggtactgaagcaaatgatcgcattgaaactatgtcgatgaaaaaagtgtttcctaatatttatcatatcccattaagttcaacaaaatcttatgttggtcataatattggtgctgcgggtattgttgaaatcatcgcgtgttttatttgtttagcagaagacaaacttccccctacattaaatttcactcagccaagacatagctgtgatttaaattatgtaccgaatttctttcaagataaaaaagtaaaattttttatgaagaataattatgcttttggaggaaataactgctctattatcgcaagcccttatattacagataaaacaccgacggaatataaagctaaaaaagtggttattaccggggtgggggcgattacgtctattggcaataatataatggagataataacagcgattttggcaggagataaaacaggtacattaaaacctattgtatttgcgagtgatgtgcagaaagatatcgacaacttgatgtctgttgtcataaaagataatgattttgagcaatcgttaggacatccttattttgatctcgacattgatcatcgcttaaaaaataacgcctgttatcatgctatcactgatgttaatccgaaaaaaacattacgttattatgatccaagaaaagctattcctagcgggacttatgctttattcgctttaaatgaagcacttgctaatgctggacgcaaaattaaacgtgatggtgataacttaggttttattgttggaatgtcaaaagggccacaaagtaccgttaatcgttatttacaaagtttaattcctgatccgcaaaaagtaagaacatcagaatttcctggtactttaatgaatgcagtaccgacattttgtgccatcacagagggaataaaaggttataccacgacattggcaacaggggttaatgctgcattaggagcgttaacttatggttatgaaattatcaggcaagatctacaacctcaggtaattgtcggaggggcagatgagcacttcagttctatttcactctattttcaagcgatgagtaagaaagttaatctgaccaagaatgcgacagattatcaggtttattctaatgcaagtgccggctatatccccggagaaggggcagggatgttatttcttgaagataaagagtatgccaagcaacgaggcgctaaaatttatgctgaaattattggctacggtaaagcgaatgataatacttttttagtagacgaaaatattactgatagagtggccgccttatgtaaggctatccaacaagcattatctgaggcgcaactcagttgccaagatattgatattatctgtggtaccagtgatggtaataaagagaatgatgaagttgaaatccgtgcgattcggcaactattttatcaagcggcaaatcatgtaccagtagttaattacaatgccttttttggtttagttgaatcatgcgctgggatattggcgatctctttagtgattcatatgatgcaaagcaacacgataatacctattccttatacaaaaagttttatagctgatgatattcattttgtaacccaaccgattaataagcagatagaaactgctttagttcttggttcatcagaaggatgtaaccactatgcaattatcatcaggaaaccgttatga

SEQ ID NO: 299950 - DNA, 261 bp, Proteus mirabilis
gtgtctattacaggaaccagctacaataacgccctatacaaagggccaaccaatggttggacatcagaaaaacaaacaagcgttgataaaaacgccctggctctaatttcaggtgaaattttccaagcaagttttagacaaggaatgacaatgagtacttttattttatctagagatgaattaagtaaaaaaggaatagatttatctaatggtttagattttatgggagaagctgttctcacttttaactttggtgtctaa

SEQ ID NO: 299951 - DNA, 1128 bp, Proteus mirabilis
ttgaaaacgataactattaaaatcagtctttttgttttgtcactgtttttccctctcctaacaaaagcacttgttattccagataatggaacggggtatataggtgaattaacgcctcctcaatcatatatgtcacttcgtagtagtggtaattactatggagcggctgtaggtgttaataatgttgtagattattgtagtaaaaacagtgcgcaatggcagaattttttattcccattcccaggaagtcaagagggggagtacggattaaaattatataataaaaacgtaagtgaagaggaaaatagggaaaattatttagttgcagctatcaatggaatagtatctatcgatgcgttgtattatcagaatggattaccttccccgacaagaattaccctgcgtcgaggaaaagaaatttctagaacagaggaatattctaatcaatttgtctatcgtcacccaatgtgctggtatggtaatttatcacgtgtaagtaatactagcttgagaataagctcttattctatttatgcagtaggccatgttaaacccggtatttacgattttgtagctccaatatattttactacagctcaaacagcaacctcaggcggggctaatccagatctatcttcagttcctttttcatttggtaatggtcctattcacgtcttaaaaacatgtaatgtttctcctgctagctcaacaaatatacaatttgccgctcaactagcacagaattttaagtcagccaagttacttgagcaaagtgtcgctagtatgcttgtctcttgccctcattcaggaaatatgtacgtgacattaaaaccctataatgagctagtcaatgcaagtaaaacggggatgacaatgtctcccaatatccctttgaaagataaagaagtcgcaccttatatcacggtatctgatgcagctaaaaaaataactaatgcagtatgtaataacaattctgccgaggccttagagttttatgcaggacaatctttgggaaaatataatgggggaactgtttataagtcattatcattcaacctttgtgccaatggaaatatacctacgaatacttataaaggaagtattgatgtatcgttcctgattgaatga

SEQ ID NO: 299952 - DNA, 708 bp, Proteus mirabilis
atgaaaaaattattacttagccttactatgctggcgataatatctacgccagtgttggctaaatcccctgtagctaacttaaaaatcaacggtgatattaagcccccaacttgtactattaatggagcaacacaaagtgatgtaattttcgattacggagtcataagcccaacacttatccctcaatcgaaaatttattcttatcctgccagtatggttcaaaatacagttacagttgaatgtgatgcaaaaacatatttaacctttgttgcgtctgatacttatgataatacagaattaagcgttaataatacgtcagactggtttcatttagtagataaagcaaatcctgaaactgcggttggagcagcttattttgtatgggataatgtgactgttgatggcaaacctgcgtatatttcacgagcaaacgatgctgctatcacagggactaactactataatgtcctatataaagggccaaccaatggttggacatcaaaacaacagacagaatcggttgataaaggctctctggctctaatttcaggtgaaattttccaagcaaatttcagacagggaattgaaagtaatcctactcaaacctttattttatctagagatgaattaagtaaaaaaggaatagatttatctaatggtttaggttttatcggggaggctgttctcacttttaattttggtgtctaa

SEQ ID NO: 299953 - DNA, 1692 bp, Proteus mirabilis
ttgggtgaaattaacagtaaagctaaccaaatcgatattactgaattacatgagttaatgaggataaatcacgacaagcttttagaagagtcaatgaggcaaggcgcgacgattgaagaaagtgaaaaaaaatgggaggaggccgaaaaattactggctgagcggataaatcaagtttcaacggcaacagaagcacaggcagccgcaattaaacaagagcaacaagcacgtattgagactgataaaaccgaagcacaacaacgccaattcttagccactcaacttcgtggtgattataccggtaatgatttatcgaaagtcaccgcaggactcatttccgcagagaaacaagcacgtgttacaggcgaccaagcagaagcgaaagcccgacaatcactggaaacacggatgaatgggaatgtttcagcgattaataaatcattagaaaccctcacctcgaaacagcaagcacaaacgcaagagattttaacgctcaattcaactctaaaagggaaagccgatagcagtgcagtaaatgcgttaaatacgcgagtaactaatctcgatggcaaagtgatgtccgcaacctctcaggtacaaacgttatccagcaaattagatacagtgaaagccgatttaacggagtctgtggtggtggatttagatttatctaaactcaatgaaaacacctattatccgattattttgccattagtaacttctcgacgttatgcctttaaggtttttaggaccttagggcaatatagagacaataaaccgagctatgcgactcacaataccaaaggttttgccatgattgtggaatggcaagtgagtggttctggatggggaacccagtctgaaaaccgcatcattgataattttgattggcgatggacaaatcaatcccctgtgatggggccagctcaattaacgaatggttctgtggaatatatctatttgcgaggaggtgctaaatatcagctcactaagcataaaagtgttaaccatcaaattatcacccgcacttataccaataacaaacaatcggtggcaccaaaaggatttgtggcgaatgaagtacctaagtccagcgaacagaaagccaatgcaacggcgaatgcggtaaaccaacttgaaactaaggtgactgaggtctcaggtaaagtgacctctaccgcccagcaagtcactcgccttgaaagccaagtgggtacaagttcagccaaaatagagcaaacctcgaaagtggtcaccgacataaatggcaaaatttccgcatcatggacaatgaaagttcagcaagatagcaaagggaataaagtcattacgggcattggcttagggtttaatgcacaaggaaatagccaatttctggtcaatgcccaaaactttgcggtgatatcgtcattaaacggcaaagtggtgacaccgtttatcgtgaagaatggacaggtggttattcatgaagccttaatggataaagcgtggatacaaaaattagtggtactcgattattttaaatcatcaggatttgataaagggaatggctttttattggatgctaaaaacaatgtttttcgctttacgagtggtaatggagggacaacattaaccaatcaaaatttatatgtaaaagacgaaactgggtataatgttgttattattggtgatattacaaatgagcgataa

SEQ ID NO: 299954 - DNA, 687 bp, Proteus mirabilis; identical to SEQ ID NO: 297331

SEQ ID NO: 299955 - DNA, 267 bp, Proteus mirabilis
atgaaaaaaataattttattatctattgcggtatttatttcaggctgtgttgatagaaaacctataaattatcagacagtggagtgtgttggtttaattaaaattcagactattgaaaaatatcagagttttaaattaagtcgctataataatgataataatatgtattttggatacggtaaagcaggtttatggcaaggcggttgggttagccctgatatgtttgacaaaatatattgcaaagataattcacatataaaaaaataa

SEQ ID NO: 299956 - DNA, 261 bp, Proteus mirabilis; identical to SEQ ID NO: 296448

SEQ ID NO: 299957 - DNA, 177 bp, Proteus mirabilis; identical to SEQ ID NO: 296449

SEQ ID NO: 299958 - DNA, 270 bp, Proteus mirabilis
atgcgtagtttggtaaacggcagaaagattatcttagaaaatgatacaacaaataccggcggtaccgtacttaccggctcttctattgctaaacaaacccaaggggttgcctgtgtaggtgatcctgtttattgcccagcgtgtaaaaaaacaggcactattattgaaggggataatttaatgaaaattaaaggtatccctgtcgccctcgaagggcataaagtcgcttgtggctgttcagatggctgtatactcgttgcaacagattaa

SEQ ID NO: 299959 - DNA, 924 bp, Proteus mirabilis
atgaaatatcattccttattaaaaaatttattttatgcaacactttccatcatggcgttaaattttagtggcgtcactatggcaaaaaacaccatgaatgatatttatgttattaatttatcctcaaataatacagtttgtggtgtaaaaattaatgaaatgctagtaatgcataataaaaaacaccctaaaggtcattattccaccggtcaaaatatctctagtgtgcttgaaaatgggaaaaataccttaggtgtaattatgtttaatgggtcggtttttactggcgaagaaaaacttacccctgatatgtggtgtgaagtcgaacttaagaaattatctgcaaatggcgataacaccttaatatcgggatttagattaaacggaaataatgatgggaaaatggtggtctctgataaatatcaaaataacagtgagcatatctattttggtagtcccagtcgaaaaagtgaatttgatgctttagaagcaaaaaaccaatttaatatacagggtctcccccaatggcaatgggaaaaagcaactcccattactgaagacgatatccctaaaattcgtgctttttatgccgaactacgacaagcatttattgataaaaatctagataaattaaaaactatgggggaaatatcctgggaagaaatggcctatgccgataatggctctcctgatattttttggaattctttagagtttaaagaattactcaaggatggatataaaccctcagatatagattggaatcgatatgaattaaatacctataacaataaccgtttgtttcgctatgaaataggatttagcagattatcgccaataaaacttgttaatcctgaagagagaacatttcattataatccttacctttctattattgatgggaaagtgactattgtccgataa

SEQ ID NO: 299960 - DNA, 270 bp, Proteus mirabilis
atgcctaccattattcttataggtgattcggatacaggccatgataatcatggccctaccaaagtcatcacagattcatcaacagtaaaagttgatggtaaagcggttgctcggctaggagatacgttagcccctcatggagaacattctagaacgataatcagtggctcaaacagtgtatttatcgacgggaaacccgctgcccgagcaggggacactattagttgtggtggggtacttatcggtaacgcatccgttaaagttggttaa

SEQ ID NO: 299961 - DNA, 912 bp, Proteus mirabilis
atgtattatggttttgatatgggcggcacaaaaatcgagctcgccgtttttgataaagatctgactcaagtatggcaaaaacgtgtaccaacgccaaagaatgattatcaagctctattaaatgtttttaaaacactcactttagaagctgataatgatttaggctgtaaaggaaaaataggtatcggtgttcctggcatcgtcaacgcaaaagaaggaactgtatttaccaccaacgtgcctgctgccaaatataaaccgatgatccacgatctggctaatattcttgaacgccccgtcaaagttgagaatgatgctaactgttttgccttatcagaagcatgggatcctgaatttcgtcattatccttcagtactgggtttaatattaggtacgggtgttggcggtggttttgtcattgatggcaaagtactctctggtaaaaatggtattgccggtgaaataggtcacatgaatcttaatgtagatgctgataatgtgattggtgagaccatgccaaaaatattgtgtggttgtggtagaaaagcctgctttgagacttatttatctggtcgtggttttgaacgtatgtataaagcctttaatggctcaccacaaagagcggtggatatcgttgcacaatattatcaaggcgatgaacagacccaacagcatgttgaccgctatatgaaagtattagccatttaccttagtaatattctgactgtacttgacccacatttaattgttattggtggcggtttatcacaatttgacgcactgtataccttattaccggattatctctcacattgtgtatacggtaatacacaaattccaacaatagaaaaagcacgttatggtgatgcgggtggagcaagaggagctgcctgcttaaatttattagactga

SEQ ID NO: 299962 - DNA, 756 bp, Proteus mirabilis; identical to SEQ ID NO: 298004

SEQ ID NO: 299963 - DNA, 858 bp, Proteus mirabilis
atgaaagttacaagtgccgaaaaacatgcattgttattaccagataatcgaacgttaacttggtatgaatctggcccatcagatggtcaaccggtattattctgcacaggtgcagggatgagtgggctattaagtatggatgctgagctgttaactaagttaaatattcgacttattacaccgactcgtcctggtttaggtgaatcaacctttgatcctaaaaagacattaaaatcgttttctagcgatgtattattcttattagcatatcttaatattaagaatatcagtgtgataggattctctcaaggtgctgtttttgcgatggccatttgttactatggtaaagtggataagctggcaattgttgctggtcaagatcaactagattatcctgaaataaaaaaactgttgtccagtgatgtggttaatatgcaacaacaggcattattcgatcctgatggattaaagatctggatcattgaaaatatcaccgctgactggttaatggattttattttgaattatagtgctgatgttgatttggctctttatcaagaaaataaattttttcctatttatcaagcttgtatgaaagaagcatttaaatatggaaataagggctatactcaagatttattaatcacgatgcaaccttggggatttactccagaaatgattagcacacctacaacattatggtatggactaaaggatacgagtactgttcactcgcctgattttggcaagttattgtctcaacgttttccccatgcacaacgttatgtctatgataatgaaggtggctctttgttgtggactaaaacatcacagattttaactaatcttattagttaa

SEQ ID NO: 299964 - DNA, 918 bp, Proteus mirabilis
atgaatgagatagaacgattttatcgtgaattagaattagctgttaattttattttagatgataaagagtattatgattttatagataatgctttagtcgattatatagaaaatggcactaataaatttatttatgaatggaatgatgatttctttgaaaaaaaatgtgaaataacacttaatattaatgccttactaaatgaaaaaagtagtacgattgtgcttttattaagagatttcttgttggagaaaaaagataattatattgagttgatcaattatttttatttttctgtattggagtgttattgtgaagaatattttggtgacaaaatagaaaaaaaattaaatgaactgatttctatatattttataacattgtcttatttttctctagatgatcaagttgttgtttttaaaagtctaattagaagtattaaagctagcaatgaatttattgatgatgagttgtcagagactttaataccacttgttttttatctttccaaggaaaaattaaattcagttaatgatgacttaagtaatgatattgagtggggaataaaagagtttgattttagtttaaaatataaaatttttgttgatggtttttcccatcatgaagatataagctcattattaaatgaactttgcaattatcatatgtcgataaattatcctaaaattaactcaactgaaaactctaatcatgtaatttacaaattaataccttgtgaagtaatagtattacttagaatgagagagttaaataaattacctattaataatattgatcatcaactaataaatagatttaagatgtttttaaataaagatatacctttaagtaattttaatcgttcattaagaaaatctattttacataaagcatcacataaaattagtcagaatcactga

SEQ ID NO: 299965 - DNA, 699 bp, Proteus mirabilis
ttgaccaacagtgagggtgaaatcgtttggcaagggcaatacagtgcttgggggcatttacagcgtcaaacccgccccacaagcacgtttaatcgtgaacagaacctgcgttttcaagggcagtatttcgacaaagagacggggttacattataatacgttcaggtactatgccccggatttaggccgttttacccagcaagacccgatagggttggcaggggggataaacttatatgcttatgcgccaaatccattgacatgggtggatccgtggggttggagttgctttagtgctcgggtaggtgcttttggtgagaaaagagttatgaaatacttatctggagcgggctataaaaaagttttttctgtacaaaacaattctgggcatggtctggatatagttgctttaagaccagatggaaaatttgatatttttgaagttaaaagttcgacaataggacaattttctttatcttcccgccaagctacaggcgatgattttgcaaaaatagttcttttaaacgatgtgaaaaaaggaggttataatattatcgatatagatggtaatgttaaagcaattacaagtaaacaagctagatacatttataataacataggaacaaccgagtgggttcaggtaaatgttggccgaaatcccaaattttatgatcagaatataacgtttgaggaatggtag

SEQ ID NO: 299966 - DNA, 444 bp, Proteus mirabilis
gtgcattgcccgacggggtgggttgatccgtttgggttggcgggtggcaaagggaataaaggggagctagacggttcaggtagaccattagcaagcccaagatactcggtagcatttgaaacaaaaatagatagtaaattctatcccggacgttctgataaggttcattttcaggaagctaatagaaatcttcatgaggccatgaaagcagaccccatatttgctaaaaaattagaagatatgtatccgggaataactcaaggtgtacagccgggtcctagaggagcatacccaagacgctcaccattgccagagctgacatggcatcatgaggctagtcaacctggtgttatgcaattagtgcctataaagcaacatcaagctcctggagttgttcaggattttcttcatcctggaggaaaaggaggaatgagtaattggtga

SEQ ID NO: 299967 - DNA, 321 bp, Proteus mirabilis
atgatcgaagaaacactgagaaatgtcttacaaaaagtaatagatgtaccttggaatttagcgctttatttgcctaaagatacatttagttgggatttagatactatagctatgattgaagatcctgatgacgttgagtcagatgaactagatgatgatcctgaagttataaaagaagctaattataggtatgtactaacgatccaaatgttacaaagcattgttacttatgctaaattacaaaaagcgaatgtaactgaagaagaattgcttcaatgtctcatttattattttaataatgatgcttatttgactctttag

SEQ ID NO: 299968 - DNA, 324 bp, Proteus mirabilis
atgattgaacaatctcaacgaagagtaaatgatttaaaaaaagcattcatgcttattgaggaaatagttccgaccattgacaagattggttcaggtttctctgatagcgatactgtaggtctagtcttgttgctattttttaaagaaaatcttgtattggataagttggcaaatatacgaaagattattaataatgaactatcggtgaaattgagacctgaagaatatgatgaattgatcgaaaaggatattcctctctgggtaccaccttataataaatctaaaggtgaaattattaatatgatagagagggtatatgactaa

SEQ ID NO: 299969 - DNA, 642 bp, Proteus mirabilis
atgtttttacctgttatgcctaaaggaaataagcctaatattaaatatgaactgggtgttcttactcgcttacccgttgtattagcactattaacaaccgtatttggtgcctctgcactttttgccttgtatacctacattgctccttttttaaccaataccgttcatatatctgaaagccatgtcgctgtggtattagttattattggtctaggatttactatcgggaattacttaggaggaaaactatcttcttacggtatcgaaaaaacattaatccttttcttcatcctacttatcggctctatgtcagttttgccgttagtttccaataatgtgtatctggcagtggcgactatttttatttggagtatctcaagctttgcacttgttcccgcgttacaaattaaaacaatgcaaatcgcccatgatgcacccgccttagtttcatcggtaaatataggtgcgtttaatttaggtaatgctatcggagccatcatcggcggtatcgcattaaaatacagttataacattgtgcctttaaccgcggcactggtaggcgttattggcctgcttctcgtctattcacaaatcaaaataaaaaaatcgttctcctcagaatgttgcgttaattctttataa

SEQ ID NO: 299970 - DNA, 462 bp, Proteus mirabilis
atgcaattattgattgatgaattaggcaaaaatatgcaagaaaaacaattctcccttacatcacatcatactgacaaacaacatcgtttattaaaatggagcttactcagcttatattttatctctgtccccttattggctgatcccgtcaatcaagcactctctatcgatgcccgcgagcaacaacgccagcaagaacgagagcgcatgttacaacagcagaacaaccccgttgtggatacgcgtattcaacagcctgatttaacgctgcctgattatccgcaaaatgaacaaccctgctttaccatttccactatccgtcttaacggtgagtccgctgccgattttcaatgggcattaaaagccgttaacgacgccaaaggccagtgcttgggtagccaagggattttgttagtcctcaataaaaaactaatagaggtcagcgattgttatggacattaa

SEQ ID NO: 299971 - DNA, 777 bp, Proteus mirabilis
atggataaggttagtgtattaattcctacttataatgtagttacatggatagaagaatctattcatagtattttaaatcagacatatgaaaatattgaagttataattgttgatgaccattcaactgatggaacatttgaacttctcgaaaaattggcttcaaatgatgaacgtattagactattccgaaataaagaaaatagcaaaattgttatgactttaaattacggactaactaaagtaacaggaaaatacgtagttagacatgatggcgatgatattgcagcccttgataaaattgaaaagcagatagaataccttaaaagaaataatctagacttagttggttgtcaaatgatacctattgacgaatcgggtaaccaaataggaaaaattagtaaattaccagttggatttgaaaaaatttcaaaaacagctgaattttcttcaccaataactcacatttggcttacaaaaaaatttgtttatgatagtttgaatggatatagagaagtaccgtacgctgaagactatgattttattttaagatgcctcgacgctaaatttaaatgtgataacatgccaattgcactaatgaaaattagacaccgttcaggtaatactgctgatttggctagcttaagtcaaagaaaaggtcatttatatgccctgaaattacataagcagagactaaaaaaagggaacgataattaccaatcttctgaagttaataagttattaaaatcttttccagagtctctccatgtaggcgcataa

SEQ ID NO: 299972 - DNA, 462 bp, Proteus mirabilis
ttgtatagcataaaaggtgtatactatgcacttaaaggtggggtatatatatattcatcatatttatccgatataagttttttcacttccaaaaatgctttaagagtgaatttatggcatggaataccattaaaaaaaatagaatttgatataaactcaaaacctttagttagtatttttcaacaggcaacaattctaactaaaattatacatccagcacaacatgcaactcctaatcttcttctctcccctagtaaatatgtttcagaatactcgtttaaaaatgcttttagagtaactgatgatgcaatgatctatgctcgctacccacgagttactaagcttttagaatgtgtttcaatgaatcaatttgcaggatatcataaagtatttctttatgcgcctacatggagagactctggaaaagattttaataacttattaacttcagaagattggtaa

SEQ ID NO: 299973 - DNA, 372 bp, Proteus mirabilis
atgtcattattttcagaaaacattcttggagcaattaattacaataatgttatagaaaaaagaaattctaacttttcttatttaaataagggactatctcaatttaataaattgaaaatattagaaaagataatacctaacgctcccttcacttaccctttattagttgaaaacgcagtaaaccttaaacaaattttaattagaaataaaatatatataccaactttatggcaaaatgtaatagatgaatgtgctgaaagtagcattgaatataactatgctaaaaatatacttccgctcccctgcgaccaacgatatgatataaatgatatgaagctcatagtagatattatcatcaaaaataaggtttaa

SEQ ID NO: 299974 - DNA, 123 bp, Proteus mirabilis
atgaatatccttgacgttgctatttttaaactatcttataagcaattaaataacctatgtacactcaataaaagtatcatcttagctatttctctcagtaattttgctaatccttttaaataa

SEQ ID NO: 299975 - DNA, 666 bp, Proteus mirabilis
atgagtatttttttcaatcccgctaaacacccacatcgcttaaagcctcaaccattgggggagcaaggtgagcgctataacgaagattggcccatgcctgagctcgattttttagagaccgtagataaacaacagtgcattctggttgataaagaaatacgccgacgtgatgcgtttgctttccctgggtttattaccggaattattgtctttattatggtatttcattttgtttttatggaccactataatcaatatacaacttttaaagacgatattccttattatgaaaaaaaatatggtaacttatatttggaaaacccaaacgatcctaaaatacctccttttgttaaaaatgaatattcccttttcttctatcaagacagtgtgacaattctagattactttaatgcttattatagtcgatatattacatcaacaccctatcaagacacgctatttttcttactatgttcatcatgtctttcgtcttacttggcttgggtggctatcaatcttttttcaaaaaaaatccaatactcgtttttaatcgtgaaagaaatctggtttatacttggcgcaaaaataaggtatttattgcccgctatcctgaaattggtatcggtaaaattggtaaaacacttacctttcaattattcgggttag

SEQ ID NO: 299976 - DNA, 687 bp, Proteus mirabilis
atgaaaaaattgctatttagtcttgctacgctgattgtaatgtcaacaccagcattagctactccaccaggcgctaacttaaaaataaacggtgatattactccccctacttgcaccgttaatgctggtgataatgatattattattgattatggtgtaatatccccctcttttattcctgctgaggaaaattacgcactaggagctaagagtgccaatatcaaaatatcctgtgatgcaagcaattatttaacacttaaggtatcagatacttataaaacaagttcaacagattcagcgaaaattagcgtttttggattagttaatgcaaaaaatacagaacaagagattggtggatatataattgatgtcattgatatcaaagttgataataaacgagcttatttaggaagagtggcagataagatttggactggatcgtctgcaactatttttaaagataccttaacagcgttaactagtgaacctcaagcccaggttgataaaaacaatttaaaacttatagctggaaaagtgtttaatgcaaaaatacaaataggagcttataacgaaagtaggtatgcgtatattttatcaagaaaaaaattggcacaaaacaatatcgatttaactgatggaattgattatataggtgaagctgtttttacttttaactttggtgtctaa

SEQ ID NO: 299977 - DNA, 831 bp, Proteus mirabilis
atgagtatgaagattaatagtgataatgtatctaatcactatcaaactacaatcaataattctgatgaaggtgagggtattattgatagaaataagttatataaagaggtagcacctagcttaagtaaattaacaggaatagacagagttaatctaaagcctgttttatctgaaccagagcatataactaaaccagatcttaaacagatattagattcattagaagtagataatgataatgatatttacgatcatgttaaaatagaaataacggggatttttaactttgtttcagacgatatgatgaaattaatagatctcattgttaaatatttagaaacaatgataaaaaaatttgaagcatccagagaaatgggtgtgatgctaatgaacattgaattggatatagccgataaagtaaaagataatcttaataaaaaagccaatattatgattggttctgcaattactagtgctggaatttctatggctatacatggtatgggagccactttttctattaaagggatggggaaagagcttattgggcattccaatccaaccatagtgatgggaaatactatttcatctttggcagatccattagcaagggttgcagaccaaactatacaatctgaaagtagcacaattgaaggtgaacaaaaagtattggatgcgagaggaagtattaataataatgtgattaataataacaatgagatacagcgagaagtgactgaagttataagagcattattacaagcaatagaagcgataattcatgctcagcaggatgcagcttctacgatttcttcaaatgtaagagcttaa

SEQ ID NO: 299978 - DNA, 630 bp, Proteus mirabilis
  misc_feature (535)..(544): n is a, c, g, or t
atgttcaaaaaaagcttattagctatttctttacttactttatcaagtagtatcgctttcgctgcgacaccaaccgctaaattaaaagtaagtggggatatccaaccaccaacttgtaccatcaatggcgaaacaagtgaaactactgttgaatatacttttgctgtaactcctggccttttccctgcaaaaggtgatttaacattagagcctcaatcaaaaaatattgtcgtaacttgtgatgcaaaaacctatctagcttttactcctactgataatagagctgggacagaaaaaaaagaaggtgattcttattttggtttaggcagttataagatggcagtcgatggaaaagaggctgttgatactaaagtaggttactacacagtttcaatgaaaaatgccacagtaaaagaagatttgactagtgaagaaaagaaagtctatgtaatggattctagatatggcagatctacttctaagacactagtaaaaaatgattcattaggttgggctcgtagtaatgctaatgacnnnnnnnnnnagctcgtagtaatgctaatgattatgctgacggtcaagtatttgcggcagattttgaagtcacaccaaccatcaatagcgcactaa

SEQ ID NO: 299979 - DNA, 270 bp, Proteus mirabilis
atgcgtatggaaaaattaaccaatgtaacttatggaacagcaggcctaacggccttttttgccagtctctctttatatgaatggggatttgttatcgggatggcgttcagcatgcttctgggtttagctacttattttatgactcgtcgagaacaacgaaaacgcactcaattatttgaagagcttgttcgtcatgttgacccacaaaacccgaccgaaaccttaaaaaagcttgctgaattaatggtgaaagcgccaaaggatatttaa

SEQ ID NO: 299980 - DNA, 423 bp, Proteus mirabilis
atgtcaaaagagataagcgaattacagtttagtcttcactatgcctcagaaacagacagtgaaaagaatacctccatcattttaacggcgaatatccatacggctgatggtgaaactcaacaactcacacaactaatttgcacgacatctcccgcaggtaaaaagcaatatcgaataggcttgcaaaagattggtgatgcaggcgacacattgctggtggcgattgaatcctattggcgtaaaaatacacaagagagttgtgtttatttgttagagaaagcgaagcaatttattcaaggacacttacaacaaacgaatacatggatatccatgtatggtcttgtgattgtttctaatgcgtcactggaagaacagttgcctgaaggtttattaaaggcacttaaagtatcaatccccgcctaa

SEQ ID NO: 299981 - DNA, 438 bp, Proteus mirabilis
gtgtttgagcataccatttcccaattagtcgccttagcaactttaatgcccattgttgcaggtattgggggaaataccggtaaccaaaccattactatgattgtgcgtgcattagcactacatcaaattcagactggtagtttctcgttcttaattttaagagagttaggtgttgcccttatcaacggtattgtttgggggggaataatgggagttgtaacttacttcctttatggtgatgttgcgatgggcgccgtaatgacaatggccatggtactcaacctattaatggctgccttgatgggagtattaataccgatgaccatgataaaactgggtaaagatccggctattggctcaagtgtgatgatcaccgcgatcaccgatactggtggcttctttattttcttaggcctagccactattttcttagtttaa

SEQ ID NO: 299982 - DNA, 393 bp, Proteus mirabilis
atgattggaacacttcgtccaacggcgattagtataagattttctgactgttctaatctaggattagctagaactgtcaaccttgttcttaaaccacaaaaccaaccttatttagaaaataccattaaaaatggaaccaatgctgtagtaaaaataacggattttgataataatcgtgaaattgatttaagtgataagacagaaggagcaatgctatttacttcctctattaatggaaataatgacgcttattttctatttggagcaacattagtgaaaccaacaggtgttgctgaagttacagcaggtgaattcaatgccagcttaacttttgatgcttttatcgatgatatgttaccagaaagaccaaaatcaccaggaagttcagattaa

SEQ ID NO: 299983 - DNA, 564 bp, Proteus mirabilis
atgacgacattttcactagaaaatgatgaagacaatactaagccttccttagcagaagaagaaccgaagaataataaaaaaaaagatgatcatcttgacgtatctgcacaacaaaattcatcattacctacttccagtcccgatcatttagaaaataaaaaatccaacaaagattatgattttttatttttacaattatcttaccagcatgttatacatgaagatattttgaataaaattaaagatccagagaaatttgattattacagagataaattacaaaagctatctaatggcatagatgatttaaaagaactttttaaatctggcttcaatgagcttgataaaaccaaaggtgcttttgttgattactggatggaagtttataaccaaataaaagaaaagaatttcaaaaaagagtctgaagttaaaagttttttaaataattgcaatattcctgattcattaattcaacagttattattaggaaatattcactctaaagtggatatggaaaaagcccttgaagatgttttccctttcttaaactttatctttaagtga

SEQ ID NO: 299984 - DNA, 417 bp, Proteus mirabilis
atgaaaaatgaaacgaatattcgccgtggcagacattgtgtattcctgatgcacgtccatttggtctttgtcacaaaataccggcgaaaaatatttgatcaggatgccattgaaaaatggcgaggctactttgccagtgtttgtgctgattttgatgttgaactggttgaaatggatggggaacgggatcacgttcatttactgattaattacccgccaaaactggcgatatctaatctggttaacagccttaaaggggtatcgagtcgattacttcgacgtgatcgtcctgatattgcccaacgtgattactacaagggggttctttggtcgccgagttatttcgcggggagttgtggtggcgcaccaatatccattatccaccagtacattgagcaacaggaaacaccgagttag

SEQ ID NO: 299985 - DNA, 396 bp, Proteus mirabilis
atgaaaagaattatcacttttggaacatttgacgttttacatataggtcatattaatattattgaacgtgcagcagagtttggcgattaccttatagtgggagtttcttctgattccttaaattattcaaagaaacaacgctatcccatttacaatgaagtcgatcgtatgaaaattatttcttccataaaatctgtcgatgaagtatttattgaagaatcactagatctaaaacttgaatatatcaagaaatataaagcagatatacttatcatgggagatgattggttaggtaaatttgattgggtaaaaccaacatgtgaagttatatatttaccaagaacaccatctatttcaacaactcaaataattgaaattgtaaaatataatcgataa

SEQ ID NO: 299986 - DNA, 165 bp, Proteus mirabilis
atgctacgccatatgggttggacagaagccgctgacttaatcattaaaggtatggaaggcgcgatcgaagcgaagaccgttacttatgattttgaacgtctaatggacggtgctaaactgctgaaatgtagcgagtttggtgacgcgattatcaaacatatgtaa

SEQ ID NO: 299987 - DNA, 141 bp, Proteus mirabilis
atgaataataaattccctgataaaatatttttatcgccacttatttttatatcatttattaacatggtaaatacctcagcctatacttataatctattaagggttcaaaaaaacaaactatttttcaaaatgttattatag

SEQ ID NO: 299988 - DNA, 252 bp, Proteus mirabilis
atggaagtgttcaaaacgacacaaaaacatctccgccgtgccattgacttggtcggcgggcaatcagcattagcaagagccatcaactcaaaacagcaaaacgtctggttttggttgaataaatcagggcgtgttcccgctgaattcgttttacccatcgaacaagctacgcaaggacaggtaacccgatctcagttaagaccggacatctatcccgaatgcccaagcgagctgaaagccagtaaccagtag

SEQ ID NO: 299989 - DNA, 870 bp, Proteus mirabilis
atgcgtgattatggcaaggtctatacccgcttttggctaaagcaaaatgttttgtcctggagtgactcagcgaagttgctaggactgtatttgcttacatgcccacattgtaatttgcttggctgctttcgactgccgattggttatgttgcttctgacttgaactgggatgagcaacaggttgcaaagacgttaagtgagttagaacaagatcagttcctgattcgttgcgaggcatctggttggactttgattcgaagctttctgaagcacaacccaatcgaaaacccaaaccaaggtaaggcagcctttcggttgcttaaagatgtacctgccgacttcattggtatggcatcgcttttgaaatctcttgccgcttttcaagctcggctaccagaagaattttcatcattgtttatgcctgatggcaacccggtaagggactctcaacggtcggatgactctgagagaagcaataaaccaacagttaaaactgttgaccacatacagtttgaagatttctgggatgtacaaatacgcaaagaaaaaaaagcgaaagccaaagaagaatggctacgcatgggcctcaatgaagaccatgaactcgccttggaagtgctaacacgctggaaagagcaacgagacaaccgattacagtatcaagatcggactaagactcctatgccacataactggcttttaaaccggcaatgggaagacgagtacgttcgcattgatgaagtacagcaatcatcgacgagcctaaagggcagcaatcaccaattgaatattgaagaaagcaatcgccgcattgctgaaagctgggccggaccaggtattcgggaggttcgttcaagtgcaggagattga

SEQ ID NO: 299990 - DNA, 663 bp, Proteus mirabilis
gtgcaggagattgataaacgcgagtttgctgaagtttggggagcagcttgggccatgtatggcaaaagcgtatcaccacaattgctatccatcgcatttgaagcccttcgtgcttatagcattgaagaagtgcgaatcggtctgactcggcatattcaatcaccggatactgggcaattttttccaaagcccgctgacgtcatcaagcatatcgacggcaactcaggttcaagagccatggttgcttggaacaaagttgacaaggctgttcgtcaggttggcgcttggacatccgtgatgtttgacgatgcgcttatccaccgcgtgatttcagacatgggtggatgggttgaactctgcaaggttgatgacagggaatacccctttaagcaaaaagagtttttaacacgctaccaggcttacttgctacgggacgaagtgggtgaatacccaaggctattacagggtattgcagaccatcagaaccagcaaaaaggatttgatatgcaagcgcctgttgccgtaggcgactggtcaaaagcggcacaagtttatacgagaggcatcgccgactttagcgcagtgccattaaaaagaataagcccgaaagccattcaggcgcttctcggaaatcaattagaggacaaaaatgaaaacgattaa

SEQ ID NO: 299991 - DNA, 549 bp, Proteus mirabilis
atgaaaacgattaaagcaaaaaccattgccctagtgatagccatgtccgcaagcacttcagtctatgcgtttccgggctatcagtgggaaaaagcagcacaaagcgttggtattgatccagtcatgctctacgccgttgccttggctgaatcggcctcacatcgtggtctcaacatgaccagtccatggccatacgcaattcgcaatggttcaaacgcaacctacgccaaatctaagacagaagcagagcaactgttaaaccaggcactgcaagagactgaaaaatatcagctcgatattggccttatgcaaatcaatttgcattggcatgggcatcgggtgagctcagcagcggaactgctagaccccatcaccaaccttacggtcggctcaagtattttggccgaagcaatcaagtcttcaccaaatgatttagagcttggcataggccgctatcacagttggaacgaagagcgtgcacgctggtatgggcaaagagtgctttctatctatcgcaatattttacatgaactggaggtccgtcaatga

SEQ ID NO: 299992 - DNA, 300 bp, Proteus mirabilis
atgacaaccaatcaacaagacttctatcaattaaatttggcgtacctacacgcagcacgagaattggcgcgaattgatccgcaagaggccgtcttgcgctttggacttacacgcgacgtggttgatgctctgattaatgctggtgttgacgacctgcaacgagtggcgacctcatcattcatgctgtttcaaccaaggggtaaccaaagccaactgattgagatggtgaagagcaaaggcacaggtatcccaagaatcgcttatttattatcaaccctaaacaacaagggggatgcatga

SEQ ID NO: 299993 - DNA, 534 bp, Proteus mirabilis
atgattgataacctgtccaaaagtgagctatttacccgagcctcgctgcttattaaatacggatttcgaacaaccattatcgcgctcgatacaggtttgccaatccacattatcagaaggctccacaaagaagtgactggcaagtcaccttgtcctggtcaattgccagaatctgatgccatcgtcaaaagcagaagagcattagttgaaggctccctgcttatggcgctttatgtcaatattggtggtgataatgtctacaagcaattaaatatcgatgctttgatgaaggcttacgatgcgtatttggttgcaagaaaagaagcagatcttccagctgagatcccctggaaaaaactgaccatcaatgaaggttgggttctagctcgtgatttaagatcacagcttgcatccttacaccggtgtcgatgcggcagtctgtatttgacggtatcacaacagcgcattcagcttaaatgtcctgtgtgtgtgattatggccgagcaaaccactagagcactttttgagaactaa

SEQ ID NO: 299994 - DNA, 432 bp, Proteus mirabilis
atgacaaacttacttaaatctttaccagcacgcggctgggttatatcactggggctttttctagcgactctggcagcggctcatttttttccatcagaaatatttacggcatctgccaagttagcggctttgccatttctgatttgcaccatcgtttttttcagctacttgggattcaaagcaactgctagtcctatcggccttataaccatcaccactatgtttttagcaatcgcatattggcaagcgagttgggcaattttatgtgtcggtttagctttcttaggcttaagcggtctaatccatttgtttcaaaggcaactgaaagataccggtcgagaactaagcctgagcgaaaaaaaatattggtactgggtaaacgaatttgcagatggtcgctcatctattctccccaaaaaaccaaaaaagtag

SEQ ID NO: 299995 - DNA, 3570 bp, Proteus mirabilis
atgtgggaaatctattccatcggggattcggcttttttagagcaggtcctgaacgctgtcgcgatgatcactggtacaggcgattttacttcaatggttcgcattggcttgctcattggggtattgatggtctctgttcaggccttaatgcaaggtggtcgtgggattaactttcaacatgttttagtctcatggctagtctttgcaaccatgtttgggcccagtacccgagtgagcattgaggatgcgtacacgggacaagttcgagtggttgataatgtgcccatcggtgttgctgccgcaggcagtacgatttcgactgttggctttcaaatcacgcgattgtttgaaacggcgttctcaactcccgccatgacggaatacggctttgcatccagtttacagtcactgattaaagtgagaaaacaggtgatggatcgctctgggttgggtgatgcaaatcgtgtcggtggctcagatatcgagcaatcgtggtttaactacatcaaagaatgcaccttgattggcatcgacatcggccaaaagaacctagatcaggtgctgagtgatcctaacccgatgactgcgattaggtttgattcgcgcatatatggcacacgcatcatgctcagtggtagcagtagcgatctggactgcaccgatgcctatagccaactgaaactcatgacagaatcaaccttcattccaaggcttaaacaggttttgtcagcctcattggggacttcgtcagcaacggatactgatgacgtgatccgaaatgcactgaataatcttggtttggcctcggttaacacccaagagtacatgacctcgtcggtgcttttgcctatttatgagcaaagcgtgacgggtaagtatatggatgatcaagctttcaccgcagccgtgatggttaaccaagcgattgagcagcgcaatacgcaatgggcggcggagcagaccctgttccaaagtatcgttcgtccgatgatgacgttttttgagggattcatttacgccatcacccctttgatggcctttgtgatagctcttggccaaatcgggatgcgaatggctgggaagtacttgttaatcctgctttggattcaactttggatgcctgtcatggccatcattaacctgtatattcatttaaccgttgcagggaaaatgtcggctcttgatgcctttgcaggtacagaagtgccatcttttgccgggatgatgcagatggattcagtgctgcaaacctggatagctactggcggcatgttggcgtcgagtgttccggctatttcgctcatgctcgtttatggctcagcaataaccgctacccacttggctgggcgtcttcaaaacggtgatgccattgatgaaaagatggcaagtccagatgtcgcgaaaaatgccccggtaatgcaatcacagtcaatgttccaaaattcagccctcactggttctgctatgaccggcgcgtcaaacctactaagcagtttctctgtcggaaatgcagtgggttcaatggtcggctctgcaaaagaatccatgactcaggcaacccaagcctttagtcgtcaggttgggaatactatgagtcgaacttttggtgaaaagctaagttacgacaacctgtcttcggttggacgtcagatcggctcatctaactccgcatctagcgccgttgttaatcaggttactgatgacctgcaaactcggtatggttttggagacgataaaaaagatgctgtacgtggcttggtatctggcgtgttatcgggaggcttaagggtcggtggcgatggaaccattacaaataccgatgataaagaagtagcagataaagggttcttgggaagattacttggtacaggggggaatgactccccacagggcaacttgccaggagtcgataagccagacgcatctcgtgtaccaaaaatatcacggttacgagcaggcttggatttaggtggtaactttagtggccaagttgagtcatcagaaggcagttctcgatctacgaccgcaaatacgctcacaggggagatgcaaagcttggcatcaagtgattcacgacgtgctgagtatcgcgatgcaatggttaaggacctttcagattcaagacgttctggcgttgagatgtccttgtctaaccaagactatcagtctcttcagagttcagcacaagacgttgtcacggcatcaaaccgctttagtgagcttgatcaggccagctacagtctatcaggacaaagaaatactgatggtgcgacgttaacccgattagcggcggataatcctgaagttatggattatttaggtcgctatatgaaccagcatgttgaagctggtaaccgattacgtgaaaaccttccaatgtatcagcgcttgctacctgatgataatcaggcgtatgtggccgcagctatggagtctttaacctatagcaactcatcaacgcccgctgaacgagacaatgattatcaagcagcaatgacggttatggccatggctaccggagccgatttacgctcgatacagccacgctctaatgaaggcttgtcatcaactgcacctacttttggtggcactcaaagccaagtggaatcgggtgtattgggcggctacgaggatgcagcaacagttcaaactcagttcaacgcagctcaatcggcttaccaaaccaatctgtctggtatagatggacagttgagtgcgcatcagcagcaagctcagcaggccgtagctactgacacaagtacctaccaatctggactaaacagtgaagctggatctcagtggcgatcacgcattatggctgatgatagcggagtttctggtgctgaaatgttcttcaacagcgccagtgctattggtgatttcagtggcaagcatactgatgcagctctgcataccttgaatcactttggcgaagactatgagagttacaaagaacaagcgcttgaagatcctggctcacgaggtttcttgcacaacgcaacggtggccagcaaatcaacctgggatggcttaaaagccgccgttgatgcaggaacctctttggaaaacccattgacggcgtttaatgatgcatacagtggatcgagttcgcagtatgcttccgaagtaaactggggcactaagtctgaagccatgttggcgggggcattcggtgcggcagttaacaatcgatatggtgagttcctagagcagtatgctgatgattttaaaaaggaagcatacagcgaagggcagagaatgggattgaccccgattcaaagccaagtgttcgctcaagctttcaatgaaggtttggcggggcgcgtattcaactctgaagactcatcgagttggtcgcctgaaatgcttggcctaagggagcaaatgctaaatgagtatcgtcaaaaagatgagagtggcgcttacatccctgacagtgtgtctgaagaagataaagcatttgtggataagcagatagcggtgatctcaaatgcatccgttgcgggagattatgctcagaacaacttgattgatattagggcctataaccaggcatcaggaaggaactag

SEQ ID NO: 299996 - DNA, 1389 bp, Proteus mirabilis
atgaaaaaagtaatccgagtatcgctaatcgcctgtgcgattggtttttcatctatgagccaagcaagcttgcaacaggagatgaaccagttgtttggttcaatgaccaacaccactgcgccaggtgtattcgagagtcagcggcgtggcgttatatctggtggaagcgttgttgtccgtaacagaatcatgaacgagaacctcgtctctatggtgcctccgtcattccaagccggttgtggtggcattgatatgttcgcgggaagtttgtcatttgttaacgcggatcagtttgttcaattacttcgctctgttgctgcaaacgccaaggggtacgcattccaattggcgctcagtgctatgtgtgagaaatgctcccagcacatggagacactgcaaaagaaaatccagcagttgaacgagtattttggcaattcctgtcaaatggctcagggagtcgtgaacgataccctggctgcttttggtaaaaaggggcaaacagaagccagcatgttgagctcacttaaaggggctggagacatttttaccagttggagtgagtccaatggtaagaacccttatgagaacgcttcaagtgtcgcggcatctgatgtgaacaaaacaattaaaggtaacttggtctggcgagcactgaaacgtcactcggcatcaagctggtttgcatcgggggatgatcgttttcttgaagcggttatgtcggtgactggttcgatcatcgttggtgatttggctaatgcggctgatggtcaaggtaaagccccaaaactgaccagactgaatggcaataaagtgactattgagcatctaattcatggcggtaacgtcgctatgtaccgatgtgacacagtgacacaagacggctgtctgaatccgacaatcactaacgtgaccctaaccgggttatcaacccaggtagaaaatttacttctaggtacaggttctagtaacggcattatttttaaatttgctcgaaatacaggggctgctagcaccaccgaaaaggcttttatgacctcggctcccgcgagcattggcggcatgattagaacactttctgcattaaatgaaggggctgctaggtcgtttgcttcacgagtggctccatttattgctgttgagatggcccgagcattggttgaagacatgctcaacgcagctagaagcacatcgggtgtggaagatcatgcctatgcgaagttgttaacggaagatcttgaacgtgcacgtcgccaaatcaatgaggagtacgccgcgttgcagcgaagatacggctcagagcaagaattgctggcgcactttaaccaagtgattcagaccattcgcaaacagcgttattacaccgttaaatctacggcgctgggggaatag

SEQ ID NO: 299997 - DNA, 945 bp, Proteus mirabilis
atgagaacccctttgttaccttggttcatcctatgggtgaccatcccaatcattattttctttctattcatcttgcccgcccatgctagtgatgggcaattctatcagcgtggccaggaaggctggttttggtatcaggtcattcctgagccagcggaggctgaagagcttattaagccggaatctggtgcggcagagtcgattcagagcgagctgaagcccttcagtgctgcctggtttcgtgagcacatgcagtcgttcatggacaaggcaattgatgagcctacgaatgagaacgtcagagcctatctgtacctccagcgcgtcatgatggataagggctcacagtttgctgatgttagtcagcaggtggtcatgggcgatccagttttggatgaaatcagtcgcagacccttggcgacctatgctgccaatcggatggatcgagaagctggcgctcaacgggatgttgctttaggtgaggtagcaaaacgggctggcttgttcttcttctatcgttcggattgcccttattgccacgctcaagcgcctatcatcgaatcaatggctttaaactacggtttcgaggtatttgctattgctgtcgatggcttgcctttaccgggtggagagtttcccaatttcaaagtcgattcaggacaagctcaatcattgtccgttacgactgtccctgccgtgttcttagttgatccacctaatgtcatcactcccattggtcagggtgcaatgagccttgatgagctcaataatcgaattattctcgcagcccatcaagccggttggattgacgatcaaacttactatgccaccagacctgttcaacccggcgtgtcactcgcgatgtcagcccaagagcttaacgaaaagatattacaggaccctgagttccttgttcgctatctgcgtgcacaaggagggttataa

SEQ ID NO: 299998 - DNA, 753 bp, Proteus mirabilis
atgatggtattaaccctgttaacaaagcagattgatggtgagtttaaggtttactggaagaccggacttcgaagaggtggtgagctaaaggtcgatttaggtgagcaatacgacaagctacctgagcagcaaaagccaattgcagctgagctttatgctattcatcacctactgtcagtgaaagaggtgatggggagtaaccgaagcggtaatgggcttcaaatccgagtcagtaaaggagctatcaaaaagttacagaaacaacgctcaactaagcatttactttacagcctgactaggtttttgctcactcgataccaggaagcacagatctcggtagagaagcgggacgattggctctcacattcctttgaagaatacagcgtcgataatgctacagtgagagaaatcgatgaggtcatcaacgttccgaatattgggcctgtcgtggtgactcgtcacgcgctagaacgatttgtggaacggctttcagacggcgtacctaagcatccttggaaggctttgacttcaaggttatttagctcatcattgacaaaagcaattttgcctgaaaaggtagctcttcataagaaccaaaaatatagtaacaaagctgatatttggcggcacagtaacagtgatttgcattttgtggtcgttccgtcaggagcgatgaagactttggttactgtttacaggctaaatgagtctctcacaaaagcgcaaaatgaattcaagatgtgtgtccgataa

SEQ ID NO: 299999 - DNA, 1074 bp, Proteus mirabilis
atggcgttacctttacagattgaaacagtgaggccatatcttaatggccaatggcttcaaatactggcggcgttggtgccagaacttgatgccgctattgctcgaaaaggccgtcatgtggcttgtcctgttcatggcggtcgtgatggctttaggctgttcaaagatgctgaatataccggtggtggcgtttgtaatacctgcggtatctttcatgatggttttgaactgttgtcttggattaatggatggaactttgctcagtctattgaagcaatcggccaggttctttgtattcaacccggacaaatacaagcccctattcggccaataccgagtaacgcagttgattggaaggctagaaagcaggacgaggacaaagcgattatccatcgcttgaatcaaacctggggagaaacgttttctcttgcagatactcgtgcgcaaccagtttggaactacatgcatcgtcgtggcattgttacccggcttagtcctgaatgggattcggtgctgaggtttcatccaaacttgccttaccatgatgaagatggcctgtttatcgatagctacccagcgctgctaggtaaaatcgttactcagcaagggcgttcggccacgtttcatcggatctacctaagtgaagatggattcaaagcgccggttgaaaagcctaaaaagatgatgccgataccaagtgacagaacaatcactggtggtgccattcctataggtgagcctggtgaagtactaggtgtttctgaaggtatagaaacggctttagcggttaccagagcaacggggcaaacatgttggtcggttgtgaatgcaacgctactggctaggtttgaaccaccaagtaatgtgaaaatgctgtacatctgggcagatcacgatctctctgagaccggcctgaatgcagcgaatgaactcaagaaaaaagcctggaaaaaaggcattctgacacaagtcttgatccctcctataccaacgtcactcggcgtgaaaagttgggattggaatgatgtgctgaatgtttacggtgccatgggctttcctaaagttcatatctga

SEQ ID NO: 300000 - DNA, 342 bp, Proteus mirabilis
atgaatgggcgcattgcccattctccttcatcacaaaagcagtcccatcaacacacgtcatcacagctcgaatttctatttgagtttgatgatgccccagtcacttggtctgacacggaaatctggcagttacgcgaaggcattcttttggatgcgatccgtgtgttgctggacggtcgtgtcagcactcggttgcgcaaggatgtgttgtcgtggattcaaaatgacgaattaacgccattttgctttcgtgtttgcgcgatggctgcggttgtcgatcctgatgtgcttcgtgagtccatcatgtggctattaagacgacatggtatccagcttgactaa

SEQ ID NO: 300001 - DNA, 498 bp, Proteus mirabilis
atgaaaaacagaaagttcttagctggcgaagaagccggtacttatatcgttcctgagcaagtgactgaagcggatatcttagatatggcgctcaagcttgcccgtggtcgattgagtaaaggtcgcaaaattgaacagccatcgtcggcgttctcatacctgcaaacactgatgcacgagtatgagcacgaagtctttggtgtgctgtttcttgatacaaagcatcgcgttattcgatttgaagagctattcaaaggcactttagatgcggcgagcgtgtatccaagggaagtaacaaaacgagcgctagaacttaatgcggcagcagtgatactggttcataaccatccatcgggtgatcctgaacccagtgaagctgataaacgcatcactcatcgactccgtgacgccttgtcacttgttgatattcgaacgcttgaccatgtcgtggtcgcatccgagggctgcgtttcgcttgccgaacgcggttatctttaa

SEQ ID NO: 300002 - DNA, 1656 bp, Proteus mirabilis
atgaatcatccattaaaaaatgcactgccaatcgttgccgccgcttatggcgaaaagtttggtgtgaaggtgcttattcaaggacaagatgcgtttacagatggtgagcggattgtgatcccaacagcaaacccagacgacccacactatcaacagatagcttggggttatctggctcatgaagcggcgcatattcggcataccaattttgacatggtgaagaaggcgtcgtctaagccgatccgtaaggcacttctcaatattattgaggatgtgcgcattgaaaacgaattggcaaaggattaccccggaacccggcgcagtatttcgcaagtgattgaatacatggtggacacacagcaaatgtgtgtacctgaacagcctgagcctgcatctaacttgcaagcctggttgttgtttcgcttgagatgctattttctgggccagaaagcgctgacgcctttgtatcaagctgttgatgaaagagtgagacaattctttcctgccgcagcgatgagccggttaagcgccatgctgacagcagtgcctagcttggcatctacaggtgaagtgctgaaacttgtcgatgccatcgttgccatgttggaagaagaatctcgtccaccacaggatgagtctgatgctgatggcggtgatgacattggacaagatgcgagtaatgacagcaataacagtagtgacagtcaaaccccggaagcagactcgtctgcaatgggggatgctgctgaaacgggggattcagataactctgatcaagctgacaatttgcgacaagccttagaggccagtgccgctcagtttgaacccgatacctttgcccaagtggcagaagtgttgtcggaacaagctgaaggacatcagggcgtcactccactcagtttgccccaagcagagcaggctatgttgggtgatgaggccattttgaccttatcggcgtctgagtccgctcaaattcgagccaggcttaggggcatggttcagtccagtcaggacaatcggaatcatgccaaacggcacggtcttcgagttgcaacccatcgtcttgctgcctcacaagcaggtgaatcgagattgtttattcaaaggcagccgcgcattgcgcctaatgctgctgtgcacttgcttgtcgatatatcgggctcaatgggtaagcccattggcgaaggtaatcgcaagtactttcatgttgccaatgaagccgctttggctttggccatggcattggaaggtataccgggtgttgtacctgcggtcagttattttcctggtattcatcaggaagtttctatcgcgttattgcccaagcaatcggttcgacatcgggccgcctgttttgaccaaaaaccacgaggttgtacgcctatggcacaagcgatgtggtttgcggcaaacagtttattagcacaaaaacagaagcgaaagctaatgatagtgctaacggatggtgacccagatgattgggctgctacgcatgacattgttgacaggtgcagacgcagtggctttgagctactggggatcgggattcaaacacgcagtgttgagagattctttccacaaagcatcgtgattaacgacgtcaaagatctaaagcgtgagttatttgaagtaacacaacaactgttaattcagtaa

SEQ ID NO: 300003 - DNA, 441 bp, Proteus mirabilis
atgcaatcaaccatccataaccccagccaactgaaccagtttgaagcacattttcgtggtgtgactgatgcggttgaaagtgaatcgataccagaagtggcgtgttgtcgaacgctagtacaacggtcgtactcaacacatagtgtcgtgatccccaagaaccctgttttgatcgcagatgcggacgcacaaggagcttgggtaacggccatggtatttgttccaaacatagcattgcagcaaaccgcttatgagcgggcctggctgcaatatcaacacgaggtgtctactcagttacaagaccagtacggtctgacattggatgacatcctgagtttagaccagcttaaaacgtcatttgagcagcacgagagtccagctcaattggtggcttggttaggtcaaaaatacgacctggataagctagaagcacaggtttaa

SEQ ID NO: 300004 - DNA, 954 bp, Proteus mirabilis
atgagtattcaaaccctcgacaaacttttgatttgtcacatcgactgttccatctggagcggtagaaaaaaactaaggcctgaagatttcagattggccaatggcagccaacttccaccgaaggatgttgccagcttagggagtaaaaaaatttgcgaccctgaggcattggcgaactttgaaaggcttaagaaagaagcgcagcggttgtgtgagcaagtcggtgtgcggtttttaggtggctatgccgtccctgaggaccgaattgatcagattgttccagagcttgaccggatcggtcaggagtttgcgcagtgcaagcagttgttcctggacaactatgatcaggtgacgtttgactgggttgcaaaacacccggaatttgcagatgcaatccgacgtgcattatcacccatcgaagacgtggaacaacggcttcagttcgattatgccatctatcgaatgcaaccggctgaacaagctggaggcttagatgacaaggtcaatggtatgggacacaccctctttagggaggtggctcgtgatgccaatgaactgtttgagcgttccgttgcaggtaagaatcaaatcagtcagcgagcccttaaccctctcaaacggttaagagacaagttggatggtttgtcattcctggatcatcgagttcagccgatggtcgaagcgatggacaatttatttgttcgtctgccgaagaccggccctgtgacagacaatctctatcacgaactgatggcgaccattttaattttgtctgatccagacaagatgagaatgcacggtgaaggtcaattggatatcagacaactgatacccaaacctgaacctaaacccgcacagccagtatctgctcaggcagataacttacgtgcaataccacaaccaaccgtcagaccaaaccttgattcgactgtaccaaactcattttatttctaa

SEQ ID NO: 300005 - DNA, 768 bp, Proteus mirabilis
atgatggaaaagtgctttgctctttaccgttacagtcattctgatgggacagccaaagaatgggccatttacgttggatcagataaccaggaggttgaagtccggtttggaaaagctggtcaattgtcgcagcagcgattgattgattcgactgatcctaacgcagaagcagaccgaagaatcaatgagaaaatcaacaagggttatcgattggttggacacgtcggtattgatcatcaagggcggccatttgaactctcaaatgcgctagatagtgtcgtgtgcgccaataatgtcagttgggagtttcgtactcgcaaggacgtcaatggccaaatttcgctggcgcaaaaagcgttgttcgatatggcaaagctgcttgaagcctatggcttggctgtcattgatgataaccaggtcaggattggagaatggtcattagggttttgcaaaagcggattacctagtaccaatcaaatcagcatggtgtcaggtgaaggcgctggcattgttaacactgatgatggcccgtggccattgttgctgttactggcctttaagcgtcaattaccaccactgtgttcgctcacagtagcgagtcctgaagggatagaagtatctgaccaactgaagttggaaaaagatgtattgcggttgctaggcagtgatttagagcgggttcgcccgatagctgaagcactggacttaatgcctgtgaaaatcgatctcaaccaatcgtcgcctgattcgcaaaattactatttctga

SEQ ID NO: 300006 - DNA, 960 bp, Proteus mirabilis
atgactgaacaatccccatttttggttcaagtgaatcaagcgtttaatgtcccggctcctgatgctttcgttctggaaggatttagtgccgacactacccatccaaacattcccgttcgcaaggacgagtatgtttttagaaaagaagacttacgtgacgtattggcgttcttgtctaacccagacggtgacggtttgtatattacaggccccacgggatgcggtaagacttcgctagtttgccaagttgcttctcgattgaattggcctgttcagcaaattactgcacatggtcgattggagttgtccgatcttatcggtcaccacacgctggttaatggcaacatgacctttgtgtatggaccgctggcactggctgtcaagcatggccatttgctgatcattaatgaaatggatcttgctgagcctgctgaactggctggactcaatgacattttggaaggtgccccgttggtcatcgcacaaaatggcggtgagatcatcatgccacataacaagtttcgttttatcgcaaccggcaacagtgcgggcagcggtgaccagacgggcttgtatcaaggtgtgcttcaacagaatttggcttttcttgatcgctttagaatcatcgaagcgacctatgcagagccttctgtagaggaatccattctggagaacgttgcgccgggcttgccagaagtctttcgccaaaaaatggtgaaggtggctggtgacattcgtcgtctttttattggaggcgcggatggcggtgcagagcttagtatcaccatgtccactcggaccttggtgcgctgggcaaagctaacacttgcttttaaaggcgctcctaacgcagtggagtatgcactggttaggtctttgacggctcgtgctgagttggagcaacgtgaagccattcaccgtattgccgctgatgtcttcggtgaccactgggaggattga

SEQ ID NO: 300007 - DNA, 1017 bp, Proteus mirabilis
atgaaggttatcgacctatcacaacgtactcctgcatggcaccagtggcgcattgcaggggttacggcatctgaaaccccaattattatggggcgttcaccctacaaaacaccttggcgattatgggcagaaaaaaccggattcgtattaccggaagacctgtcgaataatccaaatgtgcttcgcggtataaggttggagcctcaagcaaggcgagcatttgagaatgcgcataatgactttcttctgccgttatgtgcagaagccgatcataacgcaatctttcgagccagctttgatggcatcaacgatgcgggcgagcccgttgaactgaaatgtccttgccagtcagtttttgaggatgtgcaagctcatcgagaacaaagcgaggcgtatcagttgtattgggtgcaagtacagcatcaaatactggtcgccaatagcacgcgaggttggttggttttctattttgaggatcaactgattgagtttgaaatacaacgagacgcggcgttcttaactgaattgcaagaaacagcgcttcagttttgggagttagtacagaccaaaaaggaaccgtcaaaatgccctgagcaagattgttttgttcctaagggtgaagcccagtaccgttggacatcactgtctcggcagtattgctcagtacatgccgaagtggttcgactggaaaatcacattaaatctttgaaagaggaaatgcgagaagctcagtcgaaattggtcgctatgatgggtaactacgctcatgccgactatgctggggtcaaactcagccgctacatgatggcaggtacggtggactataagcaattggccaccgataaattaggcgagctggacgaacaggttttagccgcttaccgaaaagcgccacaagagcggttgcgcattagcaccaataagccagagcagcccgttgaaacaccaatcaaaatcagtcttgagcaagagaacttggttctgccaggtgactcgccgagctcattttacttttaa

SEQ ID NO: 300008 - DNA, 144 bp, Proteus mirabilis
atgactaaatcagcctcactttttcgcttcgtattggttgttgcccttgtcgtaggttcgattcaagccggtaaagcggcaattgattcggttcaagcaagtgttgttcagcaccaaacagcgttagcgcaagctgcaaagtaa

SEQ ID NO: 300009 - DNA, 819 bp, Proteus mirabilis
atggaaaaaccaaagctaatccaacgctttgctgagcgctttagcgtcgatccaaacaaattgttcgataccctaaaagcaacagcattcaagcaacgtgacggtagtgcaccgaccaatgagcagatgatggcgcttttggtggttgcagatcagtacggcttgaaccctttcaccaaagagatttttgcgttccctgataaacaagctgggattattccagtggtaggtgtcgatggatggtctcgcatcattaatcaacacgaccagtttgatggcatggagtttaagacttcagaaaacaaagtctcactggatggcgcgaaagaatgcccggaatggatggaatgcatcatctaccggcgcgaccgttcgcacccagtcaaaatcactgagtatctggatgaagtctatcgaccgccttttgaaggtaacggcaaaaatggcccttaccgggtagatggtccatggcagacgcacactaagcgaatgctaagacataaatccatgatccagtgttcccgtattgcgtttggctttgtgggaattttcgatcaagacgaagcggagcgaattatcgaaggccaagcaacacacgttgttgagccatcggtgattccacccgagcaagttgatgatcgagcccgagggcttgtttacaagcttatcgagcgggcggaagcttcaaacgcttggaatagtgcattggaatatgccaatgaacattttcaaggggttgagctgacgtttgcgaaacaagaaatatttaatgcacaacaacaagcagccaaagcgctcacacagcctttagcttcttag

SEQ ID NO: 300010 - DNA, 420 bp, Proteus mirabilis
atgaaaaaccaagtaacactcataggctacgttggctctgagccagagacgcgagcctatccatcaggtgatttggtgaccagcatttcactggccacttctgagaaatggcgcgaccgtcaatccaatgagctcaaagagcatacggaatggcatcgggttgtttttcgagatcgtggtggatttaagttaggactaagagcaaaagatttgatccaaaaaggagcgaagctttttgttcaagggcctcagcgcacgcgctcatgggagaaagatgggattaagcatcgattgaccgaagtggacgcggacgagtttctgcttcttgatagtgtgaacaaagcatccgagccatcaccggcagatgatgcgggctcccaaggtaattgggcacaaacatatcctgaaccagatttttaa

SEQ ID NO: 300011 - DNA, 327 bp, Proteus mirabilis
atggaatatatcttcggatttattatccaagtcgcaggcattatgttgcttgcaaaactgagctggtcgcttttgcgattggttgctcgtcaaagcgtgcgctcgtttcgatttgtacttactcaaatcaagcgattgctcacaccaacaccaaaacgtcgtccaatggcagtgcctaaagctcctggtatgccccgtttgacatctgcgttttacaaagagccacatcagtacgacatggctttactcgaaataccaacctatctgcgccgtcagtcttctttgcccagccgggtagaaacgactgtgtgcacagagttcaactaa

SEQ ID NO: 300012 - DNA, 603 bp, Proteus mirabilis
atggcccaagcaaaacccaattactcaaaacccatctttgaacaatcattcacaattaacagcttacaggcgcaacgtgtcgttgaccgtgtttttaggcgcacggtcagtgcgctttacggaatcgatgtcatcctacgaatcattggcgatgagaacgaaattgatgaagtggaacagatcattagccagttgatcgaggattgcgctaaggcggtagacaaagaacaagctcgtttggacaaactgatggaatccaacggcatcgatgaagtacctgactacaccgatccgattaccttcaacgccaaaatcagctcgcctcaggttggccagtttgttggcttagtgcgcaaactcgatgcgttgatgatctcaatggacacactctggttatctagcgtgcttagcaacaagcaacgtgttgatggcaactacgcatggcaacagcgcattataaaacttgcacgacgcattattgatatcgaaattcgagcacgaaaatcagcccaagctaagggtaaagaagcagaagttgagcaagcggtgccttcgaccgatgacgatatcagtgaagaggaaacagatactccctccaactag

SEQ ID NO: 300013 - DNA, 966 bp, Proteus mirabilis
atgtatcttactgaaaaaagtacaattccttccgttgctgttgtcgtctttaatcactttagtccgtttcatatttctgtcccgagcattgtgtttgggcgagataccctaaatgaaacttttttcgagcttaaatttgtcgcaggagagcaagggccgattttatctgatatcggtatggaaattcataccgaggcgcagttggatttcttagagtattgcgacattatcgttgttccttattggagaacaattgatgagcggcctaatgaaaaactgctcaatgctctctgtcgtgctcatgcccgaggcgcattggttgtcggtttatgtcttggtggttatgttctcgcttatgctggcttattagcgggaaaacgagctgcgacacattgggaattagaacaggattttagtcaacgctttccagaagtttcgctcgatactaatgccttgtatgttgaagatagcggtgtgatcacatcagcaggtactgccgcaggtatcgattgctgtttgtatgttttccgaaaatactacagcagtactattgcgaatcgagtagcaagaagaatggttgtgcctccatacagagatggtgggcaagctcagtttatagatcaacctatacctgtgacgacatctgatttacgtatcaatgcattaatggacaatatcaggcgcaatatcaatcaaaaatattcactggatgagctagcagattcagtgatgatgacccgccgaacttttacgagaaaatttaatagagcaacaggtatgtcatttggagagtggctgacggctgagcgactaaacttggctcaggatctacttgaatctacagatttgtctattgaacagattgtcgcaaaaactgggtttagctctgttctcattttcagagataaatttaaggagcgttatgaggtgacccccaaccgatggaggaaaacgttccaccaatag

SEQ ID NO: 300014 - DNA, 402 bp, Proteus mirabilis
atgacatctgagacaaatattgagctagtgaagtctttctacagggctatagagggcaatgattatgatgcagtggcttcaatgtgccatgagcaattcactttctactcacaagtagatacaccattagatatcaacggtttccttactcaggaaaagggaaatatggacggttttcctggctttgttttccgtatacatgacatcttcgctcatgatgataaagtagcttgttatatgatatttgaaggcgttcattcggcacctatgcataatttgcagccaacagggaagaaggttcgattttcattgatgatgcagctaaagattaaagacggcaaaatcatcgaaaaacgagcgcacttcaatgaggttgatattatgaagcaactacagagttag

SEQ ID NO: 300015 - DNA, 777 bp, Proteus mirabilis
atgaaaatcacacaaattcgcaatgcaacacaaatcatcgattatgcaggtaaaacatttcttattgacccaatgttagcgccaaaaggcacttaccctggatttgaaggaacagcaaattcacacttacgcaatccaacagttgaattgcctttgcctattgaaagcatcatcaatgtggacgcagttttgctaactcatactcacccagaccactgggatgaaacagcagtaaatgtgatacctaaagataaattgatttttgtacaacacgaaggtgatgaagctattcttctatcacaaggttttaccaacgttaaaattttctctgaagagactgaatatcacggtatttcatttacacgtacagtctgccagcatggcccagaagctgctttccagcatgaacaaatggcagaaattttgggtgaagtgacgggcgttatcttctctcatgccgatgaagaaaaattgtacgtggttggtgatacgatttggatcccaagtgtagaagaaaccatgaaaaaagaacaacctggtgtcgttattctcaatactggctgggcgcatgtactgggctttggacctattatcatgggtaaagaagatgtactaaaaacacaccaagtacttcctaaagcaaaaatcgttgcgactcatatgggcgcagttaaccatgtattggtaacgactcaagaaatgcgcgaatacgcagttgcaaatatgattagcgattttgtgtttgttccagaagatggtgaaacagtaacactttag

SEQ ID NO: 300016 - DNA, 3693 bp, Proteus mirabilis
atgaaaccaacactttttacccgagttttagcgggtattttatcaatcactatggcgtgcttgcccttacatggtgtggccgctgatgtgcagcgccaatccggcctaagcggacaacaagaaggtaagcaattgctgcaaaactggacgatgcccgcactcaatggcaatacattgtcggtgccgaatggcagtggtaatgagtccattaacttgcaagagcttttccctggtatggatcagggctcattggatgtcttaacgggcgtttatggctctgatgccagcatgaatcaattggggacgcagcgccaagagagcatggcatccgaaaatggcgctacgggtgaggcgtttcgctcgctccagcaaatcaaagacaggtctcggccagatatggtcaatgatccgctttgggcattaaccgatgcggttcaaactgacccaaatctattaacgcaaagcttcccaagctgtgagtctcaaggtgaaggcagcccaaactaccagcaatgtgacaggctcaatacagcggttaacagctgcactattactcacgattacacggcaggcattattgagcatgtttcagggccgatgaaccttcgctcttgtggtgaggggtgtcttgaagtttggataggacgaattggcgacaactactggagtggccgttgtaaggtgtttgaacaggccatcacactcaaagtcgtgaatcccgatgcgattacctcagccgttcttgagtacgccaaatgggatgactacatgcaagtttggcttggcgatcagaaagtctggtctgggccgaacaataactttccaccagaaacggcaggtcgctgcgaactcagtaccagttgggagcgcaatccaaataccgatctcactgccaagctaaaagcggtagagcccggtttagaagtgccagtcaaaattcgcgtatcggtcactggtagtggtgaggggtatgcacgcatcaaggtacgctttgatccaaccaaggtggtgatgaatgatagttggtcaccacagtcctgtatcgaacaagccgcggatatcccggctaagttttcagactacagcattcaatgcacggatcagccgtcttcaaccaacggatgtacggtggtcaatggtgtttcagtttgtgaatcctattttgccccaagcccagtggctggcatatcgcctttgtgtcggcgtgtacaagtcagtgtggatgatgaaagctataaggggattgaaaatgaggcctgccaagtgcttgaagcgaacccttcatgtggcttcatgtcgtcagaatgtgccgaaaccaatgataaaggtgaatgcattcgttttaccgatacctatgactgtggattgcaaaccagcgatccaaagtgtgtggtatccaatcttatgccgagtagttttgaggcctgtgagcctactcagacgattacgccatttactgaaaccaagcatgtaccggattaccaggtgtgcgagaagatcagcacgcttactcagtgtcagttagagcgacgtgtatccgctgaaacccatcaacaaagctggtccattgagcgtggttgctttagctccgaaacgctcagttttgttccacagcacagcagtactatgcaaactggaaacgcgacgctgaggatttttgataatcaaaatactgagataaaagtcaccgagtcgccatccaaggcaaatggttggaaaacgacactctcactgacgggcaataaggaaacggtgactgagacgaaaccgtcgattaagtaccctgaaatgacctgtccaaaaggaaccttggttggctcattgtgtaaagtcgttaatgggtcgattatttcgtggcatgaaccccaggaggtcactcgttccagatgtgagtccggctggtacaaagtcgatttcgatacttgcagccgagaagttcagaagtgtttggctcctgcgaaactgagcgcttccttgaccttctccggcaagtacttagagcaggacgttgttcatcaatcaagtgatccgggcatagaccaatgcttgatgcaaacggatcagttcactgcggtgcagtggcagtgtttggatacgggcacaaaacgaatcgacgggttaacggttggtagtggcgagttggccaatcttggaagtctttatccggctgttgtttcgtctcctgctcatttaaccagtcgtggtagctctgatggactggggctctcatgctggagtgcaagagcaacctacaatgcttcgactgctcatcctgagttcaacatgggcagttcagatagctgggtagatgccaatggtaatacacaaaccatcgtcaataatggactaaacacgaccaacaatacgtgtgccgcgctggagcaaaacccggcctgccagtatgtcagaaccgaatgcaccgaaggcggggctggtcatgaaggcttctgttatatccaaagtttggtgtatgactgcggacaaagcgttgaagtgcaaaatgcacgaatggaaactcaatacaactgtgaggggccagttcgctgtatgggcacagattgtttagagccagagtcaattaagcaggctaactttgcagaagccgctgcgatgcttaatgcggcgcagtttatgaccaatgatatgtcatgcacgggagctgatggccaagataacgtcgagtgtacggtctttaaagggaatgctggccagtgcaaaaaagccgttggcggcatagtggattgttgtgaaaagccaagtggcgtgtcgctatcggactacatcacgatgatagtggcggtcaacaagcttgatacggctgtcatggccatgaatccgtcttcggcaatctatggttcgtggaatacgcttagagagccaatcaccagtacttggagtgcggttaaagagccttttgtgtctgcatgggactctcttatgggggctgggccatcaacggctgctggcgcgggagcggagcaagctgcgactggctttatgcaggtgttgaccaacaaaacggctgagtgggtaggctctacctttggttcgggggcgcaatcggcactgtttagtaacgttggtggcgcggttggagccgatggtgttgtatcgggtggtaactttgcgctgggtggcgctgcgggcgcggttctgagtacggttatgacggcctacatgatttattcagtcaccatgatcctcattcagcttatctggaaatgtgagcagagtgagtttgaaatgaacgccaagagggtattgaagagttgccactatgtaggttcttactgcaagtctaagttcttaggtgcctgtgttgagaaacggcaatcatattgctgctttacttcgccgctttctcggatcattcaggaacaagtacgtccgcaattgggccttggttggggcagtgcgaagtcaccaaactgtgaaggtttgaccgcgagtcagttaaaccaggtagattggagccaagtcaatctggatgaatggataggtattttgtctatcacgggcaacctacctgaagtgccgtcactggatctggaacgactcaccggctcaggaagcacgctaaacgttgatggaaaccgtcaaagtgccgcagatagagccattgaacggctaaacggaatggatacccagaaactgcgtcaagaggcgacggaagaaatttcggggaataattga

SEQ ID NO: 300017 - DNA, 1029 bp, Proteus mirabilis
atgaaaaagctcaataatacgtatcgtctgttacggactctcgttgtcatgtttgtcctgggcgcatctattcctgctaaagccgagttgacctgcccagacgcggggttattgtcgggcaagttgctgacggatgtttgctggtcatgcatttttcctatccgggttgccggtcttcctcttggctctggcaatgtcccaagcggcgcatcaaacaagtcattttgcttatgtgaagacaacttaggtgtgccaaggccaggtattgttaccagcatgtgggagccagcgcgtctgattgaactggtcagaacgccgggttgttcgccttcccttggagggattcgtttaccgttaggtgatagacgactgcaaggtggtcatggcgagggtgaattcgacaccggtgatctcgctttctaccattaccattattacgcctttccgcttttggtcatgctcgatttgttcatggatggcaattgcaatgccgatggttacatggactttgacttgatgtatttgtcggaattggacccaacatggctgaacgatgaactggccttttttactcagcctgaagcggctgccgttgccaatccattggctatatctgcttgtaccgctgacgctgtttcatcaacgcttggtaaacccatcgaccagttgttttggtgtgctggcagttggggccatctctatcccttatctggccacaccttagcctttggctcattagcagaaaacaccagccatttagcagcgcgagcaatcgcggctcaacacaggcgtggtcttgcaaggcgaacaatggggaacagtgcgctatgccgacctgttatcgaacccatgctgccgaaatcccaatacaagatgagtatgttcttccctgtaccggaaactgaaagtgcgcatgtcatcggtgaaagcaccatgaaatggggagagtggcgaatgatccccggtgccggtgaagatgcgctctacattttgtggcgctggaaagactgctgtaactcgggaggttaa

SEQ ID NO: 300018 - DNA, 1125 bp, Proteus mirabilis
atgagaagactatgcctcttatttttgttggttgcgccattggcttttagtcaagtgtcctgggcacaagagccttatccgttgtctgacgaggacaaaaagatcgtcgaaatgagccgcagcattttacaaagtgctgtggatggttcatctgaatttatagagccttttgcaccggttgaacaatctgcgtcgctcaaacacaacgatgaatggttgatatttgcgtcgtcctcactgggggattcgtcgctgaagcagcttttcaaagaggccagtgctaccggcgctattgtgttgtttcggggaattcctgaaggaaagaccttgggggcggctatccgtgattggcacaccctgatgaaggggctcgatcctgctcctcaggttcgaatcgatccgaaagcctttgtgcactggcgggtgactagcgtgcctgccattttccgcatagaagatgaccagctgactgcaagtgcactaggggtttacagcaaggactggttgcagcgtcaaattgaaacaggcaataccggttcattgggtcaacgcggtcctattcattcgattttagagccagatttgatgcaagtagcgatgcagcgtttacagtcgattgacttgggcgcgttaaagaaaaaagccattgagcgtttctggtctcgccaaacatttactgacttacccaaagccacgcagtatcggataagaatggttgatccaaccatcgtcatgaagcggccactattggatgccaatggccgaacattgatccctgcaggaacgcgtattaacccgctaaaagccttgccgtttactcagcagcttgtggtgtttaatgcgtcgaacgctgaagaagtggacgcagttgcgcattggcttgagacgcaagataggacactgcgccgcattacgcttatcaccacgcagctcgaccgtactcaaggttggaatagcctcaatgcgctcgaaaagacattggatagtccggtttaccttctcaatgcctcgctaaagcagcgctttgatttgcaagtcaccccatcgtttgtgcaagcaaaggggctcgcgtttgaaatagaagaaattccagcaaaggagcttgttcatgaaaaagctcaataa

SEQ ID NO: 300019 - DNA, 513 bp, Proteus mirabilis
atgcagatactccgtaaaagaatgccttggcggccatatctcatccggttggccgttcttgcgttaatcatggccttggtaggcacctacgccatgatgcgctaccgaataggtattgatacccagcaagagcgctgcctgcctgataccacggtgtatctgattgacctatggaataaagagcccgttaagtatggtttgtatgccttccactcaaaaggactcgctccgttatataacgacggtactcgtatgctgaaacgcctaacagggattcctggggatgaagtcaaggtgactccagagcatgttctggtgaatggtactgaagtctcaatcggcatggcattagcccagcgtcttggtgtagctgaagcagaatttagccgctcattgacgctgcaagaaaacgaatattggttttccggcgaggctgcaacgagtttcgactcccgctattggaatgccgttaagcgcgagcagattgtcggtcgcgcttggccgctttggtag

SEQ ID NO: 300020 - DNA, 348 bp, Proteus mirabilis
atgaataagtccacgctttggccatttatggcctctattactttgtctattgctggtagcggtttaatgaccagctggctcttaatgaaaacactcgaacccatccacagccagttggcgttaagtacgcccattgcagtcgtggattttggggaggcggtgttgtcactgggccccaatgccagtgaacaagacatcgaatccaggttgcttcagaccaatcagcaaattgaaaagctaaaagcagccggttttatcgtgctggatgcccaagcggtggtgggtgctgatgattccatatttgtgccagtaggctcaaaggaggtgtctcatgcagatactccgtaa

SEQ ID NO: 300021 - DNA, 2400 bp, Proteus mirabilis
atgaaagcctctctgtattcagggcaacgcgcttctgagctgttgccagtattggcctattcagacgatgagcaactgtttttcatggaagaccagagtgttggctttggttttctatgtgacccattgcccggtggtgatgagtctgttgcagacagggttaatgttctactcaacaacgactggccaaaagacactttgctgcaatttggcctgtacgcctcgcctgatattcaaaccgaccttcagcgcatgatgggcttacggcatcgtcaatccgatccattgctcagggcgtcgatacgcaaacgtgcggattttctcgatgggggcacggttcaaccgatagaagaatcgacccagactcaggtacgcaactttcaactgatcgtcacctgcaaattgcctttggaaagtcctataccgacggagcgtgagttgagtcgagcatccgcgcttcgggcttctttctcgcaagcgctggcaacggttggttttcgtgttactgagatgactgaccgaaattggctcgcggcattaagtgctcagcttaactggggaaaagatgcttcttggcgcaatccatctccaatccgcagtgaggcagataaaccacttagggagcaagtgttggattatgaccgagctatcaaagtggatagccaaggtctgatgctgggtgattaccgagttaaaaccttatcatttaagcgcttgcctgagcggatctggtttggtcatgccgcaagttttgcgggcgatatgatgactggtagtcgcggtttacgcggaagctttttgctgaatgtcaccattcactttccctcagccgaggcgatgagatctcgtctagagacgaagcgtcaatgggcggtcaatcaggcctatggcccgatgctcaagtttgtgccggtgcttgcagccaagaaaaaggggtttgatgttctttttgaagccttgcaagaaggtgatcgtcctattcgggcaaatatgaccttaacgctgttttccccaacggaagaagcgtcgatcagctctgtttcaaatgctcgaacctatttcaaagaacttggatttgagctgatggaagacaagtacttctgtttgcccattttcctgaatgccttgccatttggtgctgaccgccaagcgatgaacgacttgtttcgattcaagaccatggcgacacggcatgtgatccctctgttgcctttgtttgcagattggaaaggcacgggcacgccggtgattaactttgtttcccgtaatggccagatcatgagtgtgtccctttatgactcgggcagtaattacaactgttgcatagcggcgcaatcgggatcgggtaagtcattcctggtgaacgaaatcatctcctcctacttatcagagggtggccaatgctgggtgattgatgttggccgctcttatgaaaagctgtgtgaagtctatgacggggagtttttacagttcgggcgggacagtggcatttgcttaaatccgtttgaaattgttgaggactatgacgaagaagctgatgtactggttgggctattggccgcaatggccgcgcctacgcagtcattaaccgattttcagatggccaatctaaagcgtcagacccgtgaactgtgggagaaaaaaggtcgtgccatgttggttgatgatgtggcagaggctttaaaaaatcatgaagaccgacgtgtgcaggacgtgggtgagcagctctatccgtttacgacacagggcgaatatggccgcttctttaatggccacaacaatattcgcttcaaaaaccgtttcaccgttctggagttagaagagctcaaggggcgcaagcacctacaacaagtggtgttgcttcagcttatctaccaaatccaacaagagatgtacttaggtgagcgggatcgtcgcaagattgtgttcatcgacgaagcctgggatctgctgactcaaggtgatgtcggtaagttcattgagacgggttaccgtcgatttcgaaaatatggcggcagtgctgtaacggtaacgcagtcggtcaacgatttgtatgacagtcctacaggtaaagccatcgctgaaaactcggccaatatgtacctgcttggccaaaaagctgaaaccatcaacgcgctcaaaaaagaaggccgcttgccactgggtgaaggcggttatgaatacctgaaaaccgttcataccgtcactggtgtctattccgaaattttctttattaccgaaatgggcaccgggattggccgcctcatcgtcgatccgtttcacaagctgttgtactcgtcccgtgcagaagatgtaaacgcgattaaacagttaacgcgcaaaggcctttctgttgctgatgccatctctcagttgttgaaggagcgaggctatgaataa

SEQ ID NO: 300022 - DNA, 693 bp, Proteus mirabilis
atgcgaaaactatctccaattattctggcgcttgcgctgtctccattggttcaagctgaatctgtgtctgaagtgtcgcccgttggcaaaattgacggcatggtttctttgcccgtcacgggtatgaaagcggtcgaaagcaatggccgtattgttttcatgtcagacagtggccggttcgtcattgatggcacgctctatgatgcctggtcgaaaaagccgcttaccagccttgaagaaattcgtgaagcgggtaatacgctggacttaagtcgtcttggcttaaaaatggatgatttgaatccactgacgctgggtgaaggcaaaaagaaagtggtggtctttgttgatccacgatgcccgcattgccatgagcttttgaaacaagccttaccgttaaccaaagaatacaccttccaaattctccctgtgccagtgcttggtcctgattcagagcgtcaggttcgccagcttggctgtgcgcgtgacaaaaaagcggccaccgatgcattgctgaatggccggattggtaacctagagcaggatgatgcctgcaacttagaaccaatgcagcgtaccttggtgatggctcaaatcctgggcattcaaggtgtgcctttcattgtcgccaatgatggtcgcatcagccgaggccgtccttatgacctttctgcttggttggaggggcgttaa

SEQ ID NO: 300023 - DNA, 147 bp, Proteus mirabilis
atgtctaagcaaaacaatcacaactcagatatgacaaacgccaataagggtacgtctggtactaacaagacttactcacaaaaccaaggaaatcgagggtggcagatgaaccctcaaaatccgcagaatggcggtaagaaaaaataa

SEQ ID NO: 300024 - DNA, 657 bp, Proteus mirabilis
atggacaagagcaaaaacagtaagaaaaaaccgttcaaatggacaagagaacttattcggcttgcactgaacgacgggtggacgcaacaagagattgccgaaaaatgcagaacacagcaatccatcgtaagtgcttggaacaaaggttcgaaacaaggcacggaacaacaactgctgcctttgctcaatatctatggcaacaaaattcgtcgaaacagttttaaagtttattggtcattaaacactgaaactatggagaaaaccttttaccgtgttgaagggaaggtaattcttagccaagcattttatgatccgcgaagagaccaacgaggcaaactggtcaaaaaagttccagagctaaaactcgtggtacaccatcaaggggccgatcagtttcgcgtcgtcagtcaaagtcgattgactttcaggcatacgaatgaagaacttgatcatagcgtagaggatgctgtttggaattcgcatgtgctcgaacctttaactacgacgcagctaatcgatttcattgatcactattccaatgaaaagttaagcagatacccaagtgatgctaatacgttgccgttcttaatcagacaatctcttttaaaccatggattcccagtgtcgggtattgttgaatatcctgccgtttggtag

SEQ ID NO: 300025 - DNA, 939 bp, Proteus mirabilis
atggataaagatagcccatattacaaacaagtttccttgctcataagaatgcttcctgtggtagcaacagagacggtttttgcacttaaaggtggcaccgccattaatttatttgtgagagattttcctcggttatctgtagatattgatcttgcttatcttccacttgaaccaagagatgaggctttgattaatgtcagggctgcattgcagcgcattacagacagaatcaatactcaaccagatatcagagcggcatttcaggataataaagctgatgaactgagaatagttgtatcaagtccggttgcgacgatcaaaattgaagtgtcgcccgtcgccagaggtacattgcatagtgcagaaataatgccagttcaagagtctgttgaagacgagtttggttatgctgagattcaggtagtcagtcttcccgatctgtatggtgggaaattgtgtgctgcaatggatcgccaacatcctcgcgacttatttgatgtgcgtatgttacttggcagtgaagggatttcgagagagattttggtgggttttttaacctatacattaagtcaccctcggcctattaatgaagtcatgtcgccaaactggcagcctctgaatgagaaatttcaggcagaatttgacggaatgacttttgaaaaagttgaatgcgaagacttagcctctgttaggcccatgatgttaattgaactgcaaaaacatttcacagaaagggatcatgctttccttatgtcattcaaaagagggcaacctgactgggcattgtttgactatcctaatgcagcagacttgccagcgattcgttggaaattgcagaacattaacaaattggcaaagaatcaagcaaaacaccaagagcaattagataaattgaagcaagtgcttgatgattggcttgttaacgcaaacgccgagtaa

SEQ ID NO: 300026 - DNA, 834 bp, Proteus mirabilis
atggtttatactgttcgtgatattcataccttgggtgttaaaatgtcatctaaaataaactggcttgttgctcatacttctcctggtgcgctagtacttcagcaatggctgactgaaaacggcgtgagctactccctggctcaaaagtacgcgcagaacggttggctgaagaagcttagttctggtgtgtactatcgtccaaatgcgcagggcgatataaagccaacttgggttgatgccattcaagcattggatgtgcaattgggcgttccagttcatttggctggattgagcagcttaactcaccaaggactgagtcactatttgcagctgaacaaagagcaagtttggatttgcgttaaaaacaagtcgtccttaccgaaatggtttcgtgaattcccttatcagaattggttttactgcggaaaccataagcttgaagtgaatcccgagaaggatttgaaaaggatcacggttaaagagaaagagctcactgtcagctgtgcagaacttgctgcctatgaagtggtagatgcgattggaaagctgatttcatttgagcatgtcgcagaattatttcagggtttagtcaatcttagccctagaaaagtacaagatattcttgaacgaagcagctctgttcaggcaaaccgaatatttctatttctgggtcgatactacgatcaccagtgggtcaatcgcatagatgaaacaagaattaaattgggggcaggaaagcggcaggttgtcgaaaaaggacgttttgatgagcgatatcaaatcacagtgccagagatattaagcgtcaaaaaaggtgaacaacataatggataa

SEQ ID NO: 300027 - DNA, 387 bp, Proteus mirabilis
atgacaaatgcagttcgcaccattcaaactcagcgcctaatgaccattggtgcgcttggtttgatggcgttaatgatttcggagccctcatttgcgggcaccggcggtgatgctttcaccgatgtgtgggataccctaaaagattggacccaaggtactttgggacggatcgtagcgggagccatggtactggtgggtattgtgggcggtattgctcgccaaagcttgatggcctttgccttgggcattggtggcggtatgggtctctacaacacaccaacagtcgttgaaagtgttatgtctgcaaccttacctgttgttgccagcactcaagaagtcattggcacaacagttccagcaatcagcgtcgtcttactgggcacctga

SEQ ID NO: 300028 - DNA, 573 bp, Proteus mirabilis
atgacgacatcaatgcagaacaacccaaagcaccattcaaaacagtggtctaaagctggattacttttattggtagtcggctcaaccttattgtctggctgtagttcattgggtcttgggagtagtgaatatggatgtccaggtatgcctgacggtgtgcgctgtttatccgctcgtgaagtctatgagcttacaagtaatggggctgcacccaagacgattgatgctgtggcgactcgaattggttctccctctgggtattcacaatctgatttagagacaggactgctgagctatccagcattacctgagacgcagcaatctgcacctcttcgcattccttcaagagtgatgcgaatttggattgcgccttgggaggatgaccgtggagatctgaatttatccagctacgtgtttaccgaaattgaaccgcgccggtgggatattggggtgtcagcacctcgaacggtttcgccagtgctacgtccacttcagactcaaagcgattctgcctcagcgggagctgatggtaagcgcgataacttgagtatctacggagaaactaacgaatga

SEQ ID NO: 300029 - DNA, 1290 bp, Proteus mirabilis
atgaaagcacaatgggaacaaatgagcccgaacatgaagcggggtctatcggttgctggtattgctggtggtctcattcttatggttatggtgttttcacctaatcctgatgatggcgcgaacagtcggaaccgacaggaaacgatccggcacattcttacggataccaatactcgtgatgttggcgtcgatagtttggctgcaaacgtaaaactactcagtgagcgcaatgaacagttacgccgtgaagttgagcgcttgcgtcgtgacgtcgattcaggacggctaagcccaggctcgccttctataccaagtgaagtcaatgcggagctggcccgccttagagcggaacttgatgatgttcgcgctggaggtgatgcagcagttgaaggcacaaatagccgttttgaagtgcctttatctgccatggaattgcctaaagacgaaaagcctctgccgtctaacccagacgactattttgccaatgcgccgctgcctgatccgctctatcagcagccagccaatggccaaggtacacgagcacgagatgttccattgccgccaatcacgattcgtatgattgagcctgaagtggttgctgaaccagaggttgttgtgcaagaagcgccgcctttgtatctaccggcgggcagcatcatctcaggtactttgatcacaggtttggatgcccctactcacgagtccgcaagacgcgagccttttcctgcattgctgaggattcaaaaggaagccattttacccaaccgatttagagcggatatcaaagagtgtttcttgatcgccgcaggttacggtgatttgagctctgagcgtgcttatttgcgaggcgagaccatttcatgtgtgagagaagatggtggcgtcattgaaacgcgactggattcttatgccgtgggtgaagacggcaaagccggtattcgtggccgattagtgtcgaaacaaggccagctggtggccaaatcgatgatggccggattccttcagggcttggcaggcgcatttgatgtgaatcctgtcccgacgattcagacgggtaatgccggtgatactcagctgtaccagcaagtcatgagccaagaagcattacaaggtgctgcgattaaaggcaccggtaaagcattggatcgagtggccaagttctatttggacatggctgaaaatatgttcccagtcatagaggtagacgctgccaggaaaattgaagtcatagtcactcgtggtgcctcgttgtcgttggccacttcgcaagggggaggtgcaagaagatga

SEQ ID NO: 300030 - DNA, 897 bp, Proteus mirabilis
atgcgaaccaaaattagtcgatggatgacaccaagcttaatcgcaatgagcttgagtggcgtcctgttatctcaagcgtcgtatgcagacgtggaattgccgattgtgccagccagtgtgatgaagcagtctgctactgcaaatccaccgactcaaaccaatacggcttcaacggatgtgccaacaacgctactgatgacaccgggggttaatgaactgatccctgtagcacttggccatctgaatcggattgtgacgccgtttgaatcgcctcaggtgagaacaaccagtgatgctcagacgcaaatcaaggggaatgttgtatatgtggccacggacaaagaatcaccggtttcactttacatcactccgcctggtcaggaagcgcctgcgttatctgtcaccttagtacctcgtcgtattccaccgcgtgaaatcaccttagctattgatggtcagcagtggcctattaagggcgtcgtgaaccgaaaagccgccacttgggaaacggctcagccatacgtcgatagcctacgtgatttacttagacgacttgcactaaatgaactaccacaaggctatgacatccgtttggctggccaaactgacacaagcccgaaatgttttcagccgggcttaaagtttggttttaagcaggggcaaattgtgacgggacattacttcaccgtctatgtaggactggttgaaagctttgccgatgagccgatagaagccagtgaaatagcttgtcatgcaccagatatagtggcaagcgcctactggcctcgcaatatcttgttgccgggtgaaaagactgagttgtatgtggttgttcgcaatcatcgtgaagaagcggtggaaagtcagcgactttcgcttcttatgggaggtgaataa

SEQ ID NO: 300031 - DNA, 627 bp, Proteus mirabilis
gtgaagttcgacgtgtttttaaaatcatggcaaggcacgcaattagagaaccgatggcaacggttcctgattgcggtgctggtgctatctaacttgctgcttgcggtagcggcattttctcgcaataccgtggtagccattcaaccaccaactttgtctgaaccggctgaagtgtcacgaaaccaagccactcaaccttaccttgaatcctggggactctacctggctgagcttatgggtaacgtgacgccaggtaatgtgtctttcatccgggttgccattgagccgctactttctccagcggtgtaccagcaagtggtcgatgcactggagattcaggcaagacaaatccgcgaagaccgggtcacgctcaaattccaacccagacaagtggaatatgagtatgaaaccggccatgtctttgtgaccggttattccttggtttctgggccatctggagatgagcagcgccaaactcgcacctatgagtttgacatcgatattgagcaataccgtccaaaacttagctggatggatacgtatgaggggcaagctagaacgaagcgcgttcgtgaaaagttgacccaagagcaaaaccggagggtgaatgatgcgaaccaaaattag

SEQ ID NO: 300032 - DNA, 282 bp, Proteus mirabilis
atggaacctgtaaatattccatcctatatcgatgacccgccgcacttcctgctttggagtgccgatgagatggctcccattctattggggctagtgatcggcatttttaccggtaatgccttggttttatgcctgttggggttggtgacaaccaagctctatcggcgtttttgtgatggtcgcccggatggttttattcttcacgccatctactgggtcggactgttgccaaccaaagccaagacgatccctaacccatttatcaggagctatctgccgtga

SEQ ID NO: 300033 - DNA, 240 bp, Proteus mirabilis
atgccttgggattggcagcttcagtggtcagctagatgccgaattcttgaaggttttgagggttcaactcagacaatactaacaattgatctttttaatgcggttgatatgatggggatattggtcgtgtcgagaccagctgcccactttagcaaacccggacgggacgacatgcatatcaaatttattttttgcttaggttttttctgcgacctcggcagtgggcaccgtattcgctaa

SEQ ID NO: 300034 - DNA, 588 bp, Proteus mirabilis
atgcaaattactaaaatcatttcctctgccacggttgaacgtttaaagcaaaaagcacgaaagcttaaacgtgaaaaatctattccacacactcaagcactcgatgaaattgcaatcgctgttggttttaatcattggcatcaggttgtacaagctaatgacgtactgaaaccatcagaagtggcattatcttctggatgtgtcatggcttttgatgtcaaagatggtatggatgtcgataccagtgatggggtcttaattgaagaccacttcttggagatgctcactgaaaagcagctatttgaaatttatgccaattcccctgatgaggacgacgaacaaaacagaccgctaaaagaaacgctatcggattcagagcttcatgagtattttcgagatgattgctcattcatgtacttccgtcttgccgagcctcatgcaagcaaaccgttaaaagaagtattggctcttatacgacagtactcgttttggatgccgcaatatatttggcttcaaggtcaccttattgatacttatcatttgccagcggaagacgagaatggcaatgcagtaggcgtaaggttttag

SEQ ID NO: 300035 - DNA, 636 bp, Proteus mirabilis
atgagcaagcataagtcggtttggctactttgcctggcgctgatgctggagattattgccattggcgtgttagtgcccggtgattggactggccgggttattagtaaagagaagcagatgatccaaaatcaattgggcgcacaaacaagctattggattggtcaaactagccatcgctggtatcagtcatggattgtggatacgcagatggagcaatctgtgcgagattttctaatccccactgaagagcagcgactgcgctctaaagggatggagaacatgggaggcttttggtttgtttgggtggaagatcgtattcaggcattttttgatgtgttgtaccaagtgttcactcgatttgctttgctgatggtctggttgccctttgcgcttattctcatgttaccggcgctgtgggacggcttgatgacctggaagattaagaagacaacctttgatttttcgagccctatcattcaccgctacagcatgataattctgagttcaggcgtcatcttgctgtttatgggattgttcgccccgctggctattccaccggtggtactaccgtcgatgatcatcggcttggcattaatggcagggttggcgttaagtcacttgcagaagaagatatga

SEQ ID NO: 300036 - DNA, 561 bp, Proteus mirabilis
atgcatcattctgtctgtctgaaaatgacaacacttaccagtaaagaaatgctcgttcaatggcagcaacataacccccagttcaaggaaaccttaagactgcttgaaaccgactggcctcatgctttggcctcagtgcactgtttggcggactatttaacagatgcgttcacgttagatggccatgccatctttgatttgtgtctgtgtaatggcttgggcagttatgaagaagttagttgtgatgatgacagtgtacgcctgtggcatttcattgaggcactggcctggactgccgctagtgctttaacggggattcgcctgcgtgatcctgaccatttcgagtgggccgccgtggatggtgtgtatttctactcctggattcgtaatcgtccaaatcggatggcgtatttggctgaaggacgcatcgacgtgcgttatgtcagtggccatacgacgacaaagcggcttcaacaagtgattaaagcccggattatgacgccaaccgttgcagccatgctggcgcgagtagaagaggatgtttggcatgagcaagcataa

SEQ ID NO: 300037 - DNA, 1821 bp, Proteus mirabilis
atgaaagaaaacgcatatgagatgccttggcgcacgaattatgaagccatggcagcagcaggttggctggttggggccactggggcgattgccgcagaaatgctgactgagctaccacctgagccattttggtggatgacagggatttcctcgggcatggcgttgtaccgcctgcctgaggcttaccgtctttataagttgcagaaggggctaaaaggcaaaccattggcatttatggcgctgtcgcatttgcaaaaggtgatggcaaaacatcctgatgaattgtggttaggatatggttttgagtgggatcaacgtcatgctcaacgcgcttatgaaatattaaagcgggataagcaaaccttgcttaaccaaggtcacggcaaacaaatgggttcgacctggattcatggtgttgagcccaaagaagaagatgtgtaccagccagttggtcacaccgaggggcataccttaattgtcggaacgaccggtgccggaaaaacccgatgctttgatgcgatgatcactcaggccattttgcgtaatgaagccgtgattattattgaccccaagggagacaaggaacttaaggataatgcgcagcgagcctgtattgccgccggtagtcctgagcgctttgtgtattttcatccggggtttccagagcattcggtacgtcttaatcccctgaggaactttaatcggggtactgaaattgccagccgaattgcggccttaatcccatccgaaaccggtgctgatccatttaaagcctttggccaaatggcactgaataacatcgtgcaaggtttgttgcttacgtcacaacgtcctgatctgaaaacactgaggcgttttttggaaggtggcccagaaggcttggtagtaaaagccgtcacagcctggggggagcaggtgtatcccaattttagtgtggagatcaagcgctttaccgaaaaggccaataccttggctaaacaagctatggcgatgctgcttttctactacgaacgcattcagcccgttgccgccaatactgatttagaggggctattgagtatgtttgagcatgacagaacccactattcaaagatggtggcctcattgatgccggtgctcaatatgctcacatcaagtgaactaggtccattgctatcaccgattgcaaacgatgtgaatgacagccggttaattacggattctggccgtattatcaacaatgcccaagtggcctatatcggattggattcattgaccgacgcaatggttggtagcgccattggttcgttgcttttatccgatctcaccgcagtggccggtgaccgctataactatggtgttgaaaatcgtcccgtaaatatcttcatcgatgaggcggctgaagtcgtcaacgatcccttcattcaactgctcaacaaaggccgtggcgcaaaaatgcgttgtgtgattgctactcagacctttgctgatttttcagctcgtacaggcagtgaagctaaagctcgccaggtgttaggtaacatcaacaacctgatagctcttagggtgatggatgccgaaacgcagcagtacattaccgacaatctgcctaagactcggttgcagtacatcatgcaaactcaaggtatgtcgtccaactcggacagccccgcgttgtttaccggcaatcatggcgaacgcttgatggaggaagaaggcgatatgtttccaccgcagttattaggccagcttcccaacctggagtacatcgccaagctttcaggtggccgcgtgatcaaaggccgtattcctattttaaccagctctacacaggcagcataa

SEQ ID NO: 300038 - DNA, 2151 bp, Proteus mirabilis
atgttcaaaaacctattttttcagaccaaagaactaccagagctgtcatctcaactggatgcagacattccacgctacccgccattcctgaaggggttgccagctgcgtcacccgaggatttacagtccacacaagacgagctaattgccaaacttcgccaggtacttggctttaaccagcgtgagtttcaaaggctgattcagccctgcattgatcatctggctgcttatgttcatttgttgccagcttctgagcatcatcatcacagtggtgctggtggtttattacgtcattcgttggaagttgctttctgggcggcacaagcagctgaagggatcatctttgttgccagtggcactccagttgagaaaaaagagctagagccaaggtggcgtgttgcggcggctcttggcggtttgttccacgatattggtaagccagtttcagacctgtctatcacagacgaagatggacgctatcagtggaacccttttttggaaaccttatctcagtggactacaaataacagcattgaacgctatttcattcgctggcgcgacggacggtgcaaacggcacgagcaattctcaattctggttttaaaccgggtgatgacacctgagttgctcgcctggttaacacaacctggccctgaaattttgcaagccatgctggaagcaattggcaataccgatccagagtatgtcctgtctaaactggtcattgaagccgaccaaaccagtgtccagcgagaccttaaagctcaacgaatttccgttgacgacaacgcccttggtgtcccagtcgaacgctatctacttgatgccatgaggcgattacttgccagttcgcaatggctggtcaatcagcgagacgccagagtctgggtacgaaaatcaaatcaatcaaccaatctttacctggtttggaaaagcgctgctaaggacatcattgagctgttggccaaagacaagatacctggcattccaagagatcccgatactcttgctgacatcctcattgagcgaggattggccactaaatccgcctcaaatgagcgatatgaaagccttgcccctgaagtgctgatcaaagataacaagccaatttggttagccatgctgcatatatctgaagccgatttattgttcagctcggatgtaccaagtcgcgtgagactgttcagcaaatctgagtgggaagcaacacagcaaacacaagctgaacctcagagtcgctccagtgagcatccagacttgcctgaagagtcattatcaattgaacacagcaattggtctgagtcgccatcgacaaaaccgtccgaccaagatgatgaacttcgtcatgccagtgatgttaatcaccttcaggaaaatgaaaacgttccgggtgatggatgtgaaaagcctcaccattcatacgatgctgctatcgcaaataacgcaaaccagcacgatgcagaggcattgaatctccctgaatctttggcgtggctcccagaggccagcagtgcgttggttatggctggtgaacagatactgatccgctatcccgatgccgtaaggccttggtgtgctccccgaaaactgcttgctgaactcagtcgattagattggcttgaactagatcctgcaaacccgacacgtaaggccagaactgtgactacgaaagacggcgttcaggagcaagggttactgctgaaagtatcgatttctaaagggcttactgcactgatagacctatctaatcaagacgcagaatcagtgtcagcaattcagaacgaagagacttcacagcgtccgagtcgaactgagacaaccaatgcccaagcaaaagagcccgccacaagagcggagcgtaagcaaaagccgattgcgcccaatgcgaactcaagtacagaccccaaacacgcgcagcggcaacagatggttaattttgtgaaagatttgcccatcttactgaccgatggcgattacccagacgtggatcatagtgccgatggtattcgcgtcacaattcaaaccttacgccaagtcgccaatgagcatggcattccagccggacagttgcttcgggggatctcggccagtgaccaatgccagtttgatgagggggaaacggttctgtttaccgctcacgctaaacgttaa

SEQ ID NO: 300039 - DNA, 816 bp, Proteus mirabilis
atgccaaaactaaaaggttctgagattagaacgatagataaaattttcgaaatgacagatggctacctgttagatttttcagataggacaatggctgagtattttgaagacgagttgaacattgatattactcaagaaaagtaccagatcaatgggggctcaaaggctaaacgtttaagagcttttattgagctagaggatggttacttggttggccaagtactcagaaaactttggcagtataaatgtgattacaaacccgaagacccacaggaaaaggcaaagctgtttgaaattttagctaaaattgaaacaggtgttagtgcttcagtgttagcaacgctttcaaccaaagccgaagttttgaatatggatacggtatctagggaccttgatagagccctggaaagcgcctttcgtgatccggaaagtgctgtcacatcggcttgttctacgctagagagtgtgtgccgttcgatcataattgaacttggctttgaactccctaagaagaaagatattaagggattgtttgactcagtaaagcgaccactagggttgtctcctggtgaaattaatgtaaatccagaaattgctgatgacgtaagaaaggtcctatctggattggcaaccattgttgaaggtatcggagctctgcgaacacatggtggtgatgctcatggtcgagagcggggatacacccgactagatgcccgtatagccaagttagctattcactcagcaagtaccgcagcgttatttctaattgaaacatggcaactaaagtatccatcaaaagaactcgtaaaacattga

SEQ ID NO: 300040 - DNA, 771 bp, Proteus mirabilis
ttgactatcgttaatagcaaagaattcattcgtgaggttaagcacacacctcagaatttctacattattcactattcttgccaaagcttgaatgatgataacgacggcttatctcctcgaattacgtcgattgcaatactgcacctgtctacagaccagacagtgagtttttctattcacgctattgctgaagaacttggtatcagtcgagataatatccatcaacgtctcgatgatattgagcttgcgttactaggtaaattcaatgaatttgtccgtgatcgtcgtgatagatactggattcactggaatatgcgaaatctgacttacggtttcgaacatttagaacatcgatatcgagtacttggtaaaaccgatatggcagtaattcctgttgaacgacgaatcaatctcaatgatattttgtctgaccgttatggcagtggttatgttgcagatcctcgcttaaagtcattgatgaatttgaatggtggtatccataggcactttttaactggtgcggaagaagtagaagcgttcaagagcaatgagttcatcaaaatgcacaactctacgctgtgtaagaccggtttttataagaaagtaatcgataagctagctcagggaaaacttaaaacgaacgcaaagggcatgggcgttcttattgataggctttttgaaagccggttggctaagacaattgcattggctagtgcattaatttcggtacccatctctgtttatcaaggctttatttggctaacaacatga

SEQ ID NO: 300041 - DNA, 2052 bp, Proteus mirabilis
atggccgaattgaatgagttggataataagctgctggagcatttcagaggctacgttgtaagaaaggatcttgtgcggtctgtaaaagttggtgccaacgtccccgtttttgtattggaatatttaattgctaattcttgttctaccgatgacgaagaaaagattcgcaaagggatggaaaacgttaagaagattcttagcgaacactatgtaaaccctgaagagagctcactgattcactcgaaaattcgtgaaaaaggccgttataaaattattgataagatttcagtagagctggattctaagaaggatatttactgggccaagctgcaaaatagcaatatcattaacggcaatatccgtgatggcttagtgaaagagcatgagaaaatgctgatggggggtatttgggctattattgatgtggagtatgaccccgacatcaaaattggtcagcacatttacccttttgtggtaaccaacattaaacctattcagctttcatcgtttgataacagcaaaataatcaacaagcgtaaagaattcagcaagagtgagtggctggatattttgcttagaagttgtggttatgaacccagtgctgaaggcgtaagcgaccgtatcaagatgttgttattagcgcgcttgttaccaatggtcgaaagtaatttcaactttatcgaactcggaccgcgctctaccggcaagtcatttgtttacaaagagttaactccctacgccgtgttaatctctggagggcaaggtacagttgccaagctcttcgttcacggttcaacgggcaaagtcggtgcagttggtcaatgggatgctatctgctttgatgaagcgacagataagatctttaaggatcgtgaagctgtaccgttaatgaaagattatatggaatcgggttcgttttctcgcgcaggcgccggaggggaaattaccggtgtcgcatcgatcatcctcaacgggaatatcaaccaaccagtagaaactgtgttgcagacctctcacttgttcagccctttatcagatgaagtgaataacgatactgcttttctagaccgtattcatttttacctacctggttgggagatgattaagtttgccccacagcatttcacttcaagctttggtttcagtaccgattacttctcagaaacattaaagtcatttcgacgagtgacttatactgacgctttagagaactttttctctttggggtcacatttaaaacagcgtgataccaaaccggttaaaaaaactgtttcaggccttattaagctacttcaccctgacggcgaatataccaaagaagatatacgtgaatacttagagattgcccttgaaatgagacgccgtgttaaagagcagctcaagcgcattggtggtatggaattctgggataccaatttctcttacattgataaagatactcaggaagaacattttgttggattaccagaggagaaaggctctcacctgatagaaaacacacctttaccaccaggtgtttgttataccagcactagcgacggggataatgtcgcgctcgtgcgtattgaagctgttactacctcgggttctgggaaactcaatatttctggtgtaagtaacaccggagtaaaagaaaatatcaagaatacctaccagtatattaaagctaatgaaaaaacaattttaagtgaacagcattcgcttaaaaattacgatatcactatccaagtgaccaatatgctgggggcttcaatatcaacgggaattggctcggcggtttatatcgcaatcgtgtctgctctgtacaaaaagaacctaaaggctggccttgcagtgttgggtaatatatccgttggcggtgcgattgaaaggtcaattaactttgcagacaagataacaatgttgtctgagaacggtgcgaagacggttgttgttccaatggataatctagttgagctaacaaatgtaccaccaacagttcttggcaatacagatgttccgttttatcagaataatcagatgcttatgcaaaaaagcatactgcttgactga

SEQ ID NO: 300042 - DNA, 2304 bp, Proteus mirabilis
atgattgatacctggtttaaagaggatttagcgcgcatcttggaacagcaccctgtggccatatttattgatgaaagcggtgaggcggagtttctattaaagagcctaaaacgagattgtgatgtgtatcgcaccaatggagaactcgacgagttggaagcgaaatatcgcgttgaaaaggccttacaagagcatcctaaatctgagcacaagtacgttatctatacgcaactcaacaaagaagacttaaccttcgtacgcgagtactgtgagaccaatggttgcatcgaaattcgttatttgcagaactacatcaaagataaagttcaccggaccttaaacttaaatattaacttgccgaaagacgagttgatcgctgctgcaaaagtgagtgtgggtaaagatcgtacctactggatggacttaagccacaaaggggcctctgaaatctttgatttagacaaagagctgctgccctttgttcatgaccccgaaaactatgtcactgaaaaatacgacgcacagttacgtgaaaccttttaccgcaaggttaatgagttgctaggccaagaatatatcgataaacctgcatctaccctagcgtctgaagttgtatctgcgatgttaaagggcttggcggataattactgtgataaaacgttgttatcagtttacaacagctggcttgattcggtgagttatcgcaattcatttggctcatacctcgccaaacataagttggattcagcgtttattaacagcaatgctatctggcaggtcaatcccgaccacccatttaggcaggtggatgaagcttggttaaaggaattaggcaataaactggctaataaatctttgtctaaagtagagtcagcacaactagttgctaggctgaaacaacgccatcaaagcaaacaggcacaagcgctgggcattgtgttttggaacgacattattactttgctcgactttgatccgaaggatatggcctatttaagcagctttgctgaatgtgttgagttttacaaaaaacatttctgcccgcttgatactgccatacgtaatttgtacaccgaatttatgcaacaacgtgacagccttgagcctttccaagagctttacaaagagtacgttacgctgtttttagataagtggttccagtatttcagtcagtaccgggaagatcaaactggcattttacaagccattattgaccgcgatatccaaattgatcgcccaggaaagaacagcaaaatagccgtgattgtaggcgatggcgtagcctatgagattgcagagcaggttgctatcaaggttgagcagcttggtaaccatagtacacttactcgccgtcatattttggctgattgtccatctgaaactgaaaacaacatgagtcatatctacatggctaatggtgtggttgaggcagttcaaaacaaacgagaaaggtatctcacttcacaaaacccaggcaccattatcgattacattcgcttagatgaagtaagtgatgaagcacttactggacaagtgcttatttgtacctataaagatatcgatgacatgggcgacaagctcaatcataaggcacttaaatacttccctgagtcgattgatttttttgctgaaaagattaatcagttgctcaaaatcggttatgcaaaagtgtatctaatcaccgatcatggcttcgtattaacaggcttgttaagtgaggctgataaaattacagacaagccctctggcgtgaactatatagacgaacgctttatttggactgccgataagcaagaaaactttactcctaagtttatagaggtcgcaaaggcttataaagactataactacctgtactttgctagaaacatgaacccgtttaaaacacctggcacctatggttttgcccatggcggtttagcaccacaggaactggttacgccttatttttgctgggaacaaaaaagtgatgttatgggggagttaccagtatccattgccaacaaacattgcttagctagcgtaactggcgagctgtatcagctaaaactccaagctgaatccggtgaaggaaatatgtttacgctggaccgcaaagtgatgctgctgttttttgctaataaagctcaaataaacaagagtgatgtaattgcagtgcagagtaatagtgaagtcattaaagagtacacattcgacggccatgatgaaatcgaagtgcagctagtggatgcaataaccaaacagcaactcgacagagtaaagattaaaaagaacaatgaccgagatcttggcggactattttaa

SEQ ID NO: 300043 - DNA, 3720 bp, Proteus mirabilis
atgaaattagctgaccatgtagaccatttaagagagctgattgaagccgccttcgataagcaatttgctaggctgggttttagtaagaccaagcaaatggatgccacccaggtagaaaaactaccagaagaagttaaaaccaagcgcgagcgcttcgccgtgatgctggagaaccatatcggtgaaaccggtggctatgaaagtgcccgtgaaaagctactggatgaattaacctttaccttattcaaccgccttgccgccataaaagtgatggaggcagccagcttatttccgcccatattaacaaagcaaaaggagcatggtgatcgttcattcggccataaagcctggctagaaatgaatccgcacatgcgtggtgaagagctggaaggtattcgtgaatatttgaaatcagcgtttgacgaacttggtcaaaccttgccgttgtatagcaaagcctacccttatgcgcttttacctgatgccataagcttaaacgatattattgacgcctttaatgcggttgatactgacgcgcaagctaatgactcatcagaagagaccatctggcaaagtgatgatgttctaggttggatgtacgaaagctacaacaacaaaaaaaaggcggagttcaaaggcgagcaaaaaaataacaaagcaaaaaccgaatacaacaaggtatcactgcaatcacaggtgtatacgccgcgctgggtggtacaattcttggtcgaaaactctctgggtaaaatgtacctcgagatgtacccgcactctgagataaaacagcgctataaaattgccaatgtaccaacaacgcaaacgcgcatacctaagcctttacatgaagtacgcacgatagatccggcctgtggctcgggcaactttttgttgtacgcctttgacttctattacgagctttatctggaccaaattgaaaactatggtgcagactatgatgaaaaagatatccctaaacacatcattgaaaataacctgcatggcatagacttagacgatcgcgctatccagttagcacagcttggcttatttatcaaagccaagaaaaagcgccgtacagtcggcgagttgcatttcaaagtggtatcatccgatttctatctgcctgagtatgaagcagtaaaacacatcttcgaacagggcaatttggtgtcagctcagcaacgggagtttatagagaaggtatggggtgatctcatgcaagcctataagtttggctcgctgattcatattgataaagagttaaaagaacagctatctcaggttaaagagcttgcccttggtgaaacgtttgattcgacgcaaaagttaaaaaagaaaattgttgaaggggatctttttgcagcggcagactatgccgagcaccaagaattcgcagaaaacttctttgcaaacttgtttgcagcggtagagcaatatgttcgaacagagcgtaatactttcttaagtggcaaaacgcgagatgcgattacatttttagagctgttaaccactgaatacgacgttgcaaccgctaatccgccttacacagacagtgccgactttgggccagatataaaagaattcatagaagacaactataaaaaaccatacaaattcaacaccaacttgtacgccacatttatcaagcgttgttacgaacttacaggaaaggatggcaaggtagccatgattcatccacacacctttatgtttatcaaaacatttgaggatgtgcggaagtttatgattgataaatgtcacatcgatgtgatggtggatttcggattggaccgggtaaatctctttggccctggtattttgttggatgcaaccttttatgttctcagtaaaggaaagtccgaaaaagacggcctgtattttaatctaactaacaaacttcaagagaaatttaaaaagggtgtgttccttgaggcattaaatgaccacatcattggcaaacctaatgaaagattgcattccctagaacaggaaaaactaaaacgcatcaaatcatggccattcatttactggatatctgatgattttagaacaaaatttggtgccaactctttagattcattttttaatataaaaaacggcctccagacaggaaataacaataggtacttaagattttggtgggagatagcacctagtcaatcagactatattaatggtaataagtgggtgctttactgcaaaggtggtccttttaataaatggtttggaaacctatggacaactgtaaacaccatagaaacgaattccaattctcctagcaaaggctaccgcaaggaagggataaatttttcgggatcaagctctaaaggggcttgttttaggtatgttccagaaggaaatatgtttgataatgatgctccactaatttttcctaaagaaaagcgcgatgtaaattatctcctaggatttcttaactccaaactggtgtcatacatcgttggctgtttaaacccaacagtaaagacacaggttggtgatataaagcgagtaccatttacgacaccagcaatagatgtcgagaagtacatctctaaacttacagatacaaacatcagaataaagcagctattgtgtaaatattctttagtggagataagctacgagcaaaataacagagcaactaaggaaagcctaatcgactactttaactttgagaatctcttattaactcaagttcttataaatgaagcaatcattaacgataaagtattcgaggcttatgctctttctgagcacgataaggaaatggttttagccaaggaaggaaagatcataggccatttacctgtttgcccagaggctcgtgatgtctatttatctcaaggcgacgtcaccagtgaatttcctcttggttgcattcgagagtttatcgaagcattacctataaaagagtttagtgccgaagagcgtgaggtgattgaaagcgggttctcctcgctgtatcagagcaataatgatttagaagagttttgcatccgtcaccaaatcaaccctatcaacgtatggtattggttcaaacaaagcaaagtaatccctaagcaacgtatgcaaactttagccatggaatttttggctgatattatccgtgaaatcctgatggaagacgaagatggcatcattcctcttgtgcctaatgccggtgagaaagtgcttcttgatcgcatcgaagagaagtttctcgataaagggtttagtactgctcaatactcaagctttgattccgtgctagggcggccaatcaatgattacctaaacaaatatttctttgcagagctgtcagatcacttaaatctgttcatgtatttgcctaaaactccatttatctggcacttaactagcggccctgaacaaggtttcgactgctacatcattatctacaaatggaatcgcgataacttgctgcgcttacgctcggtatatatcgaaaaccgtgaacgcgctttgcaaaaccgccagagtgatattgctggcaatgaaagcgcggaagctcaaaacgaaaaagatcgtatctttaagcaattgaaagaaatcgacgcctttaaaaagaaaatcgacgaactattggctgaaggttacgaccctattcttgatgatggtgtaggcaaaaatatcgcgcctttacaaaaaaagaaaatgctggcttatgacgtgttgaatgcgggtcagctaaaaaaatacttgaacgctgattggtaa

SEQ ID NO: 300044 - DNA, 3690 bp, Proteus mirabilis
atgacaatcataaatgacatactaacgttagatcttaaagaagatattaaaaacgttattgaccttgaagaccgttcagagatagaaattcaacacgaaatcgagtcatacatcgtaaccgaaggtattgggcggcacctctacgaatttacaaaccaattcacctctaatattaaagagacaggggtttggttatcaggtttttatggctctggtaagtcatatttcggaaagatgctgggttatataatagataaccagattataaatggtactcctgcacgtgagcgttttataccacgcttaaaaggtgtaagtgatgcaggtcttattgaaaacgccctacgtaatcttgacgcaattaacagccgcgtagtgttccttgatgttgctaagcaaaatactgaacgtggattggctttcaccttgtttgctaatctgcttaaaaatcttggttttcgtgatgatatttacggttatatggagtttgatctgctcctagatggtaaatacgacgagtttaaaactattgtccaaaaactagagtcgaaggattgggatgagctaaagaaaagtaatcggcatgtcgctagagttatgcgaaaggtctttgccgaaatggggtacagcgagtcagattatgaagataccaaaagcgtctacagtgcttcgatagaggatttttctgccagtaaatttaaaacggaactggaaaaatatcttaagtttaatgcagaagaaacactagtctttgttttcgacgaggcgagtgaagctattagccagaagaaatttacccttttagatttagaagggattagtgaatcgctatcgagtataagtaataaagtttggaccatagcgattgcccaagaaaagctcgacgacgtgattaataatgctaacgtcagtcgcagtagtttgaccaaggttaccgatcgttttaaaaccaagattcaccttgagtctacagaagtagacgttatcattcgtagtcgattacttcaaaaaacagaacaggcaaaacaagatttagttgcttattaccaaaagaatgaaggcctaatcagcgacgccaccaacctaaaatcatcgttccctacgaaaacggaaacagctgaagactttgcggtctattatcctttccacaaatatcaattcgatattttgcaaaagttcttgtttagctcaaacgctttagttgctacccaaattgcagctcgaggcatgattatcacaacatttgacgtattacgtaagcaaatgcgtgacaaagagctgtatagctttacgccagggttcgcgatatgtgatgaagcccaaaccgcgccgccagttggattggtcaacaaatacgatacaagccgaaaaatattaaaggaaaatggcagcagcattgacggcgagaaactgctcaaaaccatgcatctattagccgactctgaagtagtcgcgccaacagttgaaaatataaccaaaagctatattactgacattacgtcttactatgaagtaaagccagcaattgaagatgcgcttaagctactgcttgaatctaaagtactactactatcaaacaacaactacaaaatcacatcagatcttgaaggcaaaatgctcgaagaaatgaaagattttgatgtcgaacttttcagcaagaaacgtgagttaattaagtatctgaaggactacaaaacctttaacgcagttgcatcctacaatgatggcagtgatgcattcaaatttagcgtgctgtcggaccaagacgatgagttagcacctgtaggaagcaaacacttaaagatcacagcctatagcttgttcaatatcagtgatgatcgtcaggattttattgaacaactgaagcttgatactcagtatcagaaagagcttattaccttggtgccagatacttcagagttctcccagattgataaattgataggcgaagttatgcgctacgcctacatggaggaaaaatactcgaatgaaaaagatgccgataagcgtcaaattattcgtgaatttgaagttatacgagaagagaagcaacgaactttaagagggctaattcaagacgcatatcacaatgcatccctgatctacatgttcgacgagcatctgttgaacgttgatacatttaagggaaccattgccgacaaccagcgaaaaatggtaaaaaacatctacaccaagcgtttatcaagtcaactttctgatagccaggtctcgaagattttcagcacacataaagaaagcctgaataagttatttaccgctaatgattttgcattcttcgacggtcacggcaattttactggcgatcaccttaaaattgttgaagaaatcaacgctaagataaagtcgcgctatatggatggtaaatctctagaagctgacttgtcaggtgctccatggggctatagctacggaacattagtaacgactcttgcagtactattccgtgccggtcgactatcggttaagtttaatggtgatacctacttctctcatgaacaaaaagcggtacatgatgcttttaccaacacaactaaatttaaatcagcgtcattcaaatcgattactgcaacgctaaccgctgtacagaagaaccaggcagtacaactgcttatggaactggaaacacaggaccatatcggcaaaaaggtagattggaatacaaacgattttgacttggctgacagtattcgtttgatggctgaacattttatcagtgccattaccaacctgagtgatactgttcaagattttgaagaactattccccaaagtggcaggtttaaaacaagacttgcaaggttttgcgggtaaagttaccgagagtaactatatcgaaaaggttgagtatctacttaataacagcgatacgttcagcgatgcggttcaagccatattaaaagctcagaaattcattaaaaagaacttccctaaagttaaagaatttaagcgctttattgacgatgttcgaagcgagctgataaaagctgatcgcagtgacaataacattgatgaagcctatgaagaattcgagcgcttattcaaactggatatggtgaaaaactttgccaatctccagcaacaagtacaagttgtaaaagatgcttattacaagttagttaagacagcatctataggtatgagtcacgagtacaaggtcctgagcggtaaaatcgaggctgcttttcgtgaacttaagaactaccccgcggcgccgaaccgatttaatcagcaaaagcttgatgccttaaaagcctacgcagaaaaacgagtagttggtgaaccagtacttgagttcagcattagctgctcaaatagtggtttttctctctccgatattttgaattacacagctcaagcaccgctaaaagatagcgagctgcttatcgtgcaaagtagttttatcacagaagagccacagcccgagcctgtacccacaccgcagcctacacctaatcgtggtcccgatggtggagagcctgcaccggacccgactccagttccaacaccagcaccgaaacaaccccgcaaagttgcttttaaagtttctagtaaagtgatgacagtgcaagagtataaaaccttgctgactactcagctaacggcgcttgctgcggccaagcccgatgaagaaatcgaactaactatagatattaatagcgaaggactgtaa

SEQ ID NO: 300045 - DNA, 549 bp, Proteus mirabilis
atgccctttatagctgatcacaaacaaaagtttgctgacctagactttaatattgaaaaccaagatcagcttcgtcggcaagccaatggtggtaacagtatattgttttcctattgtccaggtgaggaaaatttatacattgacaaagcgagagatatttatgaagagaaagcggaattcatagatatcagccaattacttgtcagatttatagattccgatggctgggatgctttctccgagtactacagagatttcattaacactccacatgttgttttcaaatctgacgatccagaacaagacctttttgacatgattatttcagccattaaacaggcttgtgaaaaggataagattccatttcttattcgaagtggttgcttgtatggcacgggtatagagaatgtaaacataatggagcacaaagatgttatgcagctaaagcatccacttgtcattttctatccatcgaaaatatcagaagacaacattttattcttgaattttagaccagcatcaaagtatcgctgtacgttagtgaaatag

SEQ ID NO: 300046 - DNA, 801 bp, Proteus mirabilis
atgaaagatttaatagagaaaatgagtgttcaagattataacactgcaattaaagatattgcgggcctgaaagactatacgcttgttttcaatataattagcgcctatttttgtgagcctaatttgactgactcgaagataactgatgaaaatgagtttgacattagaacttcaaaaactcgtaataaagtaagttgggcgattaataaggcgattctaaagtttataaatcaagatcatgagcttttaattaaaaaaatttatctttcagatgcgcctttaatagataagaagttttgctttttatggcacctatgtctaaataatcggttgttcagagaagtcacaacacaagtgttcagtaaagtgtatttcacaggaagagcacagatttcacaggacgacatcattgcctttctaaaagataaaatgtcttcagagggtcctgattttccgcaatggtcagaagatactttatatagagttgctacaaagtacctcagtttaatgaccaagtttgactttgtaacggtagggcgggtgaagtctttcaatcatattcgcccaacacctgaggcattagtgcttttcgtatatttctctaatttattctcacctgagataaaaagcatttttgagcatgaattgctccctgcaagttttatagccaaagaagatattcaagaccgattcaaaaagctttcaatgaaaggcttctttgacatgagtttcaatggtgtagcgctcaatgtcgaattaactcatacctataaggatatatgcgatgccctttatagctga

SEQ ID NO: 300047 - DNA, 921 bp, Proteus mirabilis
atgacaaatgatggtctgaaacaaacggtagtggcgaagtcagataggctttcgcagatagcgcagttgccacaagcaaccagggatcgcattgcccacatcgatttcaccttattatttaagggagaggcggtacgggcggatttagtcgatcgcttcagcattgctgccgcacaagcaacgaaagacttcacaatgtaccgagagcttgcaccaagcaacattgagtatgaccaaaagctaaagttgcataagcgcggtggagcatttgaacccctgttcgagtacgacgttgtgagaacgctggcgacgattagccaagggtacggagatggcttcactggaaaggtaaaaccacccctggcttgtgaagcgccttatcaccttaacaagccgagtttatcgatagtagcgaaagtcaccgaggccatacacaaaggcaaagccttgagcatcacctatgtgtcgttatcgagcggtgaaacaacgcgtgaaattgtaccgcatacgctggtggacaatggcctgcgttggcatgttcgtggttttgaccgcaagcataatgagttccgtgactttgtactgaccagaattaaagcagcggttgtgattgaagattccactttgtctgaagcggagctcgaaagccaggataggcaatggaaccgatttgtggagcttgagttagtgccgcatccacgtattgagcacagcgaagcgattgaactggattatggcatggcgggtggcgttctaaaggttgagattagagctgcaatcgctgggtatttgcttcgccaatggcatgtggattgttcaaaaaaatccgaattagagccaagagattttcaactagcgctgaaaaatctaggtgccttatatggtgtgggtaatttaaaaatagcacctggttatgagtaa

SEQ ID NO: 300048 - DNA, 300 bp, Proteus mirabilis
atgtaccaagacacctacattgaatactggggcgaaatcttcgtctctgcccgcatcattgaatttggcatcacgttcgagcgctttcttaaagatccatggaagcatttgatgtcctgtggccaagaatctgcaccggacgcgattgctgaagggatgctgccattgctaccagcccaggcagaagttgccaggcgcattcgggagagtgagcaacgagccctactgtctacagagtcggacaaaggggtatctcatcgcggtaacatcgtggtgccactggttcgggtagcgcattga

SEQ ID NO: 300049 - DNA, 909 bp, Proteus mirabilis
atgacaagagcccctgcgccatttccgctagagcgcctcgcggatatcccagaaagaccagaagattttagattgctggagcgtattccattaacgcgtgagccgcagtcctggccacttgaattctctcctttggtcggtgatgaacaaccgatggtgctgctcgatacagagacaaccggactgtctgccgatgatgagtccattattgagcttggtatggttaaggtgctttacagcccctctgctaagcagattgtgtcgattgttgatgtgatcagcttgtatgaagatcccggcaagccaatccccgagctgattaccgagttaaccggtatcactgatgagatggtgcaaggccagcacattgatgattcactggtagcgagttggttatccgatgatccgctggtggttgcacacaatgcacagtttgatcgtcctttctttgaaaagcggtttgctgcattaggccatctatcttgggcctgttcagccagtggcatagattggaaggcactgggttttgaaagtcgaaagcttgagtacctgctgcttcgcttaggttggttttatgaaggacaccgagctgcaaccgattgtttggcgatggcctggttgttccatttgttgcccgagtccgttgcaaacttgttgtctgaagcggacaggcgaactgtgttagttcgtgcgtttggtgcgccgtttgacgtaaaggactatttaaaagagcgcggttaccgctggcatgacggtgttaaaggtgccaacaaacattggtggcgcgaaatcagcgaagacgagttgccgcaggaacaaacttacctggatgatttgtatcatcgtggctcagaacatgcccactatgactacaaagatgcccgcaatcgatttaaagctttgtcatag

SEQ ID NO: 300050 - DNA, 450 bp, Proteus mirabilis
atgagtgtctcgctgataggccgtagcggcgcacttgccttcatcaaagccaagcgccttcgtattccattgttcatggaacgtgtttctgctggttttccctcaccagcgcaggattatgttgagcaaacgctcgaccttaacgagctttgcatcaaacgaccggctgcaacgttctttgtgcgtgttgaaggtgattctatgattgatgccgggattcacccagatgatattctggtggttgatcgctctgtccaagcagaacacggtgacattgtcatcgctggtatccatggtgaactcacggtaaaggagcttcaactaaggccgtgcgtcatgctgatcccaagaaaccaggtgtatgagcccattcatattcctgaagggacagagttagagatatttggtgtggtcaccaatgtggtgcgaaacatgcgccgcaagtcgtga

SEQ ID NO: 300051 - DNA, 1269 bp, Proteus mirabilis
atgcctgtatttgccttggtggactgcaacaatttttacgccagttgtgagaagctgtttcgtcctgatttaaaagatacgccggttgtggtgctgtctaacaatgacggctgcgtggttgcacgctcacgtgaagctaagttactcggtataaaaatgggcgtacccgtctttcagatcaaagctgaaatgcagcgccatggcattttggcattctcgtccaattacgcgctgtacgcagatttgagcagtcgagtgatgcgcactttggaggaaatggcaccacgagtagaggtttactccattgacgaagcgtttttagatttaaccggtatagagtctgccatatctcttgtcgagttcggacaacaagtgcgagagcgcataggccactggattgggatcaccgtctgtgtaggcattgcaccgacaaaaacactcgccaaactggcaaaccatgccgccaaaaagtatccagccactcagggggttgtagacctgaccaatccagatcggcaacgtcgattgctcgcattagtcccggttgatgatgtttggggcgttggtagacggctttctaagcgtttaaatgcgttgggtatcaccacagccttagacctagccaatgcctctcctagagccatcagagaccagttctcggtggttttagaaagaaccgtcagagaactcaatggtgagtcgtgcattgaacttgaagagatcccgccaactaagaaacaaattgtctgtagccgttcatttggcgtaaaagtaacgcaatttgaattgttacgtgaggccgtatgtgaatacgcaacccgcgccactgagaagcttcgcaaagaacagcagcaagccaaagtgatgaccgtattcatacgtaccagcccctttaaggacaacgagccgcagtacagtaactcgacatcgggcgagttgttgatacccagttgcgatacgcgggattttatcgagctggccaatcacttactcaagcgaatttggaaggatggttttcgttatgccaaagcgggcgtcatgctgtctgacttttacgatccaggcatgtttcaaccaggactattcgatgacgtatcgacccgctctaatagccagcagttaatgtcagtattggacaccattaaccaaagtggtgccggaaaggttttctttgctggacaaggtacgaagaaagattggtcaatgaagcgagagcatttgtctcccgcctacacaacacgctgggaccagttgccgcgagtgaagtag

SEQ ID NO: 300052 - DNA, 426 bp, Proteus mirabilis
ttggtagaaatcgtcaatgaacaatggaaagcagaggtatcagatttacttcagcaagaaacagacaggctaaaagcgctggcacgagctgaagttgatgacttttgggttacccattacaaggttcgtgaaaatgagccatttaaagattgggggctgcttggtgtccgtatcagagactttaagtatggctttggcatagagtggtacatcaacagttttcacggtcaacgaggcaagcgcgtggtctttagcaagggactgcgtatttcaaagacgaagctgagatactcatttttagactgccaaggtctggccaaagaatgggagttagcgctggctatggagaaagaagaattcttcagtgatgttcgacgccaggttgataagctcaacatgctgcgtcgcagagtgaatgcgtattga

SEQ ID NO: 300053 - DNA, 975 bp, Proteus mirabilis
atgtttgtactaggcgtagatatcggttactcaaacctgaagctggcaattggccaatcaggcagtgaaccgaaaaccattattctgcctgcgggtgccggtcctgcggatcgtatgccggagcgtatcggtggaggcgatgatgaaacttgtttgtatgtgtcagtcgataatgagcgttgggccgctggtgttcctgctggacgccttcaaggctgggaacgagagcttcacccggaatatcccaccacaaaaacctataaggcactttttcatgccgccttgttaatggctgaaacagaatccatcgatttggttgttactggattaccggtttcccagtttaatgaaccacaacgtaagtcagaccttgtgaagcgtttaaaaggtgtccatcaagtaacgcctaagcgcagcatcaccgttcatgacgtcaaagtgctgccgcagcctgccggtgcctatatggatctggttcaaacaggtggagatttgggcttgattgaagaaggtcgcgtcgtcgtcatagatcccggctttttttctgttgactgggttgcccttgaggccggagaaattcgctacagctcatcaggaaccagtcttcaggcaatgtccgtgctactggaaaccattgataagctgatttcggaagatcacggtgccaaagtaggtatggatcgacttgaaaaagccatgagaaccggcgacttgcaggtgctgctatttggagaaaaggtcgatatttcaccttatctaaatgctgccatgaaaaaggtagcgcctgttgctcttacagccatgcgccaatccatgcgtgacgaaagcatcaatgcggacttggtattgatcgccggaggtggagccatggcttataaggaagcggccaaggagattttttcacgaagcaagatcatcgtgccggaacagtctgttttggcgaacgtccgaggcttctggttttatggggcatga

SEQ ID NO: 300054 - DNA, 276 bp, Proteus mirabilis
atgatcatgagagttgtcgtcaacattcccccagggagccaccctgaactgctcaaagaattggaaaagacgccaccacgggaacgtgctgagcgtctgcggatgctggccacctttggcttaattcacatgagccaacccaatctatccacgacatctgtaccggtggatggccatgcaccagaagttgaaattacttctgtgagtacagcgccagaacccaaagcagaatcacgtaaacaatcattaaaatcaaaactagggctgggcttataa

SEQ ID NO: 300055 - DNA, 1242 bp, Proteus mirabilis
atggcgttatcagttagctggctcgatgccaggttaaataaagaagcaaaagaaaccgtagtaaaagctgaccgagacgggctaagtgctcgggtatcgcccaagggcaaaattgtttttcagtttcgttatcgtttcgatggcaagcaacagcgggtagacataggtacttacccacttatgaagcttgctgaagccaggaatgagctggataggttaagggcggtactcgaccagggcagaaaccccaagctctacctacagcaggaacgggccaagtattctgccaatcaaagcttcgaatcgatttttcgagactggatagactctgccggtaagcaagggctaaaggagaaaacgtggcactaccaaaaacgcagcagtgaaatatatttgctgccccgacttggcaagtacccattaactgacatcaatgaattgtccttgcgaaactgtcttcgtgaggtttcggagtcgtccccttcaaacacagaacgtctggtgtctgtgctgcacaagttttatgactggctgattgatgaacaaattttggaaattaacgccgccgctgggatcacagcaaaaaaggttggcggtaagaaaggcaaacgaactcgggtgctaaatgacaacgagatcaggatactttggcgctatttgcatgagtcaaaaatcactgagaagaatcgcatctacataaaactgcttctcttattgggagggcgcaagggcgaactcattcaagctgaaaagcatcactttgacttgcaatctgcaatgtggacagtgcctatagagatccgtaaacaaggtgagaaaattggagcgccaatcatgcggccattgattaggcctgctattgagctgattgaactagcgatgcagatgagcaaatcaacttacttgtttcccgcgaacggacaagaagagcttgccacaaatggctttgataccactattcctaacaatgtgaaaatctgggctcgcaggtcgcttggtattgagatggaacactggtctatgcatgatcttcgcagaacgatgcgaacgcgaatgtctgccatcacgacgcaagaagttgccgagttgatgattggccacagcaaaaaagggttggatgctatctacaaccaatatcagtacctggatgaaatgcgtcatgcttacgacgtttggtatcaacagctagagaccatcatcgagccgacaggctttccattcaactggcgtttcggacaataa

SEQ ID NO: 300056 - DNA, 195 bp, Proteus mirabilis
atgacagcagtagctcaccaagtaaccccttttctaacgtcttacgaagtgatggctcgttaccacattagctatacgacgctttggcgaagaataaaagatggcagcttgccgcaacctcgtatcaaccgaaatacacgaaacaagctgtggcacattgaagacctagaagagtatgagaagaaagaggactga

SEQ ID NO: 300057 - DNA, 726 bp, Proteus mirabilis
gtgtctaagcaacttgttgccattttagaaagcatgaaaaatgatattaatgagcaatataataataccttaaaaataaaaaacatgatttatgattttagaatagaaattgtgggaggtgaaaatagtaaaggtaatatatgtcattcaatttattatgatatcattaataaaaagaaatatattaatgatttttttgataatagtgatgactcactaaatgaacagagaattttattagaaaatgaaattgaaatattaaaaaaagagtatcaacacttcgtgaaactcgcctttacggggttagcattcggtattattggtgtgatcattactggagggatctttggttcaaaagctgaaaaaatccgtaaaaaaagaaatgaaacaatagagaaactacataatatcaataaaggaataaaacaacaatcaactatttctgagtgtttacaacgttttcaagtcgatttagacgaaatagaacaatttattgaagatgctgatatgtctgtggagcatcttctttatatgtggcaaacaattttaactgaaattaatgcttcattaattaattttaaaaaaattgataatgcaatggagttaattagatttagtatttatttagaaaaaatcattgcaccttggtatatggtggtcggttactcaaaggaaatgatggcggtatttgatgaagctttatcctctttttattcatctaaataa

SEQ ID NO: 300058 - DNA, 579 bp, Proteus mirabilis
atgttagacattaataaaaataatttatctcagctaacagagaaactcgttaaaaagcagtgtactttaatgagtatcattgccatgctgggattacttgcgggtattatctgtattattaaccctttttcttcaggggtcgtggtcagtgttttcctcggtgtggtgttttttgcttgtgcaataaccagcataatggcggcctttaatagccggatctcttctggttggtcgatgttaattactttacttgctggttttatctatctatttttaggttatatttttattaccgatcctttaaatggcatgttaagccttgcatttattatcggttatttatttatctttgcaggaatactccgcttagtcctcggctttaagcaaattaaagatagcttttatggctggtttaatattttagtgggctttttagatcttgttttagcctatttcttactagcttttggccctgaaacttctataacactggtgatggcattaattggtatacaacttattttaagttctataactattctatcaatagccagtgcaatcaagcggatgactcgttaa

SEQ ID NO: 300059 - DNA, 204 bp, Proteus mirabilis
gtgcttaccggctcttctattgctaaacaaacccaagggattgcctgtgtaggtgatcctgtttattgccctgcgtgtaaaaaaacaggcactattattgaaggggataatttaatgaaaattaaaggtatccctgtcgcccttgaaggacataaagtcgcttgtggctgttcagatggctgtatactcgttgcaacagattaa

SEQ ID NO: 300060 - DNA, 939 bp, Proteus mirabilis
atgagtatttttttcaatcccgctaaacacccacatcgcttaaagcctcaaccattgggggagcaaggtgagcgctataacgaagattggcccatgcctgagctcgattttttagagaccgtagataaacaacagtgcattctggttgataaagaaatacgccgacgtgatgcgtttgctttccctgggtttattaccggaattattgtctttattatggtatttcattttgtttttatggaccactataatcaatatacaacttttaaagacgatattccttattatgaaaaaaaatatggtaacttatatttggaaaacccaaacgatcctaaaatacctccttttgttaaaaatgaatattcccttttcttctatcaagacagtgtgacaattctagattactttaatgcttattatagtcgatatattacatcaacaccctatcaagacacgctattttttcttactatgttcatcatgtctttcgtcttacttggcttgggtggctatcaatcttttttcaaaaaaaatccaatactcgtttttaatcgtgaaagaaatctggtttatacttggcgcaaaaataaggtatttattgcccgctatcctgaaattggtatcggtaaaattggtaaaacacttacctttcaattattcgggttagataagtcaaaacaaactttagtttctgaattatttttccctaatgtctatgtttattcagtgtacaataccagtactgactatcacgaccagcgcttcattaattttatcaatacttatatgcgcgaagggcgtgatgccattattccattcgattatcaccgtaaaaaacccaaagtgtattttggcaaaaatccacttcctgctgattttgagcaacaggtcgaacaaattttagcaaagcttgatcaggagaaagaacaccatgcgtag

SEQ ID NO: 300061 - DNA, 927 bp, Proteus mirabilis
atgagtaatccttttacagtatcacaacaccctgaacagctagagacctcccctttaatagatgaatgccatcactatgatgaccctttaccgccaaaagatctgatttttttacaaagtataaatgaacacacatgtaaaattaaatcagcgcaagtaaatagtagattatcaaacatatttccaatgtttttagtaatatttatgttaatgttttatacattgtttattttttatgagaatcatagtgctaaaagatttacttttgaagaaaacgttcaaaatatagagtcagaatatggaaactctcaaaacttaactactttttataaagagttagtggaggaatatagaccttattttggtaaaaaacaaataggatggctagaatatttattctattattataatgatgacatatataaacgtgatgactttaaaataacaaccttgattggttggctaatttttttccctggctcgttatatatcttaagctcccttgctttctttgtgccaatgacctatttggtggctgatagaaaacgacagatcttatattcttatgtagatggcattgtgatggcaacccgttataaagatgctcaattcggttatgccggtaaaatgttagcatttaaattattctatatacatcctgaaactggtgagctaggaatacatatatatcgtcccaatgtctctcattacacaggttttttattaagtagtgatactgaagatcaccgctttattacttttcttaatgcctatatgcaacaagggcgtgatgcagtctgcacaagtgactattatgcacgagcaccactattctgctttgcgaaaaaccctcttcctgctgattttgagcaacaggtcgaacagattttgacaaagtttgatcaggagaaagaacatcatgcgtag

SEQ ID NO: 300062 - DNA, 141 bp, Proteus mirabilis
atgcctaccattattcttataggtgattcggatacagaccatgatcatcatggccctaccaacgtcatcacaggttcatcaacggtaaacttgttgcttgagcaaaagctcccattagttgataatgtaggtatgaaatga

SEQ ID NO: 300063 - DNA, 675 bp, Proteus mirabilis
atgataaaagattataagcgttggatagtcttacttttagtatcaagtatgctgtttctaattgttgttgatgttaccgtactttataccgcactaccgcgtttaactcatgatctcaatgcgagcgcctcagaaaaactatggatcatgaatgcctatccgctgattgtcgcagggctgttgccagcagcaggtatgcttactgatagaataggccataagacgttatttattagcggattacccctttttgccatcgcctcattatgcgcggcttattcccctagcgccaccagcttaattatttctcgtggtttcttggccgtcggtgctgctatgagcatgcctgcaacgttgtctattgtgagacaagtatttactcatccacaagagcgtgccgtcgccatcggtatttggtctgctgttgcttctggtggcgcggcattagggcctttaattggtggattgctattaaaccatttctggtggggctcagtctttttgatcaatgtccctattgtactacttgtgcttcctttctcgatttggctaattcctcacttttcgggacaacggcagcataaaattgattatttaagctcaatacttattttgattggcttagtcagcgctatttataccttaaaagagataggtaaggcttatacacaatga

SEQ ID NO: 300064 - DNA, 447 bp, Proteus mirabilis
atggaacaaggttctcctttaagttttaatattccagaacttcctagtatatctaaactttgctctagggacaatttcaataataaactatggataacacacgatagcgtagggaaaagtttaacattcgaggaaataatagataatttttccatatgggaggataaagcaattacccaagttgtacacttggaatatgattcaaaaaatacagactttataataactcatcttgatcatgaatatatattttataccttagatgaatatgacgaaaagcttaataactactctaaaaaaggacacaccaagataaagtcattcaagattgataaagctagaattccattttactacaaatatgaaaatgaatattttttatatcagatttttgatgcttacttgaaaaataagaatttaatttccgaatattttaatgacatttaa

SEQ ID NO: 300065 - DNA, 810 bp, Proteus mirabilis
gtggatacagttaataatattttatcaaattccgcgctgggtacagtgattgggatcattggtattcttatagccatttttatttatgttttaactcgtaaagtttataaaatttctagctgccatgaattttcaaacctcataaataaaaaccactcgagcctaccacagcaaataagtgtaatgtatgatggctcattagtagaaagtgtatcttcttctgaatttgttatttggaattcgggtaactctgttataacaaaaagtgcattagctactaaagaacctctaagaattgaatttagcaggaaaattcaattattgcgttatcaagtcgtagcatcaaacaatcctattaataatatagagctaaagactgacagcgaatatcctaattgtattcttattgattttgattttattgaaaaaaatgaaggtgctagaatagaaattctccatactggagataaaaacgatgttagggagaaaggaaaactaatcggtgtaaaatctatctttagtaaacagaaaaaactatcaagaaaaaagaaaaaatcccaaacaacttttagtaaaaaagcattagatgtaattcttttattgttgtcactattgtttccaataatgatctcattaatgattatttactcattcgcctctccagaggcttttatttctacaccccgccccgttagagatagtagttctccatgggtgatgcgtattatgggcttctccgtgatatgtgtatttatttttcaatatattatccatcgtcccccttacccatcaagtttaaaaaagccttaa

SEQ ID NO: 300066 - DNA, 210 bp, Proteus mirabilis
atgaattacgacatcaattacgatggaatgggccaaccaattaaattgaggatatttatagaaaaatcattgaaaaacccatctacaattaaaaccgaattatctagaggtggaattgaatatagattacctaataggcaaggtgttcgatataatgcagatggttctttttctggttatcttgatcctaaaagaggtaataactcatga

SEQ ID NO: 300067 - DNA, 177 bp, Proteus mirabilis
gtgattaaatcgaaatattataatttatatgcagatgtttattttaacaatgattattatattatagtaactatttctgggtgttatatccattttacggactttaaatatggatataagattttatctaatgatatcactaatgctgagttaggttattattcaaaaattttttaa

SEQ ID NO: 300068 - DNA, 5409 bp, Proteus mirabilis
atgcataaaaaggatatttcgcgaaaacagcgtttaataagctattgtgttatttatttaaccgctatttacccattgcatcctgcttggggctctgtcattacttcatctgataaaacgataacaataaatcagcaaaataatattcctattattaatattgcaacacctaatgacagtggtgtttctcataatagatttaatgtctttaatgttaataaacagggggcagtacttaataattcgcaagttgatgccaatagtcaattagcaaaaaaaatatctgctaataaaaatttaaaaggtaatacggctaatttaattattaatgaagttgtcggtaatagtcgttcacagttattaggtaaattagaagttgcaggacaacaagcggatgttttaattgctaatcctaatggaattagttgtgatggttgctcatttattaatactccatcaattactctcacgacgggaaagcctcaatttagccctcaaggtacctattcggcactagaagtaaaaaaaggcagtattgttattggtaagcaaggtatgaatgccgatttgcaaaattatgccgatattattagtcgtagtattgaaataaatggaaagataaatgctaaaaatctctctttaatgcaagggaataaccatattgatttcggcaaagggacagtaaatagcattaatggagaaggtgtaaaaccgaccgtcgctattgatacaaaagcattgggtggaatgtatgccaatcaaatacgcttagttagcacagaaaaaggggtcggtgttaatttaactgatattcaaacaaaacaaaatagtatcaatttaacagttgatggcaaaattacctttaatggcaatattcaatctgagcaagatattaatgttagtagcaaagcgctacaaatgaatagtaatgccagcttaaaagcgcaaagagatattacattagcaactaatacgctaacgaatcatagtgatattatcgcagaaaaggatatgcgtttattcgtagataaattcactaataaaggtgaaaaagcgcttattcaagcaaaagataatttatggatacaaaaaaatgcacagggtgaaccaagtagtttaattgaaaatcaatcagccaccataaaaacagaaaagggtgatttgattattagaaccaagaaattggttaatgaatctattactcctttatttaaagaaataaagcaagagcctgattctacatcgtctataaatataggtactcattttcttcatccttacaatagtcctacgaataatttccttataattattttacttgctgaattaaaagaactctctgataaaaagtggtttgatatattagatttaaaaaataatggaggtgttaatgtagaacgctcattatttgaaaagaataaaaagtatgttcctagtgttatttattctggtaaaaatttatatatacaatctaacgagttttttaatacccaatctgatatttttgcaactaatgatcttatcgcaacaggaaacaatgcaaaagtatactattatcggtttggacaccttaataaatgggatctttattctcatgataatgctcatattttttatcgagatgatgtaaataaatataatattgatgaaactaaatttcaaaaaatagttcattttattccctttactaaaactggaagtcattatgaatttattgtagatagtgcttctgaatatatgataaaagcaggtaataatttagttttagattttaaagatagtatagcgttagaacgtaaatttccatttttagaaaaagaaattaaaaagtatagaagaatatctgattttgaaagtactatattagctaaaaatatactattaaatgctaataatttaaatatctcattaaatttaaaatcaagtaactctttatctgttattgctaataaaaatataaatataagtaattcaaatttattatctggtgatattataaatttaacagcaattgataatgttaattctgaaaatatagatgtaacggcaaagcatttttccatcataactaagaatggagatattaattattcatttagccctatagcctcttatactctgaatagcattaaggcaccatttattgatgtgtctgaaaaaatagacttttattcaggtaaaaacatttacatttcaaatgtaataattaatgaatcaaatgaaaaaagtttatcagcattagagaatattaaaataaaacgcgatgagtctttatttttcaacctaatgccaaattttagagatgaacaatatatttcagcgtttttatttaatatggggctttggaaaagtaagaataatataagcttgatggctggtaaagatattgttagtcagggaataaaatattatagtaacaaagaaataacttttaatgcaggacaagatatttttcttgcctccaaattaataaaagaagccgctccttttttcagtgatattcattacccccaactacaatctaaattattttcagataataaccttattttaaatgccgcgcgtgatattgatttaagttcaacagtattaaattcaaaagataaagttattgtattagcgggtagaaatataaaactgggtgcaaatgcttattccgccatcaaagatccccacgaagatgcgcaagacattcaatatgccaccacatccattatgggaaataaaggtatttctattgcatcatcaggctcactcacaacagaaggaaattcacttaaatcagagggggatattgctatttccagtggtggcaatatccaattgggatcagtaagaacacattttcgtaaagagtcggactcagagttagaagaacttcgtaaacaagtcagtactgaaattaatagcggtaatcatctaacactattatctgagggcagtattttatttcaggcctctcaattggctgctaataaaaagatggatattgctgctaaaggtggatttctttatgcacaggcaatggaagaatccagttactatgaagaagaaaagaaaaaatgtaattggtggacactgtgtgcgactaaaaagaaatataccaaaacatttaataacacaacgaataaagttaccgagtttattgctaatgacgatattaatttaattgctaaagatgatatcactttagaagcaagcaaattagagacagcaaagaatgccaaattaaccagtaaaacaggaggcattaattttaaagcggtgaaagatactgcttttaaacaagttattactcgttcaaaagatatatatatcactcaacgtaatcagggatacaccaagggaacatggctattacctgaactctatattggcggaaagctgactatcgatgcgccaaaaggcatatctgcagatattaaagccaaaaaagagcaatctttagagcaggcattaactgccttaagtaacacaccagaatatgcttggcttaatgcgctccaaggtcaagaaaatattaattggaatttagtgaaagacacttattccagttgggatgataaaacccagcagttaaatccagttgttggtgcggttattgccatcgcggtaggggttgcaacttatggtacggcaacagctgcctcaataggaggaatggcaagtaatgccactattgctgcaggagcctctgcgggggttgcgtcaacggcatcagttgcggcacaagccggttttgcttctttagtttcgcaagctgcggtctctttagccgaaaatcaaggcaatatttctaaaacatttggcgccttaagtcgcagtgatacggtgaaatccattgtcaccagtatggccgttgcaggcgccttgcaaggtcttgaccaatttatgggttgggatcaagcaatacaggggggaacattaccgacaacaggcaagttgcttgcgacggataatgccacatggactcaagttgctcaacgcgttgcctcacagtcagtagtgagttctacactgggcacagccattcaaggtggcagttttattgataattttaaaactgcgttattaagccatatcggcagtcaatttcacgctgaaggtgccaatctcattggtgataacggtgcgatattagggcatgcaggaaaggttttaagccattctgttgttgcaggagtgagcgctgaaattgcaggaggcagtgtaacaggtgcagtagccggcgccttggcagcagaaatagcggcaatatcgctacaaagtaaattatttgagcctagttatttaaatgaaactgacagacaagttgcattaattcaagaggcactacatggcaatgaaggaaaaacacagctcactaaattaattggtgcactgacaggcgctattgtgactcgtaagcctgagggcgtattttctgcggctaattctgcggagttagtttatcgacataattacagcgaacatatgctttcaaagctagcactagaaaataataaggacataattgcagcgtcaaaaggtgatgttgcagcagcagaaagagttgtaaatcgacaaaatgcagggatgattgcgattgctcttggtttaggaggaagtgcgagcattattggtggtcacactgttattgcagcaacaccagaacttattgctattacgcaagctgcatttagtacatgtaaagctaattgggtttattgtgctaatcagctaggtattaatattgctgggatatcagctccagaagctgcaatcgctggtgtcaccgttggtactggttataaagtattagctagttcagaagaaagtgctaaagctttctctagcatgttagctaatagttcaaagtctttaatgacttcaggaaaattaaatataactgctataaaaccgatagtagaacaagaaaaattattaataactaccaacaaaaaagctattgaaataatcaataacggggagtttataatatattcaggagtaactacgaatggatataaagtatctaatggagccaaaaccgtagtttttaaaaatgaattagaacatcctattgttcaatctaggattaatattaaagtgggagatgttgaatcaggttggttgcatgtacaaaaacgtcatttttcaggagcgcaaaatgctagccaatttacgcttagtgaacaggaaattaaagatatattattaagtcctgctgtcattaagattcctattaataaaacgagagaatcatataataaaaacaccaatagtattgatattttgtatgaaagagtgattcagcttgataaaaatataggaattgataaatttagtaaacagccaactaacataattactatgctcacagataaaaatggaaatttaataactactacccctggggaaataaagtga

SEQ ID NO: 300069 - DNA, 1365 bp, Proteus mirabilis
atgacaactatttttaaaaccccctttgcaacacaaggggataaggcttctatacctgtagaaatccaaccagacggctcagtgtcttatacacaaggttatggttacgactatgagcgtgaccaagtcacagatcctgctgcgaaagatattgaacgtgaaaaaatgaacgggatatttcacgatatcacggaagcgattggcgaaattcagcgatttggttttcccaaatgggatgaagccggtaagccgtatgcgatacgcactattgtgtatcataaaaataaagtctggcagtctaaagttgagaataacaatattgagccggttgccggtaatgcatgggcagagttgaaagcggatgccacagcaagtgatgtgggcgcatattcaaaaggggaatccgataaacgctttcaaccattaggtaattacacaccatctggttatagctactcaaaggcagaaaccgacaccaaatatcagccaaagggtaattatgcgccagcagggaactatgccaataaaggggatagttataccaaaacggaaagtgacggcagatatcaagcgaaagggagttaccagccatcaggtgattatgcgactaactcagcgctcaatagtggactgaataataaatttgataaaggtaatgtagctcaaagtacgggaacgtcaacggttcatgtgatgagccagaaagcttctacagatgcttttcaacctaagggaaattatcagcctaaaggcaattacgcgttagtgggtgcttcatatacgaagacggaatcggatggtcgatatcaagctaaagggagctatgcaacggctggaagtagctacacaaaagcggaaagtgacgggcgttatcaacctaagggaaattaccaaccagcgggtaattatgcgctagtaggcgcatcatatactaaggcagagtctgacagtaaataccagcctaaaggaaattatgcccctgctgggaactatgttccttccgcacgtaaaattaacaacaaacaattaagtaacgatataaatttaactgcaaacgatgtgggtgctttgggaagtaatcaagcactgggttttgggcaagactatcaagatgtcacttctagtcgtgcaatcaataccgattacaagaatgatacgaatagacctattatgatttcaattacaggacgttcaaatggtactcatcactcttattttaaagtaaatggcaaggttgccgcagtggttggcggaagtgatactattgccattgataggaatttttttgcaattgttaagccgggtgcaacatacagaatggagagtagtaaattttcatttgtttattggggggaattaaaataa

SEQ ID NO: 300070 - DNA, 318 bp, Proteus mirabilis
atgaaagtcatacccttaaaagctattccaaaccaacgcttatccgtcaatttggaaggtgttaattggacgttgacaataaaagccggtcgccatgcgatgtatctcgatattgaacgagaaagtgaggttatcgccgtcggcatgcgtgcggtggcaaacacacctatcattccttatcgctacctgactgatggtacaaatttagcgtttataacagaaaatgatgatctgccctggtatgaatcatttgatagaacccaatcattaattatttggagtgatgatggacttacgacgaatacgggtggggattga

SEQ ID NO: 300071 - DNA, 687 bp, Proteus mirabilis
atgaaaaaatttctgattatcgctctgtctgcaatgcttttatctggttgcaaagtagatatgagtactaaaattaatactgatgatttactctcagatcagcataaattaattagtggaaatttatctattgaagttccttcttgcaatgattttgaggactcaagaaaagattcccaaatgctggtggatttaaaggaaaaaataccaacagtatttagaaatgctgaatttaaagaatgttataagcaaaaatttaattcatttgccaacttcgaaatccctattggaataggttcatttagaggggaatataaatctgtcgatactgatatttatatagtctcaacagacgatgtatatgtcggagctattatgggtaaggatgttatatcacgaatgaattctttgaaaaaagaaatgcccacagatttaaatatcgaactgacattaaatatagaaaaaggtaaacagccgattcctaatgttgcattattaggctcttatatgacgggtgttgagagtaaaaattcaccaatcctaataagtaagattgccatagagtctaagagtattaaggttaaattgtcagatgtgtctaattctttattaacatcaggtaaagttacaccagtcctagtgagtagtggtttcttaaagatgatactcgctaatcttgaaaaatag

SEQ ID NO: 300072 - DNA, 477 bp, Proteus mirabilis
atgaataaaattaaagttttatttttatctttatttatttcgggttgtactgtacctgggttaacaagtcatacagatcatccattggagataaaagatataagtattggggatagcattgcatgtaatagtttaaagggtgaaatatttggaaatgtaagagtatgtcatcttgatattaagagctatggcggagtagaggttcaatcaagtacagttacattattgaatgaaaaagtagctattgttcgattatcattatctcaagtaacgggttttagccaaacaggcgtactgaatgctatggcaaagaaatttggccctccagcgagaggtgggcgtcctaaagtacatatttggacaaatagcggaaatacattatacctcgatgaaattaaaggaatcgttgttttatatggtgaagatttgaatcatgttcaaagcataatttcatctttagatgcaaatgatctctaa

SEQ ID NO: 300073 - DNA, 756 bp, Proteus mirabilis
atggctagtcttaatatctctgcatcaaatttaccatccattattcataacagcatgcctgtaattactacggatctacttgctgatgtatatgaaactgaaattcaaaacatcaaaacaaatcactcaagaaaccgagatagattcattgaaggaaaacatttttttaatttaaccggttcaattttaaaagattttaagaacagagttactttaagtaaccctgttggatataacagattaccgcctagacaggttgttggtaagaatgctcgtagcctaattctctggacagagcgtggtgctgcacgccatgctaaaatgttagataccgatcgtgcatgggatgtattcgaaattttagaagataactatttcactaaacataaatctaatactcgtatcggtacctcattaccaaacaacgcatcaacagaagaattactagcacttgtcgatcaactgcaacgcaccatccatgaaggtgagtttatccctgcggggcaagttgccaaagaatatagctttcctcgcactcgtaaaaatcgcatcgaattactggatgattttatgcgtaaccccaagaaagatgttttacacaatctcctcacatatctaaaaaaagacggtcacaacgtggatgaagcggaaagaacactgcgttgggttcgtgaatcactgttagaaatgaatggtgctatgcaagaaatccgcacacaccatcaatatgtagaaagtttgattagtcgattataa

SEQ ID NO: 300074 - DNA, 420 bp, Proteus mirabilis
atgtttggattatttagaaaaaaagaaaaaaatacctttgaagaagtacagcaaatggctaatgaccttggatttgtagttacaaatggtggtcaagtattggcatttatgggattgaaaagtgactatagtagttctgaggtattatctaatctattagtaatacacattgctaaacaaataacagaactacctttagataaattaattactgataatacaatgcatatgattgataattttgttgcctatataaacgatagatataaaaaccgtcacataaaaaaacacatatacgaaaatgatttcaacgctatcatcactatgatttctatggatgaagacggttttcgtcttgcaaaaaaaatagtagaacagaacaaaccaattagttattcagccctactatgtgcgttataa

SEQ ID NO: 300075 - DNA, 423 bp, Proteus mirabilis
atgaaaattaaaacctcaaaacttacaggtagagcgcttaactatgcagtagcgttagcagttggtggatatgaattaattccagtacctcctgatattgatggaaaaaatgaggggatggtattagctccagttggatatttagagagcggttatacatttccacctaaaggcgggctacgaattgattttttcgttaagcaatattcaagtgattggcgtgaatgtggcgagcttataaataactactggattgatttaatgtttgaggaagttgacggggttaattattgctatgcatcaccgccacatttaatgggtgattatgccactgctaatactgctcaagaagctatttgccgagcggttgttatgcttgggataggtaatgaagttgagatacctgaggagctattaaaatga

SEQ ID NO: 300076 - DNA, 1347 bp, Proteus mirabilis
atgcattctatacatttatgttcatttcgaattttgaaaaaacaaaaatctagcaaatcattttgtcttggtgaattaaatgatgatagtaacaaaaaagcttatgagttaatgaagactatttttgaaaacaatgtagggattcctatcgattatcccgaaactaaaactatagtttctatacctaaaaacccagcatttacacaaggctcaaaactcaataaagcagaacttaattatgatgatgttaatcgattaatttatggttatttaaatgttggccgctatggggaaaaatatactgtaagagaaaaatctttaacatctacaaatacaaaaaatattgaatataatgatgttgaagaaaagaaaagatatattcttatgtatttaccagatagtttagatacaggaataattgcttttcatgatacagaaagacttaatgcaaaaacatgttttaaaaaatttatagagtctaattttcaaaatcaatcaccacgactagaagctagagttagagctttattacataaagatattccatcaagaataaaagaagcagatgttgtagaaataaaagctgttggatttagatcaagtcaagatgatgctgatgcgatggcattagtcggcaatagacttacaggtgaatttgttataaaaaataatggattatcaatgggttctgtggttgattttattacgagaaataaaccgcaaacagatttaatcgagttattagaagaaaagagtgataaaatcaaaattacagcatctgttaatggccaagataaagtgtatactttgaataatattctatccaaaggtatatccatagcgataattacaaatcatattaattcattcactagtaatggtgaagcaaaggcacctttacaagatataatattccatttaataataccaattgttgcagcaatcattattactgtaattaatggagtaattccaaattcagttgttgggattttagtaaattttggagcaataacgacagcattattgatgagtgcagttgtgatggtttatgaccaaaaaacaaaattagttgaaaagaaagaaaaagaaacaattcaagacaaaattaaaacgttgaataaaaacataagtatttacaatgagttgtgcaacaatatttgttttgcaatactaacatctatattgactgttatcactgctttagttttatcgttttatacaaatacaactgaatacaaatggtttttttgtataataactatattttgttacatttcatttatttcaacaatcgtaacattttttatgatcttaaaaagatttggcataattttaaataattaa

SEQ ID NO: 300077 - DNA, 1251 bp, Proteus mirabilis
atgaacatcgtacatagactcaaacttgtttcattcctccaattttttatttggggctcttggcttgttacgtttgcttcatatctatttgataaattacattttaaaggtactgacgttgggctaatttttagtgctttaggattagcatcactgatcgcaccggtgatcatgggatttattgcggacaagataaataaccgtaagctggtctttattattctgcatattttatccgcgtttgctttagtgctgatgtcccaaatgaccacagtgactaccctcttctttgcgacacttctgcatttattgttctttatgccaagcatttctatggcaaacagtattatttttgagttactagaacaaaaacacctagagccaaatgactatttccccaaaatccgtgtttatggcaccgtgggttttattgctgcaatgtgggttattagcttcttaggtttcggtaatagctacgatcaactgtttgttgctgcaatagcctctattatcttagcggtatttgcgatgtttttaccggcgacaaaagcgacagataaaacagaagcaaaagaagaagtggccgcttttagcttatcgaataccttacaagtgtttaaaaagaaaaatgtggttattttccttttctttgccacattgttaggttcagtattgcaaattaccaatacatttggggttccattcttacaagatatggccaaagcacctaatgctgatgactctttcttggctcattatccttctgttttcttatccatttctcaaatttctgaagtggtctttattctatttttacccctgttattaaaacgagtgagaatagaaactatcgtattatttagtatgattgcatggatcttacgttttggtttcttcgcttacggtgactattcatcattaggccaaatcgttctgttgttatccatgattgtctatggttgtgccttcgatttctttaatatctccggctcgctattcctagaaaaagagatcccattacaatatcgctctaccgcacaaggtatgtttatgaccttagtgaatggttttggtacttatttaggtgcgatgctaagtggctgggttattgatttgtataccacagatggtgttattgattggcagtcattctggttgatctttacgggttacactgtagctatcaccgcactttatctgatttacttagtggttccgcagaagaaaacaaaagttgtagaagcacattaa

SEQ ID NO: 300078 - DNA, 747 bp, Proteus mirabilis
gtgttagaatcacgacgtttattaaactattcaggtgaggtgcttctgaatacgccatcacagctatcattaccactatctctgcccgatgatgagacattcgatagcttttacgcaggggaaaatgcatcactcgttgcagcgatccaaactgctattcaccaatcacatggcagttatatctatttctggtctcgtgatgggggcggaaaaagccacttgttgcatgcagcttgtgcagagctttctttagccggagatgcagttggttatgttcctcttgataaacgggcttatttcgtaccagatgtgcttgaaggtatggagcatctttcattagtttgtatcgataacgttcaatgtattgcgggtgatgaagagtgggaacttgctctgtttaatctgtataatcgcgtattagaacttggtcgcacctgtctattaatcacaggggatagacctccccgtcaaattgatttacaacttcctgatctcgcttctcgcctagattgggggcaaatttatcgcttacaaccgctaagcgatgaagaaaaaattcaagcactacaattaagagcgaaactgcgtggatttgaattacccgaagatgtgggtcgttttgtattaaagcgcttagatagaaaaatgcgcacattatttgaaatgctagatgaactcgatcatgcctctattgtggctcaacgtaagctgaccattcctttcgtaaaagatattcttaagctttaa

SEQ ID NO: 300079 - DNA, 468 bp, Proteus mirabilis
atgttctcttcaggaggccgtcgtatcaagcgtagtttctatattgatcaatcctctatttcatttgctacagaacagttagtgcaggagctaaaaaatactgcgccacttaaaaaaagcattgaagcgatgttagaaggtaaagaagaagagataggcgatattaatacttggttagaaaccaacggggtgaccaatctacaactttttagaaagtatatgttaaattggatcaaaatgcgtggtgatgtgaggccggatatgtatttggtgataagaacaatgccccccacaccaatgggattacccgttgaattatattgtttcactcgtgctaccacatgggtggaatatgaagagacgcaatcagaaatttttgagtatataaatgcttgtgctaagtattttaaattagatatttaccagcaaccctcaggtcacgatctctctaagataacgtttaaatag

SEQ ID NO: 300080 - DNA, 390 bp, Proteus mirabilis
atgtctaaatcggcaaaaggtacgacagaacggcatggacggaacgtaaaagctaaatctggtttaaaccgcgcaatactggagcagggctggtatgaaatgcgccgtcagcttgagtacaagcagctctggcgaggtggtcaggtactggcaataccccctgcctacaccagtcagaagtgcgcttactgtggtcatacagcaaaggaaaaccggcagtcacaaagtcaatttgagtgccttgaatgtggatatacagcgaatgctgatatcaacggggcacgtaacattttagcggcaggacatgccgtgcttgcctgtggagggagggtgcagtcagaccgcccgtcgaagcaggaacccgccgaggtgattcagacatcagtctga

SEQ ID NO: 300081 - DNA, 1098 bp, Proteus mirabilis
atgacttttaaacaggagcaacaaaaaagtctttatctaaagtcgaatggttattatttgatggtgtgttcgttttgtataagcgataacagcatctattgtcgtgttttacttattgttgtaaatgagcatgttatggatgacatcacttttgagtttcttattgagcagtatttttattataaattattacgccctacgacaatgagaagttaccgtaaggttcttcgcacatttgaagaattcacttcgttaaatcctgctcaagctgatcaattaaccgttttgcaatggagacacattgttttaggtgaacataagcgttcaagtagaacatggaataataaagtgtctcatatgcgggcattgtttaattttggaatggaacaagaattattacctcataaaaaaaatccttttaatggttcagtggttcgtgctggagctaaaaagaaaaaggttctgactaaatcgcagatggatgatatgtatcgtcgaatggcacattatctagaacttgaagaaaagcaaggttatggctatgtgtgtgacggacgaaaaaatgcattatatccagcttggttttggatgacggtaatgaatgtgtttcgttataccgctattcgtcaagggcaacttctgcatattaggttgagtgatattaatcttgaagagaagtggatacatttatgtgaggagggggctaaaaatcaccgtgaacatcgagtgccgattgtttctgcattatatccttcattagctcatttactgaaacaagcagagaaagcaggagcagagccgaatgatcaggcatttaatgttgggtggtttgatttaatgaaaagaaagaaacatccaaaaaagatgggagaatatccattacgctcatttttcaaacgattatcaacagaatgtaattttattatctcacctcaccgttttcgacatactgtcgcaacacatatgatgcaatcaccagagcgtaatctgtatgttgtgaaaaggctattagggcatgccagtattacatcgacattagaatacattgatgaaagtgttgataacttgcgagatatacttgaagcggaattgatgtga

SEQ ID NO: 300082 - DNA, 189 bp, Proteus mirabilis
atgcttattctaactcgtcgagttggtgaaacgcttatgataggcgatgatgtaaccgtaaccgttttaggggttaaaggtaatcaggtacgtattggcgtaaatgcccccaaagaagtatctgtccatcgtgaagagatctatcaacgaattcaggccgagaaaactcagcccacagataactactaa

SEQ ID NO: 300083 - DNA, 198 bp, Proteus mirabilis
atgttcaaaggtgcaataaatattaaattagaacatattttaggtgatagtggtagaactaaagcccatattgaaacttatataaatatattcatacatgattttaaaaaaataattgatatattatctataattgatgagcgtgtaaaaaatgattttgatgaaatattcattatcaatgggcattatatgtcgtaa

SEQ ID NO: 300084 - DNA, 780 bp, Proteus mirabilis
atgaaatatttaatattttcgggttggtggtgcgataacaatgaaaaaacagataaaaggaataagtatattggtgatgattctattagagataaagaatttcataaaaaatggtatgattgtattaacaaatatacttctcctgaaaaaatactgataatagattctaactcaccaataaaaccagatttaaatctcgaccctagaatcgagttattatccttaaataataattttggacattccacaaatcatgaaggtactatgtgtgggtatactagatcatgtttgctcggcatatactatgcttttttatgtgatttagactattgtatttatatagagcaggattctttaataaaaggaaataatattattgaagaagcaataaaaaaaatgaaaaaaccttatatgtttggttctgcaaaaggaactcctaacgctcttcagcaatcttttttcattattagaaaagatggatatattccttttcttaccaggatgaatggtttcaaatccacctgtaataaattggctcctgaaaataaatttgcaatcgctacaagttcatttttatcaaaattacctgaatgtattttttatttaagaggtataggacgattattatcatattggccaagctttgatattcttccattcggatatggtagaagtagaccaataaattttaatgatcaatacttatactttcaacatggtagtgtagaagaattagaacgttttaaacatagtgcaaataatgatacttttaaaaattaa

SEQ ID NO: 300085 - DNA, 1212 bp, Proteus mirabilis
atggccatgacagcaaagcaagtcgccgcacttgcaaaggccggggagccaatacggaagtcagacggtaaagggctgtacttcgtcgtcccggactcgggaagcccgtactgggcgctaaggtacagcgtggatggcaaacgcaagcagatgacactgggccagtatgccgacatgtcactggcagatgctcggacagaagcggaagtcttcaagcgcgaactccgccagggagtcgacccgctgattgccaaacaacgccagaaatggatcgggatcaacagcgtcgatgacttgttccaggattggtacacgaatgacttgctgcccagactgaagcaccccaatattccggccagaattttcaacaaagacatcaaacccgtcatcggtgagctcaagattcatgatgtaacggcacttgatgttcgagaagtcatccatcgagtcagagacagcgggcgtccaaccgttgcgaacgacaccctgggctacatgaagcagctcttcaaccacgcagtaaagcttgagctgaccgcaaacaatccagcatcacctttcaccatcaacgatgccgggggactcgaagaatcccgagccagggcgctgaagctggacgaagtagaacaggtattcaaagttttcaggaatcatctgaacagctttggcagagacaactacctgtcatgctgcctgttcctggtgctcgggaaccggaaaagcgagctgtgcgaggccccctggtcagaatttgatttggggcagtatgtttggcacatacctcaggagcgggtaaagaccggaatccccatctctatacctctaccaggccaagccatggagtggctgaatgagctcaaagtaagatcactgggttctgagtacgttttcccagctaggcgccgcagcaaactgccccatatggggcctgacaccctgaatcgtgcgatttccaagctgtttggacgagaagcaggacggaagatccagccacccaacgtaatgggcgacatcaagcacttcacggtccatgatctcaggcgaaccttcagaagcctggcctcctcagttgggacgccgcgtcacattgcgcgtctctgcaccaaccatcggcagggaggagtagatggtatctatgacaggcatgagtacttcgaggagcggaaagcggctcaccagaaggtagccgatctggtctcaccatacctatag

SEQ ID NO: 300086 - DNA, 432 bp, Proteus mirabilis
gtgagtaagtttacattcagtcagcgcagtaaaaataatttaatcggtgtaaatgatcaactggtgaaagtgatatatcgcgcgttagaaatttcaccggctgatttttctgttattcaaggcgtaagagaactcgctgaacaacgaaagaatgtagcgaaaggggtgtctcaaacaatgaattcacgacaccttgttgaatgccctattgatggtgtttgtgaaggtaatgccgttgacattttgccttcaatcattaagccgggaatggattggaaaccagaatattttgatcctgttttgaatgcaatcaaacaagcgggtgatgagttgggtgttaagttacgctttggtaaaaactggaaaagtgatcccagtttacccgttgaaacccgctttcctgattatcctcatattgagatcccacgatga

SEQ ID NO: 300087 - DNA, 315 bp, Proteus mirabilis
atgaagaagatgccctataaagatccaaataatatgaattggtttactgccttattaattgccggtatggcggtttttggtggtattgccagttatgccaataaaatagtgaaaggggaaccgttccgctttgccatcttatttgcacaaattgttgtctctatgttttcaggggcattgattttattcggtgcaagttattaccagtggcaacctgaaattgccggcgctattgccggtatggcgggctggtctggtgctgcattggtcagtgcgttagaaaaaagattcttaaggaaggttgccggtgagtaa

SEQ ID NO: 300088 - DNA, 669 bp, Proteus mirabilis
atggcattatctccgtgggaaaaacaccgcatgagccttagcgcgcaacagtccagccaattgggtgggcatgttagccgcaatacacagggctatcacatgatgctgttacgtcttgcgacagataaaaaagagctaaaacattttcagtcacgcgaacgcaaagaagcttataagcgcaagatattagccaattatcagccgtgggttgatggggcattgtccggtggtagcggtgtgcaagatgatgtcttaatgacgattttgctgtggaaaattgatgcgggagattatgagggggcgttagatattgccgtttacgcattagctaaccgtttagtgatccccggtgttaaccgcaccacgggcaccgtgattgccgaagaaatcgccgattctgccatgcgagcgtatgccgtgaaatcaccggtttcattggcaacattagagcgtacacgtgccttgaccgatgatgaagatatgcctgatgaagtgagggcaaaactctacaaaatcttagggttagtgctacgcgataataatcgcccacaagaaagctactgcgtattaagtcgagctttagagttaaacatgaatatcggtgtgaaaaccgaattaaaacaactcgataaagtgcttaaagcccagcgtgacgctgaaaaagcatag

SEQ ID NO: 300089 - DNA, 210 bp, Proteus mirabilis
atgtctgaaacaacaaataaagaatcattattatacactatcaacacttttttattagaaataaataaattatttcagccacttagtttaacaatagaaaatctaaataattggttaaaaacacctgaaggaaaagaatttttgcttattattaaaaaatcaaaagaacttaagttacaagtaccgccaatatacctaaatcataaataa

SEQ ID NO: 300090 - DNA, 2379 bp, Proteus mirabilis
atggctagccgtctgattgatttttctcagcctcctgtttcctatcctgctgatatgcaatggacatattggtggaatgggaaacagcatgagccagttgtttatgaaagaccgcttacccgtgagcaattggctcaggggcaagcgattttattcgatattgaaaaactgcctcgctttcttaaatctcgcttatttaagtacatcgaacatcttaaaaaagagaaaacgccgaaagaagttcataactggctggtctttaagttccataaaagcgtttatcagcgtttgcaagccgttaatgcgcgctatggtttagcgaaagataaacgtcaatttttgttagatagagattttgatcaagccatgttctttaatcgtttgccagatgcgcatgacaaaatattgcgtcatatggcgaagtcatttgcaaacgcgtgtgacaacttattcgatgaattggctgatcaggcaattgctgaaaataacggtgatcgtgaggtgttacttaacctaaaagtgattaaccctatttatcatcaattaggagagttaattacctatttacatgtaacaccgttgttttggggaaaagctcaaaaaggaaaactaacaccagaaaatgcgttgtccggattaaaccggttaacagatgaaaattggtggctgaaaaagttaaaagctcatcgccaacgttggcgtgagtctttgcatattgcctttggtgatgtgaattcagataagacaccttacgccagtaaaaatgcagttcgtgaagtcagatcgcaacgtttagcgaatatgaattatcttgaaatgatggatattcaagacgttgaatcgggtgatcgcttcgatttaatggaaaaagtattagcgagtatcgctaaccctaaaattcgccgtatggaattaatggcgcaagccgcaggtattcaaaaagttgccgaagaaagaggtgatattggtttatttattacgttaaccaccccttcaaaataccatcccaccaagcaaattaatgtttctaaagatgagaaaaagaaaaaagttctcattaacgagaaatggaataacagcgcatacactccgaaagatggtcaacgttatttagtgagggtgtgggcgaaaattcgcactgcttttaaagataaaggcattaactattacgggatcagagttgttgagcctcatcatgatgctacaccccattggcatatgatgatgtttctggataaatctcaacgtgcatcagcgattgagatcatgcgtaagtatgcccttgaagaagatggcgaagaacggggtgcaaagaaacaccgttttgaagcaaagcatttaaataaaggcggtgctacgggttatctcgctaaatatatttcaaaaaatatcgacggttatgcgttagagggcgaagttgatgacgaatcgggagagttattaaccgaggttgcatcagccgttactgcgtgggcgtctacttggcgtattcctcaattccacatgtttggcttgccgtctaaaggcgtgtggcgtgagtgtcgtcgtattcgtggtgtgagtatcgctgataagttgggtgatatagcggaaaaagtaagagcgtctgccgatgcaggagatttcgctgcttatatcgagcaccaaggaggccctaacgttaagcgtaacctacaaacgttattagttgctcgtactgttgccgatgagccaaattcttatgatgaagaggtgatgagagtcatcggattatattcgccgataaaaaatagtgatttagtaaaaacgcgtgagcgtcagtatcgtttagttcgtaaatctaagcaggatattgaggcaattgagcataagcgtaagtcagaaacggggcgggttttgactttaaaaagcgcgatcagcgcgcctcggagtcctgtcaataactgtggatcgggcagttcacccgatattaaaaacccacacgataggggcttaaaatcgcccgtatgggggatttctgagcctgaatatttcgacctatgttcacaatatagcgattgggagaaatcatttggcgaggttttagagcacaaaaagagtcagcgaataatttcaacggtgtcattaagtgaaaatcaggaacgtttgatacctgaattcaaagcctttgccgaaaaaatgggattggatttaccaccagacacaatgtggtcaatggtgatgaacggtatgcgcctgagttatggcgatgaagtgatttggtttgagaatgggaaggttcaaatttcatcaacgaaaagtgaaaaagttaattttgaagaagtgaggcaaaagagtatctcaaatacacgagatagggtaatggctaaggttaatcggttgaaaaagttaactatgtga

SEQ ID NO: 300091 - DNA, 828 bp, Proteus mirabilis
atggcgaataaaaccattttgaaatgggctggctcaaaagtccgtatcatggataaattaattccacatttgccaaaagcaaagcgcttagttgagcctttcgccggttcttgtgctgttatgatgaatacagaatataacgaatatttaattgcagatgtcaatcaggatttaattagtttatatcgtaatgtcgtagaacatactgaaataatggcgcgtaaagagttctatgcgtgggaagaaaacaatcataaaaatgattacattgctattagaaagttatttaattcaattaagatattagataaaaacgagtgtgatcaatatatacaatctgctcggtttttatatttaaatcgtcattgctttaatggattatgtcgatataacaattcgggtgaatttaatgtgccattcggaacatatgcccgtgtttattttccagaggaggaaatcagacaatttgctgagaaagccactaatgccattatcgcttgtttagaatggcaagatactttgtcactcgttgatttcggtgatggtgtttattgtgatcctccatatatgggagatgaaggtagttttactaaatatcatcacgcggattttactcacgctcatcaaattgagttagctcaagcattaaaggcattaaatcaatcacaaggtaacccgattactgtctctaattccgttcacgccaaagagctgtatgtcgatctcggttttattattcacgagattgatgcgcctcgttctatttctgcaaatggaaaccgccaatcagcaaaagagattatcgccgttttgccggaggtgtgctga

SEQ ID NO: 300092 - DNA, 309 bp, Proteus mirabilis
atgcaacgatatacgcatgaattaaaaataaaccctcaatatttcaatcaagtacgtattggtgcgaaaaaagcagaatttcgtcgggctgatagagattttcaggtcggcgatattttggttttacgcgaatttaatgctattccaccaagagaattcaggcacctttttcattatggcgaatatacgggaaatattattagagcagttattacagatatcacctgtattaattctattattcctgagttaggcgataaacctaaatttgtaatgctttcattttccattcttgagggggatgaataa

SEQ ID NO: 300093 - DNA, 207 bp, Proteus mirabilis
atgtctaaagaaagtgatgtaaccgatttaattaatgccgtcagagaagatgaaagaaaatctcgggcggttttttatgcagttcgtttgcattcattgatatcaaaaataacaagcgaacaaatggaacgccctgaaatcgttcagttagtggaaggggaaatcgagaatatcgaacatcaagcgcaggaatggaattatgtctaa

SEQ ID NO: 300094 - DNA, 276 bp, Proteus mirabilis
atgtcaagtgataaggattattcaacaacagaagtccatcttactggttggggcggtgttgagcacgtttctgacaaaaaaagaaatgtaagtgctagatgtttaaaagaattaaaagttaaacaatttaatcttcgcaaaaagttaatagatgtacttcatgaagcatatgatgacggtttgtggatagaccttattcaagaagaattaaaattactttcgagtgaagagtttattgtctgcgatggctttgattgtgacggaaaaccaatttaa

SEQ ID NO: 300095 - DNA, 153 bp, Proteus mirabilis
atgaaccaattaattaagcaaagaaataaatacaaattaagcagtgaatcttttaaggataaagttaataaaaaattatcagaatctaatgttatttatattgttagttttattttctttgtgagttatttattaatttcagctttaagttag

SEQ ID NO: 300096 - DNA, 897 bp, Proteus mirabilis
atgggtgcaggccacgagcacggtgatgtcaaagcgctacctgaatcacgtctgttaattgcttttgcattaacaggctcttttatggtgattgagtttattggtggctacttaacagaaagtttagccttgatttctgatgcaatgcatatgatgacagatgcatttgcactcttacttgctcttatcgcgatccacgcaggtagaaaagcagcagatctattcagaacttatggctatgctcgttttgaaatattggctgctgcgatgaatgcactgatcttaatggcggtggctttttatattctttatgaggcttatcaacgactctcttcccctcctgacattcagtctatgggtatgcttgttgtggcaatcgcagggcttatcattaattttatctcaatgaaaatgctcaccagtgcaaaagatgaaagcttaaacgttaaaggggcttatcttgaagtgtgggcggatatgttaggctcagtgggcgtcattattggggcggtaattatttggctaaccggttggcaattagttgattctattattgcggtattaatcggctttatggtctttccgcgcacatggatcttattaaaagagtgcctgaatattttattagaaggcgtgcctaaaggcattaatttaactgaggtaacagacaccattaataataccgcaggggtggctagctcccatgatttgcatttatgggcactgacgcaaagcaagttgatcctcagtggtcatattgtctatcaacccaatgtagatagtgaaacattacgccttgctattgataagcaactacgtgaacaatttcatatcaatcatattaccttacagatggaaagcgaggataaacaacatctggaagataatcatcattag

SEQ ID NO: 300097 - DNA, 240 bp, Proteus mirabilis
atggtaattaaatgcctaagaagttattttaataaaaataatatatataattatgcaaaaatatttttctttgcattaataatatggcaagaagtttatcaatatatcgattataaagatgatgtcgatttacatgaaaaattagctgaatgggaggctttttataattgtcatcgccctcactcagcgcatgctggtaaaacatcgtatgaagtgttaaaaaataagcttagtctttaa

SEQ ID NO: 300098 - DNA, 396 bp, Proteus mirabilis
atgagcgagtggcatgataccctggagatcggtctgcttcctctggaagagaccggcctctactgcgatggcatgacgtatgtgatcagccacctgcttcggaaagccgacataccccatcgatgctacatgggctatgtgaaagacaagcgaaacggtgatctggtggtgccgcactgctgggtcgaactggagggcgatggtgattggattgtcgatctccggctacgtacctggttgggagatgatgacgaggtgcctcatggagtgttccaaaccaccagatggcgccggtttacctacaagggacagcccatggcagacatcaatctggatgaagaggcggttgaggccatggccgacggaaaactttcacatgtgaaagttcatagatga

SEQ ID NO: 300099 - DNA, 1725 bp, Proteus mirabilis
atgttaactaagttgaaaacaattgatgatttacattcaaaaaatatcttaaaaaacccattggaacacttaaatatcaattgctttagacagtttcgtgaaaacttaagtatcaatttcgatcatccattgactattttggttgggaaaaatggttcaggaaagtcaacattattgaagctcattatgtctatggctaaagggagaacaccgcatgactacttctttgagactgaatgggaccaatttaatgaccaaggtctatcagagtttagttataaactagatggcaataattgtaaggaaattaaaactagatactctggttgggttttctccgaagccgaacagacctttagcacggacaaggaaataaaaattcacttagaaaaaaacactaatgggaaatcattttccaaaatcattgatatacaatttaagtcattggtaggctcatttgaaaagaatactttttttgacaatcaaacgtcgacatcggatttaaaatcaaaagtcgattatgcaaagagagttacaaaaaaagtccaacagtcaatagacacaaagaataataatggcagaaaggccaagttaactattgttagtagaaacaatattgaaataattaacaatattttgggcaaaagctacactgaaataaaaataattgaacatcgtttcttcagtggcacttggggtactagcattatatttaagtcagatagcatatattctgaagcaaactctggaagtggtgaatttattgtcgccaatatagttaataagttatcatcaattcagtctggttcaatacttttattagatgagccagagctatctctacattcaagtgctcaaaaaaggcttctctcatatttccttgatttaataatcaagaagaaaattcaaattattatctctacacactctcaagtttttgtagaacacataccaagcaaatgtattaaaaacttcattcctgataaattagggaaaacatttattgagcaaggtgtaaactatctcaatgcttttgataacttaggcataatgtttgactgcgttacaattattgtagaagatgatttagcgaaaaagatattagataaagtagcattgaacgaaaatttgagcaggcagtttaatataagatatttttctggaggtgcatccagcataaaaacctcattaattacaacattttccaaggttgatgatgctgaaaaattcatagtttttgatggtgatatgttcaaatgtaatgtggttgatttatcatcaatccccgaaatagataaaacagaagattaccttaaagagcagataaaactaattactggcattaacattgaaaattttccatttcatgttgatggaggagaacaaggatcaaataaagagcataaggttgatttgtataagcggtatattaaattcttcaaagaaagagttaagtttttgccaaagcaaatacctgaagatataatttttgatcgtgattatgtcttatgcgcattttcattttcagatattaatcggttagattcaataaaaaatagcaaaggaaaatttaaagaactctcagaacaaaccagcattcctgttgattcactctatgatttatttatcggttattttatatcacaaaagactaacagctcagaatatttaactatttctgagttacttcattcaatattgtcattgagtaaaggcataaagtaa

SEQ ID NO: 300100 - DNA, 261 bp, Proteus mirabilis
atgaaacgtatatttggatggagcatagtgctggtaactttgttcgctgcatacaaaattgctggaagcggagggcttattttgtccttaattccattaaccattcttatcgccatttttgcgaatagacatcccagagacgcgggttcacaagttgtcaattttcaggaatcggttaactttgattaccaggaagacgttagtcttcccattcctgatgcttcggatacaggatctgactggcagggtataccttattga

SEQ ID NO: 300101 - DNA, 240 bp, Proteus mirabilis
atgcagcagacaatccaaatcgaaagtgacactggtcacaggcatctacagcttctgtcagtgcacgaagtaacggctctactgaagatttccgcgccaacgcttcaacgaatccgggccaacgatccaacatttccccggccctatcgtctggctggagagcggacactgcgctatcgggtcgaccaacttgaatcctggctggcgtctcgtctggttgagtctgatgaagcctgctag

SEQ ID NO: 300102 - DNA, 864 bp, Proteus mirabilis
atggagagcaataaaaagcgccgcaagccagccgccgaagtgctggctgcgagagtggatgaagcgaagcaggcggctctacttcaacacacgaagcaggagataaaagacctgcaactctcgctattcgacattgctccctggtccgacaatatgcgggtcatgccgaacgactacgctcgatcggcgctgttcactgtgcgcaacaagcgcactccccgtgcggccttgcagaaccatcccatttaccatgtcaacaaagacgtgaatataacctatacaggtgttgagctgcgcgctcaggacgacgaactggtttggcagcaggtactggaatattccaaacggtcgccattgggcgagccaattactttcacgttctacagactttgccaggatttaggttggtcgatcaacaaagcctattacaccaaggccgaagaatgcttgtctcgcctccaggcgtccgctatggccttttcctccgcgcgggtcggccgcctcgaatcactgtcgcttatccatcgattccgcgtcttggatcgaggcaagaaaacatctctatgccaggttgaaatcgacgaagagatcgtcgtgctcttcgctggcgatcactattcgaaattcgtctgggaaaagtaccgcaagctgtcgcccacagcccggcggatgttcgactacttcgcatcccacaaagagccctatccgcttaagctggagacctttcggttgatgtgcggctcagaatcaaccagagcaaagaagtggcgcgaacaggtcggcgcggcctgtgacgagctgtgcgagaacgacatggtggcaagtgcctgggttcataatgacttggtgcactgcaaacggtga

SEQ ID NO: 300103 - DNA, 240 bp, Proteus mirabilis
atgaccgagaatcaactggtatctgtgctagaacagatccaatcactggccattcctgccaaagaaatcatgaccattaatgactgtgccatctatacgggcctgtccacctcgtacctgtacaagttgacgtccaagaaagagatcccgtttttcaaaccgatgggcaaaagggtctacttcaagcgctccgaaatcgaccagtggttgctgcgtaacaagcaaggggaagcctcatga

SEQ ID NO: 300104 - DNA, 126 bp, Proteus mirabilis
atgatcctgtcccacctagaaaaaacgacgataacagagaaaattaacgatggattcgcaacgcaatcttctattcatcgctttactgttcgtttctttcctgatctggcagcagtgggagggtga

SEQ ID NO: 300105 - DNA, 876 bp, Proteus mirabilis
atgagccaggcattaaaaaaacttatcaacttaatggagcttgaaaaaatagaagaaggcctatttagaggtcaaagtgaagatttaggtttaccacaagtctttggtggacaagttgttggccaagctctttatgcggcaaaacaaacaattgctgataatcgctatgttaattcatttcacagctattttttacgacctggtgatagccataagcctattatttacgatgtggaatctatccgtgatggtggctcatttagtactcgtcgcgtcagtgctatccaacaaggtaagcctattttttatatgaccgtctctttccaagagtttgaagaaggctttgaacatcaagatatgatgcctgaagtcccttttccaaatgacttgatctctcaagatgagatattgaaaaaacttgccccaaaattacccgaacctctaagaacactcgcattaagagaaacaccttttgaagcacgccccgtgcaatattttagcccgtttggttatgagaaagcacctgcggaacgttatgtttggtatcgtagtcgcggagaaatgccatctgatcctttcctacaccaatacttattaggttatatctctgattttgattttttacccacctcactgcaaccttatggtttaggttttatggatccgagtttacaagtggctaccatcgatcattccatgtggttccatcgcccatttcgtgttgatgactggttactttatgctattgaaagtccatcagcatcaggtggtcgcggatttgtgagaggaaaaatgtttaatatgagtgggcaactagttgcctcttctgttcaagaaggtgttatccgccaaaaacgaataaaatcaaacaaataa

SEQ ID NO: 300106 - DNA, 321 bp, Proteus mirabilis
ttgggattatctgcatgtggtgttaatttcaacaaatcacaaattcagaaaaaattcaaacatgctgaggattttggtatatcaggtagtgctaataagcaaaactttgaagctttcgagcaagcaatgaaaaatcatatagagttgccaacaacggtgaatatatcgggtacatatcgttggaagcaagatgtcattcattattttgatccaaaaactggtcttaatgttatggcagataaaagtggtaattttatatctggttggaaattatcagagagacagatagctgacttggtggagcttgggaatgtattctaa

SEQ ID NO: 300107 - DNA, 294 bp, Proteus mirabilis
atgaacgataataattttgattttaatagaactattattgatgtagtggaaatgattagattggcggatgatttggatgcaaatataattgataggctatatatgtcacttgataaagtaatgactgattatcaaagtacttcgcttatcccaaaattacttgcttatgatcttctagttcttcatgataatttggaaggttctttaaaattttactctggtaaagataacgagtatatatcaggagttaattcaaaggttagtgaatatattgaaaaaatacttttaagctaa

SEQ ID NO: 300108 - DNA, 993 bp, Proteus mirabilis
atgttagagcctttgaaaatgaatgtaaatataaatgatatataccaatataaattaaaaagtttttttaattcacgagccttatcaattaatgaagaaaaatttatatttatagattctggaaaaaataaagagaaggttttatctcttcatataaaaaataatgattttctttttttatatgagtggtgtgatttatttgattttgaaaaaatatataacctgctatctagtagaactaagtctaattatttttacttttttcctttcttgaagatgtttttttcattatttatgattaatacaactgagtgttatagaaataaaaatttatttgtttcttattttattaatcaattaaagaatggacttgattttaaatataatcctgatgattgtaaatctgagttattcaattatttaatgtatgaaatgggaatagggtctcgttatgataaatattttcaagtgataaataataaactattttttaatataaaaaatagttcttatgttgaagtgaaaaaactaataaacttaatacactcttttgcgaaaagaacagcaagaaatagtaataggaaatatttagaagtaataagggaatttcaattgtcgacaatagattttttattagatagtactgataattactcgcttccgtatagtgatatatatataaaatatacttatccagatatattttataataattatttagaaaataaaaataatatttttagagtgttgactgattgtataaaggaaggacaatcaaaatgtaatctttttgtttccgaaatgatttttatgaattatatatattatattctacgagaagaaccatctaacatattagccttggaagaattttgcaaagaaaataaagaaaattttttaaaaataataagtagaattattaaccgtaaattttatcttaatattaatagttttaaaggtcttaatcttgggcgttacttatcaaagatatga

SEQ ID NO: 300109 - DNA, 1014 bp, Proteus mirabilis
atgaatttaaatgatatctatcagtataagttaaataagttatttaactctagaacacctacattatacgatgatgaattaatatattataaagatgagaataagctagagatgattctcgctttacatatgcaagaaagcaagcctctttttttatcctggtggacggatttatttgattttgagaaagtagataatactctaaatgaaaatttatacgaaagatataatatttttttgcttttcttaagaaaattaccatctatttttttgattaatactaatgaatattataaggagaaaaatttaaaagttatttatgctcttaatcagttaagatatatggaaaatatatctgacaagtttaattatgatatggatgaatgtaaaacagaaattattaattacttagcttgtttacttgggggagaggagttttatggtaatctatttaaaatagaaaataatatactattttttaacataagatttaatgattgggtagatgttaaaaaattaattaaacatatccactcattatcatctgcaatggcaaatagtatagagaataagattgctttagaaaaagtaaaagtgtttcatataaattcaatcgattttattatgaataaaaatcaaactgatagctatgaaataccatatgatgattattatttggattacgtaaatcctgatgttttcatgaataattatgcagatagtaataaaatattttctatattagttgattgtgttaatgagaatcaatcagaatgtaatttttttatatcagatatgatatatatgaattatatatattatgttattaaagataatgaaaaagaaatattaaaattaaaaaagtattgcgcaaaaaataataagttattttttaaaataattgtcaaaattatgaatttaaattttcatataaatgaatctagctttagaggattaaatctagaatattatttattgaatagtaaaaaaattactgttggttatgtaaattag

SEQ ID NO: 300110 - DNA, 1131 bp, Proteus mirabilis
gtgaaagtgttgactgtttttggcacacgccctgaagcgatcaaaatggcacctttagtgcacgctttagcaaatgatgattcgtttgaggcgaaagtttgtgttacggcccaacatcgagaaatgcttgatcaggtattaaatcttttcgagatcaaaccagattatgatctcaatattatgaaaccaggacaagatttaacagatataacctgtcgcattttagaaggtttaaaacctgttctagcgtcatttcaacctgatgttgtgttagtacatggtgatacaaccaccaccatggcggcaagccttgctgctttttatcaacaaatccccgtcggtcatgttgaagcgggattacgtaccggtaatctctattctccttggccagaagaagcgaatcggacaattgccggccatttggcgatgtaccattttgctcccactgaaactgcaaagttaaatctggtgcgagaagcggttgcggataaaaatatttttgttaccggcaataccgttattgatgcgctattttgggttagcgagcgagtgatgggaaatcaaaccctgctcgatgaacttgctgtgcaatatccctttattcagccagaaagaaagatgatcttagttacgggacatcgcagagaaagctttgggggtggttttgagcgcatttgccaagcattagcagagattgcattggctcaccccgatgttgaagttgtctatcctgttcacttgaatcctaatgtaagtgaacccgtaaagcatattctgcatggaattaataatattaaattaattcaaccgcaagattacctgccttttgtttatttaatgaaccacgcttaccttattttaactgattcaggtggtattcaagaagaggcgccttcattaggtaaacctgttcttgttatgcgcgatacaacagagcgccctgaagcagttgaagcgggttctgtgcgtttagtgggtacagatactaaacgtattgttagcgaagtaacctctttattgacagacgaaaacgcatatcaccaaatgagtaaagcaacaaatccttatggtgatggtcatgcctgccaacgtattcttgaagcattgaaaaataatcaggtgacattatga

SEQ ID NO: 300111 - DNA, 1059 bp, Proteus mirabilis; identical to SEQ ID NO: 295461

SEQ ID NO: 300112 - DNA, 1260 bp, Proteus mirabilis; identical to SEQ ID NO: 295459

SEQ ID NO: 300113 - DNA, 516 bp, Proteus mirabilis
atgccgttattggatagctttactgttgaccatacacgtatgtctgcacctgcggtacgcgttgctaaaacgatgaaaacaccctctggtgatactattaccgtttttgacttacgctttactgtcccaaataaaaaagccatgcctgagaaaggaattcatacgttagagcacttatttgcaggtttcatgcgtaatcacttaaatggtgaaggtgttgagatcatcgatatttcgccaatgggatgtcgtacaggcttttatatgagcttaattggtcagcctgatgagcaacgtgttgctaatgcatggaaggcagctatggaagatgtattgaaggttaaagatcaaaaccatattcctgagcttaatgtctaccaatgtgggacttatgaaatgcactcgttagctgaagctcaagatattgcacgagacattttatctcacactattggcattaatcataatgatgaattagcactaccagaagacaaactcaaagagttacaaatctag

SEQ ID NO: 300114 - DNA, 669 bp, Proteus mirabilis
atgatggggagaaaacttaattttatcggtattattttaataataatttctctattgctctcgcaagtagagagtaaaatagacattaaaaatagcgataaacgttttttattatttatatcactgaatacatttactgccagtgataaattgacctcattaatttcagagttagaatacagtataaaacaagttgatcatccatttgataaagtcatttatggttatgtcagtgtatttttatccgcttattatcataaaaataaagcttattctcaggctgcacagacaataaaaaaggcctttttttatcttgatgaagttgttgaaaaaaatccaactaattggcggttgatctatctaagattaagaatggatgcttttacacctcgttatttagggcgctgtgtggtggctaaaaaagacagtcagcaattacttgagaatattaatatcaatagtgaacttatacctatgattaactatatgtatgcgcgtgcattatttagttgtgagcaagtgacacaagcaaaaaagatcatggctcaattacttcaagaaaatgaggcgagtaaaaaaattgctcgatatagtttcactagcgttcctccttggttatctattgaaaagaccgcggttattcaaccaataacattagagagtgattaa

SEQ ID NO: 300115 - DNA, 2583 bp, Proteus mirabilis
atgcaagaacaatatcgtcccgaagatatagagcaaactatccaggaacactgggaaaagaacaatacatttaaagtgacagaagataataacaaagaaaaatattactgcctgtcaatgctaccttatccttctggtcgactacacatgggacacgtccgtaactacaccattggtgacgtgatttcccgttatcaacgtatgttgggtaaaaacgtcttacaacctattggttgggatgcgtttggtttacccgcagaaggtgctgccgtaaaaaataacaccgcacctgcaccgtggacttatgaaaatatcaattatatgaaaggccagttaaaaaaactgggctttggttatgattgggatcgtgaagtcaccacctgtacaccagaatattatcgttgggaacagtggtttttcactaagctgtatgaaaaaggtttagtgtataaaaaaacctctgctgtaaactggtgcccacacgacttaaccgtactggctaacgaacaagtcatcgatggttgttgctggcgttgcgacacccctgtcgagcgcaaagaaattccacagtggtttattaaaatcaccgattatgctgaagagctgttaaacgacttagatacgttagatgaatggccagaacaagttaaaaccatgcaacgtaactggattggccggtctgaaggtgttgaaattacctttgatgtcgcagatagcgacgataccatgaccgtatataccacacgtccagatacctttatgggggtcacttatgttgctgtggccgccggtcatccattagctcaaaaagccgctcaaaataatcctgaaattcagcacttcattgatgaatgccgtaacatgaagatggcagaagctgaaatggcaaccatggagaaaaaaggtattgctacaggtctgtatgctattcatccattaacccaagagaaagtcgccatttgggtagctaactttgtcttaatggaatacggtacaggtgcggttatggccgttccaggtcacgatgaacgcgactgggaatttgccactaaatatggtttgccgattaaagcggttattgctgatgcagaaggtaaccaacctgacttatcaacaggcgctctgactgagaaaaatagcctgattaactctggtgaattctcaggacttgataaccaagctggttttaatgctattgcagataaacttactgcaatgggtgtgggtgaacgtaaagtgaattaccgtttacgtgactggggtgtttctcgtcaacgttattggggtgcgccaattccaatggcaaccttagaagatggtaccgttgttccagttcctgatgaccaattaccggttattttaccagaagatgtgaaaatggacggcattaccagtccaattaaagcggatcctgagtgggctaaaacaacgattaatggtcaaccagcgctacgtgaaacagatacttttgatacctttatggaatcttcttggtattacgcacgttatacctgccctgattacgacaagggaatgttagatccaaaagctgctaactattggttaccggttgactggtacattggtggtattgaacacgctatcatgcacctgatgtatttccgtttcttccataaattgatgcgtgatgctggtttagttaattctgatgaacctgctaaacgcttactgtgccaaggcatggtattagcagatgcattttattataccggtgaagatggcgctcgccattgggtctctcctgcagaagcgattgttgaacgcgatgaaaaaaatcgcatcatcaaagcaactgacagtgcaggccatgaactgacttacgctggtatgagcaaaatgtctaaatcaaaaaataacggcatcgacccacaaaccatggttgagcgttatggtgctgataccgtacgtctatttatgatgtttgctgcaccaccagaattaacacttgagtggcaagaatcaagtgttgaaggtgcgaaccgtttcttacgtcgtttatggcgtttagttcatgagcataccgaaaaaggaacgactcaatcacttgatttggcaacattaaccacagagcagaaagacttacgtcgcgatttacacaaaactatcgccaaagtttctgatgatgtaggtcgtcgcttagcattcaatacggctattgctgcgattatggagttaatgaataaattaacacgtgcaccacaagagactgagcaagatcgtgctttaatgcaagaagcattagaagcggtggtacgtatgctttctcctatcattccacatgcttgttttgttatgtggcaagcgttaggaggtaaagaggatattgatgttgcaccatggcctgttgctgatgaagaagcgatggtcgatgacacgaaacttattattgttcaagttaatggtaaagtacgtggtcgtatcactgttcctgctaattcagaaaaagattatgttcaggaaatggcaacaaaagagtacagtgttgctaaatatttagaaaatgtcaccgtacgtaaagtgatttatgtaccgggcaaattactgaacatcgttgttggctga

SEQ ID NO: 300116 - DNA, 219 bp, Proteus mirabilis
atgtatataggtaaaaacaaaatgaaaaacatcaagttggataatgttttaaaccttttcaatcttttccctgaaacagtattccactgttgtgccgacaataaaattgcaactcttgagtttgatgaagatgtaaaaaaacccaccgaagtgggttcctttacctcgggtcgccgaccaaagctaaccgagagttctactagcgcgaccaaacgctag

SEQ ID NO: 300117 - DNA, 759 bp, Proteus mirabilis
atgaacagaaaaatatcagaatcagataaaattgccgcccgaaacttacgaaacatttgggaagccaaacgagaatctctgggcttaactcaagaaaaagccgcagagattatgggatttgctactcaaggggcagtaagtcagtatttaaatggccgaacagccttaaacactgatacaattttaaaattcgcatcattattgaaagttgatcctgaagatattaatccagagctaaaaacgttgttagactacgttagacgaacaggaaaagaagaagaaataaaacaaataacctcttctacatcaactcaaaatgaacatacgactttaagactgatggatgtatatgcaaaagcaggccctggtggctttataaataacgaattccctgacactataaaatctattgagttctctccagaaaaagtattcgatttatttggtagaaaaagtttaaaagggattgaaataattaacattagtggtgacagcatgtctccagcaataaacccaagagatgtcgtttttgttgatactcataatgaattttttgatggcgatggtgtttatgtgtttagttttgaaaattcattatttataaaaagattacaaagagttaagggcagaaaactagctgttaaatcagataatcctgcttatgaaacgttttatattgaagagtcagaaatgtatgatctccgaattattggaaaagtaataaaatcacttcctattaaaatgattgattttgcataa

SEQ ID NO: 300118 - DNA, 636 bp, Proteus mirabilis
atggaagatagaagtcttgccccttgttgggatattcaaccctctttagaagaaaaaccagttacttatttattgaaatctattgctggtgtactaactgaattgcctaaacatgaacataaattagattgtaattggatcaatggtgttcgtgcttatgggtgggtcaaaaatcatattcaagatactgcagaagaaggcattataccagaattaaaaatggtatatgacaaactggattttgtctttgcaattaataatataccgattcagttttcaaaggattgtattagtgaaccaaagaaaaaacatcgtttagttcgaaataaagcagaatttaaacaattaacattatttggtggtgatgattcagaagctgaagaagatctcatttggcgtgttcttgctgagccattttatattgaagatacggatgattatcctcagtgggatgtagctttagttgggattaatcaatatggcgcatgtattagtgagattagataccatgaggcagtttctgttccattaatggataattcagaagcgagacctgaagcgactgacattagtgatgcaccacttaaacgtcgtaacgcaccagatgaaactgtgaaaaaagatggaactgtttga

SEQ ID NO: 300119 - DNA, 1104 bp, Proteus mirabilis
atggaactgtttgattttaaatcaggctatagaggggataagttacgtcttgctaggatggcgagggggttgtcgtgtgaagagttagcgacagctttaggtaaaagtaaacaatatattagtaaattagagaaaggatttaaaccatcagaagagctaactgatgagattgcaaggcatttgaatatattgcctaattttctatttagtgagcgtagctacccaatagaagatgaacaatgtcattttagaagtaaaaaatcgagaactaaaactttaactaatagcatattagctagggctgaaatcttgagttctttattatctgctcttgaagatgaaattgaatatcctgaactaaatattccggatatttcagatcgagcaatgagtacattagatgatattgaacgaatagctgagagttgtcgtcgttattgggggattggtttaggaccaataacatctatggttaaattcgttgagaatttaggcattattatcgcacatgtgtccgatgttgatgacagagttgatgcttttactgtaaatagtaagaggccaataataattcgtaacgatgctaaaagttctgtatgtcgatttagatccgatattggacatgaattgggtcatattgttttacacgatggaattattactggagataacttaactgagagtcaagcaaatcagttttctagtgcttttatggttccaagagtttctttcatgaaagaatttcctaaaatgaaagggcgttatttagattggagtgctttagttgagtttaaattacgctggagagtaagcctaagaatgataatttatagagcttcagctttagggttaattacaaaagaccaagcaagacaaggatatatgtatcttaatacaaaaggatatactgcaattgagcctggagataattctatccaagttgaagaaccaacattacttactagaagtattgaaatgttagacgacctatcatggaataacattcttgttaaaacagggattacaagagagttagtacgagaattgttttgtgttaataaaccaattagcgataaaacttcttttatttattcggttagctaa

SEQ ID NO: 300120 - DNA, 363 bp, Proteus mirabilis
atgcaatatgttgtttatataatagcattcatcagatatttattttcaatagcaaaaacagctattatttttacagcagggttaatattttatttatttttatttgaatatcaaggtttaacaaatgatcttttaactcttgagtcgtctagaatttcgacatatatttataacttcttccttttttttgttttaatttctgtagctgtttactctttgccatttattgtttctcccactaaattctttaaatcattaggttattacaatgtaaaagaagaaaaaatttcagagaggttacggctattgtttgaaagtcctgtggctggctctgtttatgtgaagaaagttaatgaacaatag

SEQ ID NO: 300121 - DNA, 189 bp, Proteus mirabilis
atgctccgtctcatgcgtgaacatcaaattacacaaaaaaaagcagcagaattaatctgcatacaaacaatgcgtccctgttctgtcagggcgataaaatcatgggttaatgatccggataaaccaagttcacgtacttgccctgattgggctgtaaaggcgttaacaatggcgttagaaaaagagtag

SEQ ID NO: 300122 - DNA, 267 bp, Proteus mirabilis
atgactggtcataatcatattgatccgcactatttagatcaaatttttcctgaaaacaatctcaccactgcccaaaagcatgatgcactactttatgctatgggatcttctatcgcagagcttgcgagactcaacaatcgtcaccctgatacggtgagaaaaagactgaatgatacaactgttttaatttcaggctgctcagaaattaaaattttgaggtcggtcacattaataagaatctttaacttattactgaacaaaatttga

SEQ ID NO: 300123 - DNA, 192 bp, Proteus mirabilis
atggcaaaacctatcgtagaaaaaaattatgtcagtgtcaggttggacttacctagcaacctaaatgattgggtaaatgctgaaagccaaaaaatcagccgttcaaagcggaatttcctgatgctactaattgagagggagtataagaaatctctgtctggaaatacgcataaaggtgaagaacagaaatga

SEQ ID NO: 300124 - DNA, 636 bp, Proteus mirabilis
atgattaaagaaacgttactctcattagctttgcaatgtgccccgtcagtgcatactgatacggtgatagatattgcaaaaacggaaagcggattcaatccgtttgccattgcggagatcgtaacgaaagataaaatcattagtcatttgccgaaatcaaaaaatgaagctctggaaattatcgaaaggctggaaacaaaaaacggacgattttcagttggtctgatgcaaatctactccggaaattttaaagggtataacgttaccgcagaggaaatgttgaacccgtgcagtaatcttaaaatagcagaaaaaatactggtagattgctttcaacgtggaggaaatttaaagaacgcattaagttgttattactccggtaattttgaaacaggacacaaaaaagaaacagcatttaataataccagttatatagagaggataggagggcagcctattgaaagaacaaaaacaacggtagttgttccaagcacaaaaacaattaaacaagcgaatacaacacagggaaatggaaataaaacaagtttaaggcacacctcatcaataatatatcctgaatatattattcgaggtcaggtaacaatgcatttgcaaaaggtgaatgatgaacagtaa

SEQ ID NO: 300125 - DNA, 279 bp, Proteus mirabilis
atgaacagtaaaaaaatatttgcacttttcatgatggtttttatggggctgtttatggttgaacccgctcttgccgcaggggttgatactgcatcaacagggattctccaaaaatggattgattggttagtcgggattcggggagccgctattacactggcagtaattgcaggggcattgattatactgtttgcccgtaaatatatcggttttctgtgggggattggttttgctattttcctctttgtgattgccccttacgtgaaagactggctgtaa

SEQ ID NO: 300126 - DNA, 2775 bp, Proteus mirabilis
atgagtgttgtttttaaaggattaacccgccccgctttaattcggggcttaggtgtaccgctgtacccgtttttattcatgattatggtggtcgtcgttatcgcagcaaacacaagcgattatatgtattttttaattccggtcggttggttcttgattaaaaaaatgacggaaattgatgatcgggtgtttgatttgttgtatttgcgttatcgagtgagtggtcatccagtcagtaatcagaaatatgatgctgtacactattcaggaaacacatacgataaggtcgatatatcaaaactggaaaaaatgatgaaactaaatcaccaaaccccgattgaagatatgatcccattttctacacatataacagataagttggtatgcactcgtaagcaggatttaattgctacttgggaaattgacggggcttattttgaatgtcaggctgaggatgagctagatcgtttaacagatcgtttgaatacgctcattcgtagttttgaggataaagctgtaactttttatactcaccggataagaacgaaaagtaaaatagaaaagaacttccgttctcttgtcccttttgctaacagagtaatgaatgattactatgactctttaagtcaggaatgtttttataaaaatcgtctttttatctctttatgttataagccgttaacggcagatgagaagttaacgtttcttttttccaaaaataaaaaagagaaagaaaaacaaaacaaaaaaatattaacagaatcgatagctgtcatgaatgatatgacaggaagattagataactatcttgagcagtttaatgcaactcgtttaggtgtgtatgaagaaaaaaacagagtgttttcttctcagctatctttattccagtatcttttaacagggaaatggcaaaaaatagccatcactaatagcccattttataattcattgggtgggaaagatgttttcttcggtagtgattcaggtcagttatccgccggaagtgatgcgcgttatttccgtattattgagataaaggattattttcaacataccgaatccggtatttttgatgcgctgatgtatgttcctgtggaatatattatgaccagtagctttaccattttaaggaaaaaagaatcaacaaaaagattagatgatcagttagataaattggttattgctaatgatgcagcagtcacacaacaaaatcagcttattgtgggaactgatatgttagccagtggattgattgcatttggtaatgccagtttttcattgttagtttatgcggattcaccggaagaattaataaaaaatagcaatatggttgcaaatatcttacaggatttaggattggttgtgacatattcaggtttatctttaggagcggcttattttgctcagttacctgctaattatacactgcgtcctcgcctgtcgatgataagtagcctgaattttgtggaaatggaatcatttcataatttcttttcaggaaaagaaaaaaataactcatggggcgatgcgttaatcactcttaaaggatcaggtaatgatgtgtaccacatgaattaccacatgacccgtgagggtgttaatgattttggtaagaacccgccgctggctcatactgagatattaggcgcatcagggggagggaaaacggtcttgatgatggctcatgcgttagctgcacaacaatatggaatggctgattcatttcctgataaccggaaaataaaaaaactaaccactgttttttttgataaagaccgtgcgggagaagtagccataagagctatgggcggtgaatattttaaaattaaaagtggtgaacctacaggctggaatccatttcagttagccccgacaaaacgcaacattgcctttttaaaagaactggtaagaattttgtgtactgtaaatggcggagaactggacgatcatcaattacagttaatttcagatgctgtagaacgcttaatgcaacgggataaccgtacatatggtatcagtaaactaattcctttaattatggaggacagagacggaacaacgttaaaaacgggattaaaagtccggctgaatgcatgggcgaaagatggggagtttggttgggtattcgataatgaaaatgaaacttttgatataaatgagaaatctgtatttggggtagacggcacggaatttttagacgacaaagtcacctcacaggtgatcccattctaccttatttataaggttgcatcattagccgatggtcgtcgcctgttaatatatatggatgagtttcatcagtggcttgttaatgaaagtatgcaaaaaagtatttataacatactgaaaacaggtaggaaactggatatggtgcttgtttttgctactcaatcacctgatgaacttattaaaacgccaatagctgccgctgtcagggaacaatgtgccacacatatttatttgtctaaccctaaagctacccgtgaggattacgttaacggcttacaggtcagtgaattgtattttgacattattaaaaatattgacccgctttcccgtatgcacttagtggtcaaaaacccacaacgcaaaggcgataaaactgagtttgctgcatttgcaaaactcgatttaggtcaggcagcaaaatatttaccaatattaagtgcatccagtgatcagatggtgatttttgatgaaatttatcaagagggcatgaaaccggaagaatggattgatgtgtacttaaatcaggtcaataaaatatcacattaa

SEQ ID NO: 300127 - DNA, 765 bp, Proteus mirabilis
atgaaaaaaacagtatttccgttatttgttgctctgtcattatttggggtagctcatttagggttcgcagcggggattccggttgttgatgctacagcaattgctgatcgtctgaaacaggatgttaaaacggctgcacaatggactaaagaggctgctcagtggactaaagagttaaaagcctatcaggatgaactgctatcaaaaacgggtatccgtgatgttcagggcttgattcaggatgcaaaggagatagctggagatttaactgatatctacaatgagggaactgcgttctacgataattatattgaaaatccaacagggattctgtcagaaaaagcacaggcattacttgataaatacaaggtcggagaaatgtgtgtgaaacaagggttttccggcgatctgattaaaggatgtgaggcgcgggttttatcagatttagccagtgtagcttatggcgaaaacttgcaggaaaatataaataaagacaataagaaaatgaaagggctgattgatcaggtgaaatcagctacagatccaaaatcaacggctgatgcagctaatgcgattgctcttgaacaactgaaatttgaaaaaatgaaattccagtatgaaatgtatcgcgataaacaggctcaactttctaaatataaagaggaaatggtacaggcggaatttaaacgccaacaattacaggcgaccattcctgattatcgtaaagcctataaatctatgcagtttaacgactttaacaattaa

SEQ ID NO: 300128 - DNA, 231 bp, Proteus mirabilis
atgaaaaacgctttatttgttgttgtgatggttatcgggatggttactttagcgggctgtaaagaggaaactaagtctaaagaatggttcaaagcacaccccaaagaaactgttgagatttataacaagtgtcaacagtctggagaggaatctgataattgcaaaaatgcaaagtggagttatcagttaatagaagccaaaagaatggctggtttacctacaggattataa

SEQ ID NO: 300129 - DNA, 1158 bp, Proteus mirabilis
atggcaaccacacaagatgcagtagattcttattggggaaccggactcaacggcggcagtgctaattttgttgtgccaagtaaaccgccattagagggacagccagcccaatatgacagtaattttttccagactgcacatgagattattactgatatattaaaatcgtccacgcagggcaaaatgggcgaatttattgatatcgcttattctctcggtaagtttggagttcaggcgtatatcctctggtatatttttaccatccttgcgggaaaacagcaaaaaaccgttccggttcaggattttatctggaatgttgttaggtttactgtgatattgctgtttgtccgtaacgtggatggttggctggatacgtctatttcatccatttacgggctgaaaaacctgtttgcgggcggggatgtttatctttggcttgatcagctttgggtcaaaactgtgcaaacagcaaaccttattttcaaattagatccctcagattatgtgccggcagcaggagcactaggcgcattatttacctatttaggcgggttagttgccctgatgtgtgccgccctgacgttctttgcggcggaagtgaccctgatgttacttactatcactgcacccttgtttattatgtgtctgatgttcggttttctacgccagatgtttaacagttggttgcagatgattttcagtgctctgcttatttttctgttcggtggtttggctctacgggcgggaacgtggtatctgaacacgatactgacgaccaacattgctacggcgagtgaacagaacctgatttatatgggcgcgagtgcgctggcaggcgggatttttatggcgtttgttatctggcaggcaaaaacctatgcctcacagattgccggagtcggggctgagggcgcattgcagggagcggctgctatggggcttgccgcaggcggttttggtatgggacgcatggctttaggcggtttacgaatggggaaaaacgcaagctctggtttgggacggggacttgtcgggcaatccggcggatttggtaaatcggaaggcttttccggtaaagcagggaatgtgaccggacaggcgacacgccggatcggaaaagaggtcgcggcgatttataaaaaacggtttgggggatga

SEQ ID NO: 300130 - DNA, 135 bp, Proteus mirabilis; identical to SEQ ID NO: 286941

SEQ ID NO: 300131 - DNA, 708 bp, Proteus mirabilis
atgaaaaaaattcaattttttaaaaacaaagaaactgccatagaaaacgcggcgttatttgaagatgtgatttataaaaaagaacaacgtctgaaatgggtttacttaggaacgggtattttaggggctttaattggtgtgctgagtctgattgctcttattattgttttaccgctgaaagaaacggaaacatatatttattccgttgataatcagactggcagagcagaagaaatgacaaaagtcacgaacagtacattaaatgaaaatgaagcggtaagtcgtttctttgttgatacctatctcaaagctagagagggatataattattttcgtttgcaacaggattatgatctggtcatgtcatacagcagtgacagtgtgggaaatgaatacactgctatatttaaatctccacaagcaccgcagacgatttacaggaaaggtgaacaaacggttaaggttgacgttttatcaaaaattatttcggattcatcaaaagctgacgaccctgataagcttgccagtgttcgttacaaacggacaattaccgaagttttaacgggttctaaacgtgaagaattttgggttgcaagaatcacatttcgctttattcctgaaaacaacctgacacgggaagaaagagacagcaatccattggggtttgttgttaccagttatttaacagaaaaggaaaacaggggttaa

SEQ ID NO: 300132 - DNA, 924 bp, Proteus mirabilis
atgaataaaaatataatcgctttattcctgtctgttttcgttatcgccatgaatgcaaatgcagccagtaaaccaacaggcagtcggttcgacccccgtaatcagataattagctataatccatctgatacaaccgtaatcaatagtgctgctggttatgtttctgtcttggttttcgacgatgacgaaaaagtgatggaaaccgatgttggatttgagcagggctggaacatcaggtcatcagaaaataaagtgtacataaaagtcacgcctgtgacacaaaccattgaagcggtaaatgatgatggtgaaacagaacaaaaacaaatggtttttgatccggagtcagatttaaatcaattcaaaacaaatttgtttattgtgacaacaaaaagaaattacagtgttgaattaaatgcaaaaacatttaaagaacctgagaaaatttcgtttgttgtaaattatcgttatccgaacgaggtgagaaaggaaaaagaaaaacttgagcaacaacgtattgcggaattaaaaagaaagcaggaaataaatgaaataaataaatcatttgaaaatgccaaagttccgcgaaactggaaatattatcagcgcgtggctaacaacagcgaatacattaaaccggattatgcttatgatgatgggcgatttacttattttggttttaacccgtccaaaaaaatcccaagcgtctttgttcagtatggtgagcaggaaacaataactaatccgactgttgaaaagaaaggtgattataccgttgtgattatacatcagacaaatgatcgttgggttttacgttcaggtgatcaggttgttggtgtggagaataaagggtatggacttgtccggttagctgattctgatacggtttcccctgatgtgaaaaaggaaataaaaaatgactga

SEQ ID NO: 300133 - DNA, 1203 bp, Proteus mirabilis
atgactgatgaacaaaaaccaaaaaccgctgctgagttagaaaatgaaatgcttgcggtaagagaaaacgtcagcacgaataatcatatagaagatgaagatactgcggaaacgccgaaacctcgtttaggtattcactcacttaagaaaacgtttaaaggtaaattacttttaggcgggatttttgtaatcctactggcgggtgcggctgtttacaattttcctgatattcttcgggggatgttttcatcagaaaaaacaacacaggacgacaccattaatacgacgaaaagcaaccgtctgacagatttgaataaagatacggcgtttgatccggcagaagcatctgtttcatcggaagtgaaaaacaataagactgagtcggcttctgccagtacgtcagacggaggtgcaaaggttgttaatgttccgtctgctccggcaacattcagccgttcactggctgtcagaattggttcagggggaacaggaagccaaaataatcaaaatactaatggagaagatactgcggcagtcagtaccgttccgaccacgacagagacagaaaaacgttcactgagcgcgattaaagtgttgccgtatgaccctaatctgtttattcctgaaaatacttcaattccctgctcgttggacaggcgttttgtgtctgatttaagtggttcgctgacctgcacagtgattgaggatatttacagcgcaaacggcaatgttcggctgatagataaaggtactcgggcgagtctgatttataaagcgggtacgctgaaacacggacaggggcgcgttttcattatggcgacaaaactcagaacccgccaacagccttttattgatattccgttgatagatacggcagcagcgggggcattaggtgaaatgggggcggatggctggattgatacccatttttgggacagattcagcggagcaatgatgcttggaatgatccccgatcttactcagggagtcagtggagcaattaaaaacaataaagacaatcagacggactataccgctaacagccgtcaggcatttgcggatattgccaaagaagcgtttgctaacagtgtcggtattccgcctacgctatacaaaaatcagggggagattattacgttgattacaggggaagatctcgatttttcgactatttaccagttaaaaatgagtaaaggcaaatga

SEQ ID NO: 300134 - DNA, 1035 bp, Proteus mirabilis
atgagtaacaataaccacattgttaatgaaatagcggcacagttctttggtgaggctctgactcagactgacggtttaactgagattgcagttaaccgccctaatcaaatgtacctgaaagtaaagggtaaatggataaaaaaagatacattaatcagctatgatgattgtaaatcatttgcctcagcactggctgatttttgcagtgattcagtcagtgaaacaaaacccattctctccgcaacattaccgacaggagagcgggttcaggttgttcttcctccggcaacggaacaagatactatttctatcactatccgtaagccgtccgatatttttatcagccatgaaatgtttgttgagcaggggttttattcaaaattagacacgcaagcaggaaacatcatcagtcctgccacgaagaagttaactgatttatacaattccggtgatattgaaacctttattcctgaatgcctgaaacagggaaaaaccattgcattttgcggaggaaccggcagcgggaaaactacttttggaaactccttgctggaatatatcccgaatcatctgcgagtcatttctattgaagatactccggaggtaaagctgcggtttcatgacaatcatgtcaggctgttttacccgtctgagggcggaaaaaacagcatcataacgccagctatgctgttacgtgcctgttatcgcatgaatccagaccgtattttaatgaccgaagtcaggggggcggaagcttgggattttttaaaagggaacagttcggggcatgcaggagggattactacattgcatgaagatacaccgatgtatgctgtttccggaatgatagaacgttgtcagcaaaatccggagtgccacaatttaccgtataacgtcctgctccgaaaggtgctaaataatattgatgtaatactgagcattaaatatttggacgaatttgataaaaggtatgcgacaggaatttactttaaagatattcataaagagcagtattttaacgaattaagggactga

SEQ ID NO: 300135 - DNA, 1875 bp, Proteus mirabilis
atgaaactgaccttaccggataaaaaacaatggctatttatcgtcggactgatggggttaatctcttattatgcggggagtgttgcggtctattttttaaatggatataacattaaattcctttttaataagtatgactcaggtgtattagggactattttaacacaaagtgagttcacatctaaattatggttatccggcgtgacagcgttaggggttgggtttgctgtcagtttaattgcacctgtattgattattgtcctgatgaataaaaacgaaaattcctcgctgtatggggatgcgaaatttgccagtgatgatgatttgaaaaaatcaaaattattgaaatgggaaaaggaaaacgaaaaaggaattttagtcggaaaatataaaggaaaatacctctggtataccgcccctgattttgtttcacttggggcaggaacaagagcggggaaaggggctgctattggtattccaaatctgcttgtatggttgcattctttgattattttagaccctaaacaggaatgttggaaaattaccagtaaagtgagagaaatattactaggacatagtgtctatttaattgatccattcaacagtaaaacgcacggcattaacttttttgactacattgaattagccaaagaaagcggtgcaaaagatttactgaaactggttgagattttatttccgtcctatggttcaacgggggcagaggcgcatttcaataatctggcaggtcaatattttactggtttgacaaaattattgtatgtttttatttatctggataaaaaatatcccgaaaaaaattatttaaatcagtttaaggttaaaagtcctgttttttctatcggctcggttgtagatctgtatggcagtattgatagacaatttgtaattgatgaaagcgaagaattattgagtttaccattagatagcctgatgctttaccatttaaaggatgggttaactaaattaaaagagtatcatttaacggaggatgaacaacgttcgagtatcgatggttcattccgtaaaaaaatgagcctgttttatctgcctactgttcgagcctgtactgaccgcagcgactttgatttacggcaattacgccgtgaaaaaataaccatttatgtcggtattaatgcagaagatctagggatagcttatgattttctgaatttattttttaatttcgtcgttgaggtgacgttacgggaaaatcccgattttgatccgacactaaaacatccttgtttattgatgttagacgaatttccgtctatcggatatatgcctattatcaaaaaaggttcgggttatatcgcaggatttaaccttaaattattaactatctatcaaaacataagccagttaaacgaaatttacggcatcgagggggcgaaaacattgttaagtgctcatccttgcagagttatttatgctgtcagtgaacaggatgatgctaatcagatatcggataaattaggttatataacaacaaaatctaaaagcgaaagtcaaagtaaaggacgcagagattcaaagagcgaatctcatagtgaaacaaaaagggcgttggtgttaccacaggaattaagcactcttgatttcaaggaggaattcatcattctgaaaggggaaaatccggttaaggcagaaaaggcactttatttttctgatccgtattttatggacagattgcttgaagtcagtcctaaactgaaagaggcagtaaagaaacttaataaaaaagacaaggttattggggttaaaggtttgcgttaccccgataaagaaatgatgttatcactgggtgaacttgaatcagaggtattaaataatgaaaaaaatattattgcttag

SEQ ID NO: 300136 - DNA, 390 bp, Proteus mirabilis; identical to SEQ ID NO: 286947

SEQ ID NO: 300137 - DNA, 552 bp, Proteus mirabilis
atgaaaaaatttttatttatcttattacccttgctgttaacacctgcattaagtcaggctgaaccagaggtgttaacgggagatgttcgtctttcctgtgaggctattttatgtctttcatcgggcactcgccctggcgaatgctccccgtcactatcacgttattttggtattaataaaaaaaagtggtcagatacgatcaaagccagaaaaaatttccttaaattatgccctgcggcagaagaaaaaggaatgcctgacctagtcaatgctattgctaatggcgcagggcgttgtgatgctgcttaccttaataaatttctgtatgaagaaaagaaagagcaaaagtgccgcagtcggggaaaggaagaagattgttggtatgaaacgtactatcgcataaaaaatgaacttcctaactattgccgtgcttacgttaatcatgaatggactgatttagatagtagcctgcattatcagggaaaaatggaatgggttaagaaagaatctgtggctggttggaataatcagggcggacaatgggttgattaa

SEQ ID NO: 300138 - DNA, 279 bp, Proteus mirabilis
atggaaactgaaatgtttagggtaaatctggcagactggattaaacaggaagaaacagaatccggtgaaaatgctttttatcatcctaatactgaatacttcaaagttatgcgtgaaatcaatcagtatgaaactgaatttattgctaatagtggtgatttagtaaaaatggctaaaaagcattctgctacttataatcaactcaatgaaaaagataaagattttgttgattttcgccttgatgaagaaattttcttcataacttatgatgatgagtga

SEQ ID NO: 300139 - DNA, 624 bp, Proteus mirabilis
atgaaaatcagttcaataaaaacagtttacgattttatgcgttactgccggatgccgctttattttcagcgttcagtcagagatatgaaagtcggtgatacttttattctcggaaaatatacacaacacctttccggtgaagaaaatagtgtgctcatgcctgtcagtgatgatgaaccatgttatgtagcggaagcatggatagaaaaagaacgcgggctttattctttctttggtacatggacgtttccgactaaaccgacacgggcatttataatgacctcggggaagtttaaaatactgaaaggagggattattgaatttgaaaagtcagagtcagtgaagtcttttgcactggtttgtcgttatcttatgtggcttgtaaaaaaaatgccaaaagaggaaaagcaacgatatttttctgctaacagcgttccgttgtttatgggtatctggctggacagtgatttgatagaaagaaaaacccgcgcttatctggcagaggggaaaccaaaacccgtccggatggattacagtgaatatgcacctacacatcaactggcggcgatagtggatgcggcattttctttaggtgtaattcaggaaattcagaatgagggatga

SEQ ID NO: 300140 - DNA, 2145 bp, Proteus mirabilis
atgagactgtttatcgcagaaaaacccgccgttggtaaagatattgccaatgctctggggagtgctgttcgcaaagatggatattttcagtgtgggcatgattgtgttacatggtgtgtcggacacattattaaaagtgccgaacccgaagcctataatccggattataagagctggacgaaaagtgatttaccgctgaaaatgtttccggttaagtatgaaccaaaagccgaaaccgccgcacaggttaaaattgtggttgatttaattgaaaaggcagattctatctgtcatgttggcgatccagatgatgaggggcagcttctggtcgatgagattttaatttatgcgggtaatacaaaacctgttcagcgggttttaatcaatgacaacacccccgctgctgtaaaaaaagcattatcttcaccacaggataataatcacaaaaaattcagggggatgtttaataaggcattagcgcgaagtgtaggcgatgctattttcggaatgagcatgacccgcgcctgtactatcgatgcccgtgagaacggatataagggtgtcctttctgttggtcgcgtacaaacgcctgtgttgggtttaatttgccagcgataccttgactttaccaaccataaagaaagtctgtatcagaccattcaggggcaatttttgcatgaaactgcggggcgttttgtcgctaactggaaagtcagcgaaaatgcaccacaggatgagaagaaacgcctgaacaatgaagattatgcaaaacgactaacacaatcttttacgggaaaaaatgctgaaattatcagcgcagccgttgatgagaaagaaaccactccgccattgccgtttaatctatctgaattacagcaaatcctcaataaaaagcacaagttatctgctgataaaacgctgaaaatcacacaggatctgcgggaaaaatacaaatgtatcacctataaccgttctgattgttcgtatctttctgatgagcagtttgctgaggctcctcagatccttgaggctctgaaaaaatcgtttcctaatcaaccaaatgttgacagccagcgaaaaagtaaggcattcaacagtgagaacgtcacggctcataccgccattattccgacaacggcggttcctgatttgacacagctaagtgaacaggaaaaaattgtttaccagataatagttgaacgttatctgatccaatttatgccgaataaatgctatcaggaagcctctgttgttttaaaaatcgggctggaatcattcagtacccgcgcagtaaatatcacaaacaaagggtttagtgccttttcagcagaagaaagcgacgattcgggacaaaatgacgaagaatccggtgattttgatatactgaaaaaacttcgtactggtgaagctgtcagatgtgaacaggctacgtacaaaaataacaaaactaaaccgcaaccgctgtttaccgaagcaacgttgcttaatgcaatggacaatattgttaactttgttaccgatccacaaattaaagctttgctgaaagccaaagatgcgggaaaaaagaaaggacagagagggattggtacacaagcaacccgcgcaagttttgtgccgttactgatgaaacggggctttattatcatagaaaaacaaaagctcattccgacacaagccggactggattttttccagtcattaccgaaaaaggttattcagccggatatgacggctttctggtcagaaaagcaaaatgatattgaatcaggtgacttatcagtagataattttattgatgcattgtatgcggatattgaagaactactgacacaaacagcagttaaagtcacagataaatcgtcactgcaatttttatcttttccttgcccgtgttgtaactctggcgtgacagaaaaagcaaaattagttgtgtgtgaaaaaaattgcggatggaaattttggaaaacaattgcgtcaaaagaactatctgctaaacagattgaaacattatacgaaaaaggaatgaccagttttatcaaaggatttaccggaaaaaatggtaagtttgaagcgcagttaaaactggaagataaaaaaacagggaaaatttcatttaaatttaaaccacgggaagttaaaaaatga

SEQ ID NO: 300141 - DNA, 207 bp, Proteus mirabilis; identical to SEQ ID NO: 286952

SEQ ID NO: 300142 - DNA, 477 bp, Proteus mirabilis
atggcagatttaaaaagagaagaagaaatcgagattgttgttaaaaatctttccggtttgacagctttaagacgctttgctaacacccaatcatttgattggctggaagatgtttctaataaactgttaactatcatcagtgaaaaacgtgaagaagaagaacttcgcagactggaactttcagaacaggaagaaaaacgcctgaaagctctcaaatatttagaagaactcggacttgatccggaaacgattaatgtctctgtctttgatacagagccaaaacgtaagaaaaaaagaaaagccagcactgctccggctaagtatcgtttcactgatcctgacacaggaaaggctgatacatggactggtatagggcgaccaaaaaaagggttacaaaagcttttggaaaaagggcatgaattagacgaatttttgatccagcctgaacttcgcaatgaagaaaattctccgctttaa

SEQ ID NO: 300143 - DNA, 474 bp, Proteus mirabilis
atgcacgacagtttatattgtggtaaacgtttcagaaaactcaatattattgatgaagggacgcgtgaatgtttggcaattgaggttgatacatcacttcctgcagagcgtgttataagggtactagaacgattaagaatggaaagaggattaccaaaacagatccgagtcgataatgggcctgagctaatctcgattaatttattgaattactgcaaaactcaccacgttgagctttgccatattcaacccggcaagccacagcaaaatggctttattgaacgatttaatggctcatttcaccatgaatttttaaatgcctatttatttgaatcattaaatcaggtgcgagaaatggtgtggttttggcagcaagattataatcagaaccgtactcatgaaagtttaaatcacctcccgccggaggcatacagaaaacagttagaaaactctaatttaacgtgtctcaattaa

SEQ ID NO: 300144 - DNA, 642 bp, Proteus mirabilis
atgcgtaagcttgatagaatgctcgctaattcaccccaatgcttgggtaattattcttatctggtgaataaatgggatgatttaacccaaaagcaaatggtctggaatgagttagataaatttcaagataagatttgtgtttattgcgaaagtgttgcggagaaaggtaatggtcacatcgagcattttttccataaggctgatgcacgattcactaatttaactttcgattggggtaatttatttggttgttgttcttcaaacttacattgtggtcactataaagatcaaattttaacaggtggggttaaaaggcaatatgacccttatgctttgattaaacccgacgaggaagatccagaagattttttgcaattcctagaaagtgggaagataaaagccaaagacggtatcaatgatgcgatgaaagagagagcgtcaaaaacgatcactgctcttaatttggattgctctgcactaaattcttcgagagaaaatcaaattgataggtttaaaaaaagattgttagctttaacaaatattgatgatgaattacttttaactgaggaatataaccgaataaaaatagaagccatgaattcatttcatagaacggctttaaaacagtcactctcttggtga

SEQ ID NO: 300145 - DNA, 1677 bp, Proteus mirabilis
atgaacaggaatgaaagagttaacaaagaaatgttaacactcgagagaagatctaagaaaggggatgtcttttcagcttttaagttatacaagtattatgaaaatggaatagttgagcgtttagataatggcgaaataaaacagattatagctgccgatgaagacaaagccaatttttatttgggggtttgtcatgatattgtcattgataattctgattgcgaccgtaaaaatggattttattttaaacgtttatttttaactgattttagaaagtttaaaagcttacacgttaaacttgataagagcttaactgtatttattggtgacaatggatcaggaaagacaacggtaatagatgctcttgttaaagttataagttacatcgcatcaaatatcgttcgtaaaaatggtaaaggtaagcagattagtgagtatgatgtgaattcagactcggaaagatttgcagagataaaatcacaactatatttgagcccacattctttatgtgaggctgctctcaggaaaagttctaaaatttatgcggaacatgcatttagccatattgagtcattagaggaattaggtgagctttataggattttatcgagctcaagaaatgatagaggaaatgaaaatatcactcttcctgtttttctgtactattctgtagacagaaataatattaaaactaatagaacttttgacgaaggaagtatttccgtttcaacggaaagattttcttcatacgataaaaaagcattagatggcgcatctgatttttctggattcttggaatggtttatactcatagataatcttgcagatagtaatttgaaaagtagtattgaagcttcagataaaagaatttcaagtttaaaaaatgctggagcctgtgaaaaggaacatgatttatatggtctttatatcaatgaattagctgagcaccaaaaactatctcaatctttagagaataaaaaggtttatttaagaaagattgatctcattaagagtgtcatcaaaaacgcaattcctggatttaaagatatctatgttgataaaaaaacaggccgagcggaagttatgattgcaattgatgatgagagaattaacatcacacaaacatctcaaggacagcaagtcttggtttcactcatcactgatatagctcgacgtattttaactttgaatcctaatttagataatccattggattcttacggtattgtagtgatagatgaaattgaacttcatttacatccaaaatggcagcaaaatgttgttaatgccttactaaaatcttttaaaaacgttcaattcgttataacgactcacagcccacaagtattatctacgattgataagaagaatataagaatgtttgttaaaaatgatcaaggggaaatgagatctgtctctcctactttccaaacaaaaggtgttaaaagtgcggatgtgatggctcgtataatgggggctgattcaatccctgatgttaaagaagcaagagatgttgatgaattttctcaattattatctgaaggtaaaaaagatgatgcgctttctcttttagatgagttaaagcttcattttggagaagagcatcctgttattcttgattgtgaaaactctataaaaatttatgaattaaaagaaaggattaggaataagggctag

SEQ ID NO: 300146 - DNA, 915 bp, Proteus mirabilis
atgttcactgaagcttttgctcgaaaaatggacagggatgaacttgagataacagaatttctcatgaatgctcctgataaatataaagtatacgctattccgaaaagaaagcagggatatcgaataattgcccaaccatcacgagagctaaaacattatcagcgtcagttgcaagattttattatatttcctaaacataaatgcgcaatggcgtatcgcaaaggattgagtataaaaaataatgcattgtctcatgtgaataattcgtatcttcttaagttagacttagagaatttttttaatagtattacaccggatcttttttggagtgtatggtcaagaacttggtctttaccatcaaaagaagaccaattttttttagagaaattgattttttggcgttttcagggctctttaatattaagtgttggagctccaagttctccttctatatcaaatttttgtatgtattattttgacagcgaagttgaagctatatgcacgaaaatgaaaataacttacactagatatgctgatgatcttacattttcatcgaacgtaaggaatatattgtttgaaattcctatgttaattgaaaatatcttgaatgaacaattcaaaggtttgcttagacttaattcgagtaaaactatcttttcatccaaagcacataatagacatgttactggcattacacttaacaatgatggcaaaatttctttaggtagagatagaaaacgatatatcaagcataaggttcatttgtataccttgggtatgttagatgctacagaactcaatcacctaaagggtatgatcacatttgctagattcatagagcctgcgttctttaaatcgcttgaaacgaaatataactcgaatgtgatttttaggcttactcaggagaaaatatga

SEQ ID NO: 300147 - DNA, 1446 bp, Proteus mirabilis
atggggagtaatagctggcgggaagtaaaactatctgatttaggtgaggttgcacgaggtcgttcaagacatcgacctagatatgctgaacacctatatgggggagaatatccttttatccagacaggagatataaaagcttctgaaggtcgtatttcttctcatgagcagacatactctgaggctggtttggctcaaagccgtctttggccagcaggtacaatgtgtataacaatcgcagcgaacatagcagagacgggagttctacagtatcccgcatgttttcctgatagtgttattggttttattgctgataaaaataaagcagatgtctactatattgagtatgtatttagaaagttaaggaaagatattcagcggcaagcaactggctctgttcaagataatattaatctccagacttttgaacgattgaagtttaaagtacctcatgttgaagaacagcatagaattgccaactttcttaaccattttgataaaaaaattaccctcaaccgccaaatcaaccaaactctagaacaaatggcgcaaacgctatttaaatcatggtttgtagattttgatcctgtggttgataacgcgctagatgccggtttttttgagcaggatttagctttctctgatgaattactgcgtcgggttgaaatacgcaaagcagtgcgtaaaagtgataattttaaaccgttagcagaagatattcgtcaattatttcctaatgcttttgaagaatgtgcagagtctacattgggacttggggggtgggtgccgaagggttggtctaacagtaatttaaatgagcttattgatataaaacatggttttgcgtttaaaggagattactttagtgatagagaaactaatgacgtgctattgactccaggaaatgtacgtattggtgggggattcaaatttgacaagtataaatattatgctgggccaattgaaaagaattatattttttcatctggagatatatttgtcacaatgacagatttaagcaaaacaagtgatacacttggttacccagcgatagttcctgaaaccacaggaaaagtctttcatcataatcagcgtcttggaaaagtaatcttaaggaagcatcctgcctcacattctatgtttatttactatactttatgttctgtagcatatcgtcaatttattttaggaagtgcaacaggaacaacagtaaagcatacatctccaaagaagatactcagttataaactggttcactcattgaatgggggggttgaagcaaagtatgacaaaatagtatctaaatataatttgatggttttaaaaaatgataggatgttggatactttgatcactattcgcgatattctccttcctaaacttatctccggcgagttgtctctgagtgatataaaaatagacattccagaagaaacactcatctaa

SEQ ID NO: 300148 - DNA, 2067 bp, Proteus mirabilis
atgagtgatcgctatgttattgaagctttattgcgtccagcggtcgaatttaataccgctatcgtgacagcgtgtgcaagttatctttgtattactgcaccttgggcaatggctttagcaccatctgttagttatgtcacggcatcagggtttgctattttatcaataaggcgagttattcaaggaagtcgcgttttacgttatcgtcgtaatattcgtcgtttaaaacgttatgtgatgtcgagtaacaatatccctgtaagccatcatcaactcttcttaggaaaagggttcttatgggaacaaaagcacacacaacgattattagatacgttacgacctgaggttgctaaatatattcgcccacctaagctgtatcgtgtggcacgtcaatttgaacaacgctatgaatatcatttcccttcactatgttcattattagcatccgattcgatatttaatcctgttcgcccattaccacccgttggcgggaaccctgcaatacatgggattgagttaaaagaggtaaatgtctctataaacttaagtgaacgagtggggcatatgttggtattaggaacaacgcgagtgggtaaaacacgttttgctgagttactgatcacccaagatattcagcgaggtaatgtcaccattgtttttgatcctaaaggtgatgctgatttattaaaacgaatgtatgccgaagcgcatcgagctggacgagataatgagttttacgtttttcaccttggatggccagatatcagtgctcgttataatgcagttgggcgttttagtcggatttcagaagttgcctcacgtatcgccggtcaattaagccatgaaggaagcagtgctgcatttaaagaatttgcatggcgttttgtgaacattattgccagagcattagttgcgttaggacaacgacctagttttagtatcattcagcgttatgtaaataatatcgaattattatttgaaatctatgctgagtattggctaacaaagcataagcctgagttatggcaactcatcgaaaatctcacccaaatattagatgaacgtgatattccacgatatatggaaggacgttccttgcgtgttgttgcgattgaacaagtgctaaatggtaatgaaggaaaagcgatattcgatccgatattagagagcttacgctcttctgttcgttatgacagaaagtattacgacaagattgtggcaagtttattgccgttattagaaaagctgacttcaggaaaaattgctgaattaatttcccctgattacgcagatatctctgatcttcgtcctatttttgattggttacaggtgatacgtaaaaaaggcattgtgtatgtgggattagatgccttatctgatcctgaaatcgctacggcggtagggaacgccatgtttgccgatttagtaagtgttgccggacatatttataagtttggcattaatgatggtttaccgaatgcagatgaaaaaaagtcatcaattagtctgcattgtgatgaattcaatgaattgatgggggatgagtttattccgctaattaataaaggtggtggtgcaggaattgaagtaacagcctatacgcagactttacctgatattgaagcgcgagttgggagtgtggcaaaggcagcacaggttgtgggtaattttaatagtgtggtgatgttgcgagtgcgacatactgaaacggcagagctattaacgaaacaattacctgaagttgaggtgtataccaaaatgttgatttcaggagtaaccgatatttctaatgctgatatgggcggtgattttacctcgaatacacaagatagagtaagcaccgttagaacacctttaatcacgccagcaaatattatcaatctacctaaaggtcaggcttttgcattatttaatggagggcaactttggaaattaagaatgccgttaccttcagataaagcggatctgttaatgcctgagagtatgaatcaaattgtggattacatgcgacaacattatagaacgagtgatacctggtggtctgatagtattctcaccaatcagtga

SEQ ID NO: 300149 - DNA, 741 bp, Proteus mirabilis
atgagtaataagtatttaattgataataaggtcattcttgatatcgatagaatgacactatcacacgatcatgaaagtattaaaatttctgaatctgagtgtaatttgttatgtgcttttcatgagggactctttaaaaaagaggatttaattgattgggtatggggacgtaaaggtgtcattgtttctaatgccagttattataaattacttaatcaattacgaggttcatttgaaaaaataggtctttcggcatccgctattttaactcgccctaaagtaggtgtgacgctttctgtcactattgaaaaacttcctgatgaaattgaacccccttattcaacagaagctccgttgaatgatacacatgaaccaattatagaactacctgtggtaacaaaactcatacctcggcgagtttctctgcgtaaagaatggttttttttagtttgtgctaccctgttccttgcgagcttactatttctatttaacaagcagaataccgactatttttctccacttggaacctacaatggttatcaattttatggtgtcaccaaagataatcgtactttagaaaatgccgtagaagcttatacggaactcagtagccaagtgtataagcaaaatggtaattttatttattatattcgtgttcctaatacgaatatttttgttcagtgtcttaatcagctgaatgttgaggagcccaaatgtataactataaaagaaatatactga

SEQ ID NO: 300150 - DNA, 528 bp, Proteus mirabilis; identical to SEQ ID NO: 297383

SEQ ID NO: 300151 - DNA, 2799 bp, Proteus mirabilis
atgtatcgtaagttactgattatctcagtcagtttatcacttctgggttgtgcaacaggcacctcgtctgagcataccaataatgccctttcactgcgccccgatattcgccattttacgcttgataatggcttaaatgtctatttgctacaacgcccacaaacgggggttgaaatgcgtttactggtgaaaagtggctcggtacaagaagatgaaaaacaacttggctttgcccactttaccgagcatatggcctttaaaggcacgactcattttccgggaacaactgggtttaaacagcttgaaagcctaggaatgaagttggggagtcatgttaatgcggcaacgagcttaaactcaacaacctataaattatccctgcctaatgccaatccgacccaaataaaaacagggttgaggatcttatccgattgggcctttggcatgacatttgatcccgttgagtttgataaagagcgtccggtgatcgtcgaggagtggcgattacgccaaggtattggttttcgtattaatcgccaacttgaagagttacgttattatggcagtcgttatctagatcgtgatcccattggggacttagatatcgttaagcatggtgatgtcaaagaagcaaaacgttattacgatacttggtatcagcctgaaagaatggcattggtgttagtgggcaattttaatcaaggcgatgcgattgctgatattacccaaatgttcaatgcaaaaaatagtgaaaacaaaggcgttgactctccatcatggcaccgctttatcgacaataaagatttattagtaaagacgatttttgataaagagcaaggctcacgcattgtgcaattcactctacagcgtacactgcctgcaccattaaatagtcgccaaggtcaatatgatgatttaatggactcgttgtggctctccatcttaaatcagcgcttttcaaccattgttgataatggattagtgccttccgtcagtgctaacacacaaggtgcgatgttagatgcccgtcgctcacaacaattgatgattgcccatcctaaaggggatgattatcaaggtacattagatattctatttactgaggtacagcgtttagcctcacagccagtatctcagcaagagttagataatgctcgcaatgcgctgttaaaacgtcttagccaacaagctgctggtgaagagcgctatgagcatggttatttagctaaccaaattactacggcacttgaattagaaatgccaatccaaagcaaaaagcaggcgttaaacttaagttatcaactaataaataacgttacacctgataccttaaaacactattttgcccaatacctaacacaagcttcaccacgagtggcaattatcggcccagatagtgatagtcaggtatttagtgccactaaagcctcgcaacgctggcaagagattagacaatctgatcccggtgcgtttacattgaaaacccatgcggtggtattagatattaaacctgagcaaaccggtactgttgtcaccacacaaacacttccgattgaaaaaacacagctgtggacactgagcaataacgtaaaagttattattaaaaatgaccagtggctaaaagacaatatccaagtatcactgcgtattcccggaggtgtttctctggaaacaggacaaagtttaggcttggtacagtgggcattaaacttaccagaagtgagtggatatgggcattacaacgcaagagagttagcgttatttagtaaacagcatcaaatcagtttgcgtccatacagtgagttgttattccacggcttgcgtggcgaagcgcctattgatgagttagacaccttgttgaccttattgcatttaaaagtgacggcaccacaatttaatgggcaaaaattagagcaacaaaaacaagcaacagcattagggatcgccaaaacaccggttgaacgtattttcttagatcatattaataaagagagctatcaaaacggtgagcgtttagtaatttcgccacaaggcccttggcaacagtttaccgcacaacaattacaacaaacgaatcaatcacttctaggacagcctgccgatatggtattggtgattagtgggcctattaacctaaatcaggctaaaccgatgatcgaacgttggatagcaacgctaccgacacgttcatcgcagcgtctattttgggctgatccggcgattaatcccaaattaagctcatttaataaaacctatcctattgccagtagcgataagagtatgatcagtattcaatacgcagccaaagcccaatggtcacaacagcaactgttagcacttaacttgcttgataccgttgtcagccaacgtttaagacttaatcttcgtgaacgagcgggcgggatctactcgctaggcttttctgagtcactaaccaagctgccaagtagtttttataccggacgtttaaactttaccgcatcaccacagcgggcagatgaattaattgcacttgcgcgtaaagtggtcaatgacgtaaaacaagcaggtattaccgataaagaattacaagaggcaaaaaatatttggttaactgaatatgggcaagccaaagagagtgctagctattggactgatgcacttgcccaagtggcaacagatgaccaacaatatcaacgactattaactgagactgctattgtcaacggaataagtgtcagtgatgttaatcaagttgctcgtcagtggttgggtgaaaatgaaaaaatcttcaaactaacaccaccaacaaagcaataa

SEQ ID NO: 300152 - DNA, 417 bp, Proteus mirabilis
atgattaataaatttaatcagcttacaaaccatcccgatttaggtaagtttgttttacgtgtttcgctaggtgtcttaatgttattacacggattacacaaaatggagccaggaggacttgccggtatacagggaatgttggcaaatattaatttacctgcatttattgcttatggcacattactgggtgaagttctatgtcctatcttactgattatcggtttatttactcgattttcagcatttgttgtggcggcaaccatgggggttgcggtgctgatggtacattccggtgatcttttagccttagatcccaaaacggggggatgggcacctgaaagtgctggcttctatatgtttgctgcgattgcggtgatgtttttgggtagtggtcgttgggcgctcaaaaaagattaa

SEQ ID NO: 300153 - DNA, 2019 bp, Proteus mirabilis
atggcacactattcttatttattttctccccttgatttagggtttactacgcttaaaaatcgtattttgatgggctctatgcataccggactagaagaagatccacatgatgcacctaagcttgctgaattttatgctcaaagagctgcagcaggggtggcacttattgtcaccggtgggatctcccctaataagcaaggtgtattgttgccacatgcagcaacgctaatgtcagaagatcaactcgcttctcatcaattagtcactgatgcggtacataaacaggatgggaaaatcgctttacagattttacatactggtcgttatagttatcagcctaatttagtcgccccttcagcgatccaatcacctatcaccccttttatgccccaagcaatgagtcaggagcagatagaacagactattgaagattatattcattgcgctaagttggctcagaaagcaggctatgatggtgttgagatcatgggatctgaaggctatttaattaaccagtttttagtaagtcatacgaatcaacgcgatgatcaatggggtggctctattgaaaatcgttgtcgttttgcattacgtattttagctggcataagagaagctgtgggtgaacactttatcattatctatcgtttatcaatgttagatttaattaccgagggagctaatgcctcagaggtattttatcttgctcaagcagtagaaaaggccggagcaaccctaatcaatagtggtattggttggcatgaagcccgtatccccactattgccactatggtaccaagaggacaatttgcttatgtcactcgccaattgatgggaaaaatcaacattcctcttatcacttctaatcgtatcaatacacctcaagtggctgaagctattttagcggaaggctgtgcagatatggtgtctatggcgcgtccttttcttgccgatccgcaattcgtattgaaagcgcaacttggtcgcgaggatgagataaacacctgtattgcctgcaaccaagcttgcttagatgagatattcagtggtcacccagcatcttgtcttgtaaacccttttgcctgtcgagaaacagagcttattttaaccccgactcaagcccctaaaaaaattgctgtcgttggcgcaggcccggcaggattagcatttgccattacagcagctaaacgtggtcatcatattactttatttgaaaaagaagagcgtattggtggacaactcaatattgccagtcaaattccgggtaaagaagaatttaaagagacattgcgctactttaagcggcaattgcaaatcacgggggtgatcgtaaaaaataatacggaagcgacactttcccatctgcaacattttgatgaaattattttagccagtggtgttatccctcatattccagagattgatggccatgataatccgatagtaaaaacctatcttgatgtccttaaatatcatcagccaaccggcgaaaaagtggtgattattggcagtggtggtattggttttgacactggcctttatcttacccaaacaggccaatgcagtagtttaagcccttgtgcatttaataaagagtggggaattgacccaacacttacgcatcgcggagggatcacctcagccgatccttttattaaaaaagacaaacagattgttatgacgcaacgtaagagtgggaaatttggcttaagtttaggtaaaacaacaggctggatacatcgcttaacattgcagaaaaaaggggtcaaatggctcacgggctgccattatcaaaaaattaccgagcaaggagtaataattgaacataatgaacaacagcaactgctcgcggctgatagcgtgattttatgtaccggacaacaatcttatcgtccgctactgcaagcgttacaacaagaaaataaaaccgtccatcttattggcggggcaaaagaggctaaagcattagatgccaaacgagccattaagcagggaacagaattagcacttactatttaa

SEQ ID NO: 300154 - DNA, 318 bp, Proteus mirabilis
atggcaactattacagttaaaaagtcacgcaagcctgagtttttacgtggagcatctgcaaatagacgtcacgccagacggaaagcagaagctattgcaaaaaagaatattgaattgaaattagaatcagtattccctcaggagaaaagacttacatcagtagaaaaaacactgtcattaagtcacataccagttactagaaatattgaacctaaattcaaaccatcggtagataactgttgcttacctaatgtagcagtattttcaggagttaaaacaaaacagccgagcagtgagttcggggtgacggcaagataa

SEQ ID NO: 300155 - DNA, 264 bp, Proteus mirabilis
atgcaaatttcatacagctactcgaacggaactcgggtaatagacggtaaaacagtcatggaatttgacgaaagtagcaagcttagtattgagacaggaagtttcagtgagttggccaagttaacggagattgactcagttgaggcaatggaatatgtgctcgattgtgacgatgaatcgcttgaacggactatcaatgcgataggcaaggaagcctttattagcaggatattgcgcatttctaagctaaggagggctgcgtga

SEQ ID NO: 300156 - DNA, 321 bp, Proteus mirabilis
atgaacgtttctaactcataccctaccgataaatacccccaattaacatcaccgtcattagcaaaaaacagagaggaagctctggctcaagctattgcaatgattgaggggtgtttgccaaatacgagtgcgccagacagggaaaaacgattagcaatggaactgctacacatgaacttggacgcatcgaaaaatcaccctcctctacctgctcatattcaggcattacgtgatgcggaaaggaattctgcaccgagtaataagtttgaagtcgattactacggaagcgatcgccgtcagggtcaatatttaggggattaa

SEQ ID NO: 300157 - DNA, 807 bp, Proteus mirabilis
atgaggttaatccccctatccacggcacagcaagtgggaaaatggtcggctaattatatcgttgagaaaatcaacgcatttgcgccaagcgccgatcgtccttttgttcttggtttacctactggtggtacgccattagcaacgtacaaagcgctaattgaactacatcgtgcaggtaaagtaagtttccagcatgttgtcaccttcaatatggacgaatatgttggcattccagcagatcacccacaaagttatcgtacttttatgtatgagaacttttttaatcatattgatattaaagatgaaaatatcaatttattaaacggtaatgcaacagatccacaagcagaatgtgcacgttatgaggcgaaaataaagtcttatggcaaaatcaatctgtttatgggaggtgttggtaatgatggtcatatcgcttttaatgaacccgcctcatcactcgcttctcgtacacggatgaaaacactgactgaagatactcgtctcgctaattcacgattcttcgacaacgatatcaataaagtgcctaaatatgcgctaactgtcggtgtagggacattattagatgcagaagaattaatgattttagcgactggcatcaataaggctcaagcagtacaggtggcaacagaaggtgctgttaatcatctatggactatctcttgcgtgcaattacaccctaaagcaattttagtctgtgatgatccggcgacaatggaactgcgtgtgaaaacactgcgttattttcaacaaattgaagcgcaagagcgccagcaataccaagattaa

SEQ ID NO: 300158 - DNA, 1164 bp, Proteus mirabilis; identical to SEQ ID NO: 294369

SEQ ID NO: 300159 - DNA, 1233 bp, Proteus mirabilis
atgctgatgagtcacaacaacactgaaacgcaaattggcaatatcgatcttgttaagcaacttaacagtgcgattgtatatcggctcattgatcaacacgggccgatttctcgtattcaaatcgccgagcagagccaactcgcccctgccagtgtcactaaaattactcgtcagcttcttgaacgtggcttgattaaagaagttgatcaacaggcttcaaccggaggtcgtcgcgcaatatccattgttgtggaacatcgccgttttaataccgtcagcgtccgattaggacgcaatgatgtcacggtcgctctttatgatctcagtggtaaagccttagtagagcaacactaccctttagaacaaagcacccaacaagaagttgaaaccttgcttattaatgctattgatgattttattaaacaaaatcaacgtcgtattaatgagcttatttcaatttcaattatcttgcctgggttagttgatcctaataaaggcattgtccactatatgcctcatatgaaggtaaataactgggcactcgttgatagcttagaaaaacactttgatctgccttgctatgcgggccatgatattcggagtctcgccttagcagaaaactattttggtgccaccagagattgtgaagattctatcttagttcgtattcatcgtggcgcaggggctggtgttattatcaacaacaaaattttgctcaaccagcgtggtaatcttggtgaaattggtcatatccaaatagatccattaggagagcgttgccactgtggtaactttggttgtttagagactattgcgtccaatagcgcaatagaagctaaagtccgctaccaacttgaacaaggctatcccagccagcatttatctgcaacacaatgccaaattcaagatatatgcgatgcagcggtaaaaaacgatcccctcgctgttgaaaccattaaacaagtgggtcttcatctaggtaaagccatcgccattgcaattaacctatttaacccacaaaaagtagttctggcaggagaagtgaccgaagcggctgaaatattactaccgtcgatccaaagttgcattaatacccaagtattaaaagagtttagagaagcgcttcctgttgttatctccgaacttgatcatcgctcagccattggggcatttgcacttaccaagcgagcaatgcttaatggagagttactacaatatttattcgacaaataa

SEQ ID NO: 300160 - DNA, 618 bp, Proteus mirabilis
atggctttttggcgatatcaaatagctggtgagcttttgatcacccttatcctaatttttagcattattatttactctataactttgaggttaaaaaaaacggcaatgtttagtcgaaaaacagaaacaccaaaagccgcggagcctattgctccagttatggcagaagaaaaaaagcctatgccggagcaaaaattgtataccattattgctaaaggcactgtatttcaaggtgatattaacgttgatggtgatattcaaatttggggtaaaatttcagggaatatcaatgtaaaagatggcgtgatccgtgttatgcatgcaggccaagttgaaggggaattaacggcaccagacatcattattgatggttttgttaaaggtatttgtgccgcaaacaatcttgatattctagagcatggtgaactacgtggcactagtcgttgtggcagtatgtcaattaaacgtggcggtgtctttactggacaatctgaacaggttgaacaccaagctaaagccgttgcacagcaacgtgttgtatctattaaagaaggtgcagttaataccaataaagagtctgtaattgcagaaagtaaactaaaagaaaataaaaaataa

SEQ ID NO: 300161 - DNA, 873 bp, Proteus mirabilis
atgtggcagaatattggtcgtttgcttgaatcaaatttaggattttcagcaaagatcagcgaaaaacaccacctttcaagcggtgatatacaccacacttggaaaattcaatatggtgagatccctgtctttgtaaaatctaacctacgggaatttttgcccacctttaaaaatgaagcagaacagcttgaaatgttggcaaaaagccaaacgatccgtattcctcgcgtattaggcattggcaatagtaaagatactagcttcttactgttagaatttctgcctgtgcaaccttttacacctcacagcgcgtattgttttggtcaacagttagctaaattgcatcaatgggaagaacaaccccgttatggttttgatttcgatacccatatagataccacacctcaagcaaatggttgggagaagcgctggaattacttctattcagaaaagcgtattggtatccagttgcaactcgcttcagagaaagggatggttttcggtgatatagaagaaatcattcaaatcattaatcaccgtttagccgatcatcatccacaaccctcgctattacatggcaacttatggcctaaaaattgtgctgctataggtcaatctgaaggaacgatgttcgatcctgcttgttattggggtgatcgcgaatgtgatattgccatgctaccactatgctcttcggtgccagcgaatatttttgatggttaccaaagcatctggcctttatctgaaaaattcctatcacgccagcctatctaccagctctactatttccttaatcgctgtcatttattcggtgaagaaaaagattacctagcagccagaaaaatcattgatgatttgctcggtacacactaa

SEQ ID NO: 300162 - DNA, 540 bp, Proteus mirabilis
atgagttatcaacatgcaggaatatatgccattgtaaaacgtgttattggttggcttatttttattcctgcctttatttcaacgacagtttcgttgattgagttagctgcgatgccaagagcaaatggcgagggtgttaatgctgtaattaatgatttttttcgagtattagcagaaatggtacaatttaacaccccgtggctagactttttttggcgtcattctccagtacccaacactcaaataggttttagccaacagaatattatcttctttgtgatcttctttttaatgtttattggcttagcactgagtgcatcagggttaagaatgtatcgccaagtgaaatatttaaaagaaaatattcaagatcaactaattattgaacgagcactaaaaagtggtattacagcgcaagagctagagcagaatataaaattgccaagacatacactatttactcaagtcatggtgctgtatatttcacctattattgttatcgcaattggttattttctgctgaaatttttaggctggtag

SEQ ID NO: 300163 - DNA, 669 bp, Proteus mirabilis
atgtcttttaaattgcccattgaagccgctatttttgatatggatggtttgctaatcgactcagagccgttttgggcacaagcagaacatgaggtctttgcacaattaggtgtcgatttatcacttgctgacagcatgcccgacaccgtcggcttaagaatagatcaagttatcgaactttggtatcaagtatcaccttggcaaggcgtaacacaacaagaagctaaagagagaatgattgctcgcgttgtacaacttattgaagataaaaaaccgctgctccctggtgttgaacatgccctatctttatgtcaatcattaggtttaaagatagccttagcctcagcatcaccgcattttatgctagagcgtgtacttgagttatttaatattcgtcattacttctctgctgttgtctctgcagctgatttagcgcacagtaaacctcacccagaagtctatctcaatgctgctaaggcacttaatgtcgcacccattaattgtgtctctttagaggactcacgcaatggtatgattgcttgcaaagctgcaagaatgcgctcaattgttgtgcctgcagcggagcagtttaatgacaaatgttggggattagccgatgttaaaattgcctctctcaacgaattaaccaaatctcaattattaggctaa

SEQ ID NO: 300164 - DNA, 567 bp, Proteus mirabilis
atgacagccgaaggacatttacttttttctgttgcaacactcgtcttagcacagaaattagaaataacccccgttcttgctcaaggtgattggtttcacatgatccctgctgtcttattaggttcactactaccagatttagatcatccaggctctatattaggacgcctctttcggataatctcattaccgctatcaaaactctgtggtcatcgtggattcacacatagcctactcgccttttgtggtttagccattttatgggaaacacaagttgcgccatatatcacgatttcggctgatttttttcacgcccttttgctaggttacctaagtcacttactggcagatatgctaacaccatcaggtgtgccttttttatggccactaaaaatgcgttttgccttaccgattttagcgaaaaaaaatagcaaaaaaggagaacgatttatttctgtcatcatcttagttggtgcactatttctgcccccacacctaactttttctcttcccacacaaataaatcactggttacaaatgtaccacgataaacgtacacctttttaa

SEQ ID NO: 300165 - DNA, 1392 bp, Proteus mirabilis
atgaattttccgttaattattaacgtactcgtctttgttgtgctattactcatcttggctaaattaagccaacgtcagtggagcctgtcaaagaaagttcttgtcggtttggtctttggggtggtgtttgggctggcgttacatgcattctatgacgcacacgatcctattattaaagaatctatcctttggtttaacatcgttggtaacggttacgtacaactgttacaaatgatcattatgccattggtatttgcttctattttaagtgcagtatcacgtttacaccaagcatcatcattgggaaaaattagtgcactaaccattggtacacttctatttacaacggcaattgctgctcttatcggtattgttatagccaatatctttggtttaacagctgaaggtcttgttcaaggggaacaggaagcgcagcgtttagccgctattcaacataattatataggtaaagtgtctgacttaactgtacctcaattaattttatcttttattcctaaaaatccatttgccgatttaactggtgcaagctcaacctcgattattagtgtagttatctttgcggtattcctaggaatggctgcaataaaactgcttaaagaagataaacctcgcggtgaaaaagtattagcagcgattgatagcttacaagcgtggatcatgaagttagtccgtatcgttatggcattaacaccttacggtgtaatggcactgatgactaaagttgtggcaagctccaatctgcatgacattattcaactcggtagcttcgttgttgcctcttatgttgcgctgggcttaatgtttgtcgttcatggtttattagttggatttactggcttaagcccaattaaattcttcaaaaaagcaggaccattattagcatttgcattcacaagtcgctcgagtgcggccagtattccattaaatatcgaaacacaaactcgtcgcattggtgttcctgaatcgattgccagtttctcatcgtcttttggtgcgacaattggtcagaatggttgtgccggtatttatcctgctatgttagccgttatggtggcaccaacagtcggtattaatcctttcgatcctctttggattgccactttggtgggtatcgtaaccattagctcagcaggtgttgcgggtgtcggtggtggtgcaacctttgcagccctgatcgttttaccagcaatgggattacccgttacactggttgccctactgatttctgtggagcctcttatcgatatgggtcgtactgcattaaatgtcagtggctctatgaccgcaggtactattactagccaaatgatgcgccaaacagataaagagatctttaatcaggaagaagaagctgaacttaatgttaaataa

SEQ ID NO: 300166 - DNA, 924 bp, Proteus mirabilis; identical to SEQ ID NO: 296919

SEQ ID NO: 300167 - DNA, 879 bp, Proteus mirabilis
atgatgaggattgccttattcctgttaacaaacttagctgtcatgtttgtgttcgggatcatcttatctttaacaggtattcaaggccgcagtgttcagggtttaatgatcatggctggcctatttggttttggtggtgcatttgtttctttacttatgtcaaaatggatggcattacgatccgttggtggtcaagtgattgaaaatccaacctctgaagtagaacgttggttacttgatactgtaagacgtcagtctgagcaagtggggattaaaatgcctcaagttgcaatctacgatgcaccagatattaatgcgtttgcaactggagctcgtcgtgatgcttcgctggtggcggtgagtaccggattattagccagtatgagccgtgacgaagcggaagctgttattgcacacgaaattagccatgttgccaacggtgatatggtaacgatgaccttgttacaaggtgttgtgaatactttcgtgatctttatctcccgtatcattgctcaatttgtggcgaattttatttcgagcgatgaagagagtgaaaacagtaacggaaacccatgggtatacatgggcgtttctatggtgcttgaaattgtctttggcattttggcaagtatcattacgatgtggttctctcgctaccgtgaattccatgcggatgcaggctctgcaaaactggttggccgtgagaagatgatagcggcattacaacgcttaaaaaccagctatgagccacaagaagagagcagtatgatggctttctgtattaatggccgtaataagtcatttagtgaattatttttatcacacccgccattagataagcgtattgaagcactacgtagtggcgaatatctcaagtaa

SEQ ID NO: 300168 - DNA, 1353 bp, Proteus mirabilis
atgaaactaaaaagaatggtgttgtttatgttttccccttgttttttagctgtgagcgctgctaatgctgggaattgggaaaatacaattaaagaaagctcatttatttctgattctgaacttgagctgactaccattaatatgtggaaatacctaaaaacagaaaaccgttttgataaacaagagcaacgttatagaaaacaagttgctaatgcttggggtcaaaacttccaagctgatttcagatctggctatttaggtggcattctaggattcgatgtttcttattatggtggtattaaattaggagcaagtaaagacttcgcttctcgtgccatattatataatgatgatggtgaagcaaaaggctataacaaaattggtcaacgttttgcaaaagtgagattcgatttagatcctgttttaattaatggtaaagcgggttggtttaccttgaagaatacaggtatttttactaactcacagcgcttatcattaaacagttataacggctattacactaatacggcgatgggtgattggagtttagatttgctgtatctcgacggaaaagttatgcgtcgtgatagcccaaatatcgatagaatgtatttcagtgatggtaatggtgttagacataatattgaccatgttattactggtggagttaactataattccaaaccattaaaagtctattatttctatggtcaggcggatgatgtattccgtcaacacggtttagaaacaaaatataagttaacatcagacgttactctaggtggtgttgtttattaccacgattatggcagtgaaggaaaacgcacattaaccaatgctaatgcaggtaaacgtaactttgataaggatgcatggcactttgctggtactatggaatggcgtattcctgaatcagcgtggaccattcgtactggtgtgacttataccgatgcgaaaaaagccaatggtgttggtcaatttgcgcgtaacccaattgggaatactcgtggacgctttaactcaccagcttatgcagatattgactatgtgcgtgatggtgaagtgatgggtgcattagaagctgcatacaaagttaacaatgagttgtctgttggtgcacggactaactatagtgaatttagttactccggcgaaagattaaaacaagggcagtttggcttatttagctactggaagccaacggctaatctttctatttcgttaagtggcggtattggttggcaccatcaacaagaaaatgattacaccacaccaaaactgtatgatggtcactcacgacgtgctcactcattatcaggctctatgacaacgacatatcgttttaaaatgtaa

SEQ ID NO: 300169 - DNA, 2061 bp, Proteus mirabilis
atgaacaaacttttaaatgtggcttttgctatcggattagcgttaacaggcacttctgctgtcatggctgataaaccagccacgccagccatggtgactattaatcaattaccgacattaaagcaagagccacaacattccacagtgagtgaacgtgtcaccgctcgttttgaacgttcccactatcgtcaattctcgttagacgcgagtttttccgaaaagatttttaatcgttatcttaatttattggattatagccataacgtattattagcgtcagatattgcccagtttgataaagataaaactaaagtgggtgaatatttaaaaacaggtgaattaggtcctttatatgatctgtttaaccttgcgcaaaaaagacgttttgagcgctttcaatatgctttaaatcgattaaatcaacctatcgatctcactggacaagataaatttcagttagatagaaccaaagcgccatggccgaaaacgcaagctgaattagataagctttgggatgaaaaagtaaaatacgactggctaacacttaaactctctgacaaaacagacagtgaaatcaaagaaacactgacaaaacgttataaagctgcattacgtcgccaaacacaaagccaaagtgaagacgtattccaaattatcatgacggcttttgcgcgtgaaattgatccccataccagttatttatcaccaagaaatacggaagcctttgattcagaaatgagcctttcattagaagggattggtgccgtattacaaatggatgatgattatccgatgattaattccatggtaacgggtggaccggctgctaaaagtaaagcgctaaaagtaggtgataaaattatcgctgtcggtcaacataataaacccatggttgatgtggttggttggcgcttagatgacgttgtcgcgttaatcaaaggtcctaaaggtagtcaggttaaactagaagttatctctgatgaaaaaggagcgaagccaagaactatcactttaacaagagaacagatccgcctagaagatagagcggtcaagttaaccgaaaaagtgattaatggtgataaaatcgctattttagatattcctagtttctatgtcggcttaactaatgatgttaaaacccaactacaaaaagtggctaaagacaatgtatctgctttagttattgatttacgtggaaatgggggcggtgcattaacggaagctattgcattatcaggtttatttattccaagtggtcccgtcgttcaagtccgtgataataatggtcgagtacgccaagattatgatcgtgatgatgttgtctattataaagggccactagtggttatcgttaaccgctttagtgcttctgcttctgaaatttttgctgctgcaatgcaagattatgggcgcgcattaattgtcggtgagcaaacctttggtaaaggaacggtgcaacaatatcgttcattgacacgagtttatgatcagatgttaagtcctgattggcctagtttaggttcagttcagtacactatccaaaaattctatcgtattaatggtggaagtacccaattaaaaggggtgacaccagacttgttattaccaagctttgataattcagaaatgggggaaagcaatgaagataatgctttaccttgggacagtattccaccggctaattataagctgtctgagtattcagagaaaataaaacaagcactacctacattgacggatcaacatgctaaacgtatcgcgaatgatagagagttttcatatatttttgatgatatcaagcgctacaatgaagctaaagccaaaggtgaagataagtttattattcttaattttgcagagcgcgaaaaagagaataaagagctagaagccataaaattacagcgtattaaccaacgtcttaagttagagggtaagccaccactaaaatcacttgatgatttaccgaaggattatgaaggccctgatccttacttagatgaaacggctaatattgcggatgatcttgcaaaggtattaaaacctaagaagttattaaattaa

SEQ ID NO: 300170 - DNA, 372 bp, Proteus mirabilis
atgttataccttgagatgcatgggttgattgaaaaaccattcattcaaagttcaacacttgatgggatcgaatatatttttaatagctatacctgcttcattactgaaaaaggtattgattttttattagatgacggagggttaagcgcgatactgaaagtacaaacaattcgcatacatagtgattcaattaaagcattagaggatattattttaacatctaatgaatcaccagacatgaaagctaacttgaaatcaaaacttcatgagcttcctgcaaacgccataacacatttgatgaatgaattattggtgaagggggtaatgaatcttcctgttgcaattcagataattcaaaaattcctccagtag

SEQ ID NO: 300171 - DNA, 270 bp, Proteus mirabilis
atgaagatattcacagctaacattcatcccaatggtttttttatcaatgcagattggaatggtacttatttttggatttatttaagtagagcgctggggtggggtaaattcactttaattaggtgctctactagatacagccctactggaggaatttttgaattatctgaattgcaacaggaagattcattacccccttcaccaataattcattcatcaaatgtgttatggcgtttgcaggaagctcatgaagttttgatttcaagttag

SEQ ID NO: 300172 - DNA, 252 bp, Proteus mirabilis
atgccggatgagttaaaagaaaaaatccaagagagagcaaaagccaatggtcgctctatgaactctgaaatcattcagattttagaggatgcagtgcaagggaatacaagtaatgactctaagtggttatctggcgtactggcttttatgcaagtaaataaaggcaaggaagggaacactatactgacaatggatcttgataaaattaaaaatatgagtgacgaacagcagaataaagacaataaaaaatag

SEQ ID NO: 300173 - DNA, 1365 bp, Proteus mirabilis
atggctaataaaatagaacatctcgacaccttagcatcagaaatagaaaaacaggctggtgggtttagcaatatcgcaaccttaacacattgcatgacccgtattcgtttgatcttaaaagatagttcgctatttaataccgaagcattaaaacaagtcgaaggtgtcaaaggcgtggtatttaatggcgagcaacatcaagtcatagtaggaatgggaacggccgccaaagtttattcaatcatgaataaacgtatgcaaaaaaacacagataatagcgaagaagcccctgcgtcaacaccagtgaaaaaagggttttccatacgccgtatgctaaatacgttggcggctatttttgttcctactatcccagcattaattggctgtggtttaattatggggctaattaatattatccgtttagtggctcccggcttagttgatcagtttcctgaactctttaagctatttaaactgatcggaagcaccgtatttgcttatctctctgttatgataggtataaatacggctaaagagttaggggcttcaacctccataggtgctgttatggcgggattattagccatgccgggactggctgatatcacattatttggtgagaaattacagcctaatagtggtgggatcttcgcggtcttaatggtggtggtattctcttcaaaattagaactatggtttcgcagtattgtaaaagagagtcttgatcttattttaaccccctttgtcactattttagtttctgcgttagtggcaattatggtattccaacctattggtcattatctgaatcaactattagcgcaaggcgtatccttatcactattaaatcatggtggcggtgcggttgtgacaggcgcagcgttagggggcagtttcttattcttattactaaccggtctacaccaaggtttaataccgatccacactgaaattttaaatacctttgggttaaattacctattccctattttagcaatgggtggaatggggcaagtaggctcttgtttctgggtttatttacgtactaaaaaccaacgcttaaagaaaacgttaatgggtgcgttgcctgtcggaattttcggcgtgggtgagcctttattatttggtgtctctttacctttaggtaagccctttattgcaggttgtattggcggggctgcgggtggtgcattaatggcttattttcaggttgggatcattattccatttggtactgctgggttatcattaattccactggtgggggatgggcagatcatcaaattccttatcgcagtattgggggcttgggttgtcggttttattgccagtatattaatcggatttaccgatccagaaaaataa

SEQ ID NO: 300174 - DNA, 750 bp, Proteus mirabilis
atgctaatgacaatgattaaatcacttatttttatcccttatctattattaagtggatgtggtgagtatatcaatatatatcttgataataaatttcctgtcaatatgaataatgatggcaaaaaaatcaaggtttattcaactatttcccctgaaacagtagtggaagttattggtacttatacgtcaaataagtgtgaacgttctcattttaatgcttcttatactaaagtcacttattcctctttaacgcaagaagtggaagcagagcgtaaaatagcagaggataataaaaccgcaacctatatcgtgcctattgatggagggggatggtgtaattggaagctagtagaaatagatatagccccagtctctactatttataaaagtcatatggtgattagtgaagttattccaattgtcgatgacaagcattcaaaaatagaactatttactacattagctcccgtaatagtggaaagcaagaatgatcaaaaaatctattatgcatcatcagaaatggaaggtgaaaagaaattatctaataaattaaatggagaaatttattttaattataaagttgaacctaaactaaccacgactatctcaaatgataacaaagctattttccctaacggcaatattaaaatactgagcggatcgacttatagtaaaatgattggttttaatgaaataatcgagaatagtgatgagaaagcgtttacttcttttgttcgatatattgattaa

SEQ ID NO: 300175 - DNA, 495 bp, Proteus mirabilis
atgatcagtgagcctgttttcactttatcaccgacagcaattttgatctcttttactacaccggcaaaaggtgctggaacttccatagaagctttatcaccttcaaccgtgatcagagattgctcttcagcaatggtatcacccactttcaccatcacttcggtgacttcaacttcatcaccaccgatatctggtacattaacatctttaatagcagaggctgctggtgctgatgctgcaggagccggagctgatgcagaaggtgctggcgcgctacctgctacttcaaataccatgataagagagcctgtgctcactttatcaccgacagcaattttgatctcttttactacgccagcaaaaggtgctgggacttccattgaagccttgtcaccttcaaccgtgatcagagattgctcttctgaaatggtatcacctacattgaccatcacctcggtgacttcaacttcatcaccaccgatatccggtacatga

SEQ ID NO: 300176 - DNA, 2412 bp, Proteus mirabilis
atgaccaaccactgggttgatatgaaaaatgccaaccttatcgtcgttatgggcggtaatgcggctgaagcacaccctgtcggtttccgctgggcgatggaagctaaaatccataataaagccaagttaattgtgattgatcctcgcttcacacgtactgcgtctgttgcggatttctatacgcctattcgttcaggtacagatatcaccttcttatcgggggttatcttatatctgctcgaaaataaaaaatatcaaaaagagtacgttgaggcttataccaatgccagcttgattgttcgcgaagattaccattttgatgatggtctctttagtggctacgatcctgaaaaacgtcaatatgataaaaccacttggaattacgagatggatgaaaatggtttcgctaaacgcgacaccacgcttcaacatcctcgttgtgtctggaatctattaaaagaacacgttagtcgctacacacctgatgtggtcactcagatttgtggtacaccaaaagaagatttcttaaaagtctgtgaatatattgctgaaacagcagcgaaagataaaacagcctctttcctgtatgcattaggctggactcaacacactgttggtgcacaaaacattcgtactatggcgatgatccaattactgttaggtaatatgggtatggcaggtggcggtgttaatgctctacgtggtcactctaatattcaaggcttaacagatcttggtctgttatcacaaagcttaccaggttacctaaccttgccttctgaaaagcaaacatcgttagaaacctatttagcagccaatacgccaaaaccgaccgtccaagggcaggttaactactggggtaactatcctaaattcttcgtcagtatgatgaagacattttatggtgatcatgctcaacgtgataacgattggggattctcactattacctaaatgggataaaccttacgacgttctacaatatttcgaaatgatggataaaggtgaagtcaatggctatatctgccaaggctttaaccctgtagcttcattcccgaataagaacaaagtgatccgctcattatcaaaactgaaattccttatcaccatggatccgttaaatacagaaacatcttgtttctggcaaaaccacggtgaagagaatgatgtgaaaacagcagatatccaaactgaagttttccgtctacctacgacttgttttgctgaagagaacggctctattgttaactcaggacgctggttacaatggcactggaaaggtgctgatgccccaggaattgcactgcctgatggtgaaattctctcaggtattttccatcgtttacgccaactttataaagaagaaggtggcgcaatgcctgagcaggtgttgaatatgacttgggattactttgatcctaataatccaacatctgaagaagtggctcaagagagcaatggtaaagcccttgtcgacttaaaagacgctgatggcaatatcattttgaaaaaaggtcagcaactaagctcatttgctcagttacgtgatgatggtacaacggcaagtggctgttggatcttcgcgggtagctggacagaaaaaggcaaccaaatggctaaccgtgataactcagacccatcaggtttgggtaacacattaggttgggcgtgggcatggcctttaaaccgtcgcattatttacaaccgtgcatcagcagatccacaaggtcaaccatgggatccaaaacgcaagttaatcgaatgggatggcagcaaatggacaggtattgatgtacctgactatagcaatgccgcacctggctctgatgttggtccatttattatgcaacctgaaggtatggggcgtttattcgctatcgacaagatggcagaaggtccattccctgaacactatgagccaattgaaaccccattaggtaccaacccactgcatccaaatgttgtttcaaacccagcagcacgtgtgtttaaagatgactgggaagagatgggtaaagcagaagagttcccatatgtaggtacgacttaccgtctgactgagcatttccacttctggacaaaacatgcgctgttaaatgccattattcagcctcaacaatttatcgaaatcggtgaacggttagcggcagaaaaaggtatttctcaaggtgacaccgttaaagtcagttccaaacgtggttacattaaagcaaaagctgtagtgaccaaacgtattagaacacttgatgttgatggtcgcaaagtggataccattggtattccgatccactggggctttgaaggggttgcggttaaaggctttattgctaataccctaacgccattcgtcggtgatgcaaatacacaaacgccagaatttaaagcgttccttgttaatgtggaaaaggtgtaa

SEQ ID NO: 300177 - DNA, 588 bp, Proteus mirabilis; identical to SEQ ID NO: 295563

SEQ ID NO: 300178 - DNA, 831 bp, Proteus mirabilis
atggatgaaacaaaatcgacaaacttgttaactaaacgtgtaattgttggcatagatcaaacaactgtgcaacacaaaggctcccttaaccaagcagagcaggattatattgcactcgaagttccagttgcattagtgtacaacggaatatctcacgttgttatgatggcaagccctaaaaatttagagttatttgctgtcggattttccttatctgaaggcattataggatcttctaacgaaattcgcagtattgaaatcgttgaaagttgccatggtggcacagaagtacaaattgaattatcaagtcggcgctttatgcaattaaaagagcgacgtcgtagtatggcgggacgcaccggatgtggtatttgtggtacagaacaattagcagaaatttttcgccctatagcgccattaccttttacacaaacattttcactctctttgcttgataacgcactcgagcaactaaaaaccgtacaggaaattggcgagctaacagggtgtactcatgccgcagcttggctatctcctgaggggcaattacaaggcggttgcgaagatgtcgggcgccatgtagcacttgataagttgattggcttaaaaacacaacaaaagtggacagagggtgcaatattagtatcaagtcgtgcaagttatgaaatggtgcaaaaatcagcaatgtgtggtgccgaaattttatttgcggtttccgctgctacctcactcgccgttgaagtggcgaatcaatataatttgacgctggtgggtttttgtcgccgtggaagagcaactgtttttactcatccacaacgactcactgattaa

SEQ ID NO: 300179 - DNA, 348 bp, Proteus mirabilis
  misc_feature (327)..(336): n is a, c, g, or t
ttggcaaatattatttacttaaatataaagggaaagaatcaaggtttgatctcaaaaggatgttcttcatttgattctattggtaataagtatcaatcagggcatgaggatgaaattctagtttatgagttttcatcgaatttatcgatgcatcaaaatgtaagttttcaacccgtagatatacgtaagacgatagataaggcttctccgctattatctcaatcattagtttctaatgagttattaacatgtgaattttctttttatagaacatcagataaaggtgggatagaattatactataaaataaaactaacagatgcatcnnnnnnnnnncatcaatcgtaa

SEQ ID NO: 300180 - DNA, 969 bp, Proteus mirabilis
atgttttttacttttgaagaaaaatttgaaagatatgccagtgatataaagaaattatcagaagtatcagctaaatatcttcttaaagatgattattgtaaacaaggctataggagtgaaatagcagaagtagtgaggttaattcgagctgatttctatcgggccatatataatcacagagaaagatataatagaacgcagaatttgagagatacagtaagagaagcatttggagtaggtttcctgccagatataatgcaatatcttaatgaaatagaagttgagtatgaaactgaaatgtctgcttattcacaattaaggaagaggagtaaagaaacctatgagctgactaaaactttttctggaacgggatactatttttacttaaaaagcagtcaaactattataggaggaggaatacaaagtacttttggatatttaacatttaagattggtcgtaaaattagaagtaaagaaatgcaaggagctggaattattggtataacactaggtggcggtaagtttattgaaggtatatcagatatagtgtatgaatttactgagggtggggttaattttggtggagacccagtaaaagagaatattgaaaagggactaaaatttttaggtatgaacgagagtcatggagaaataggttatgatattattgatatgactgtcagtttatataatggatttgctgcttttgctaaatatgattctcctaatcgtattattcatttacctgttaccatggcggggagaacttatagagcgacatattttgatcgtttgtttaccagtaaaggtgttcgtttgtttcgttggagtacattagattttaagcggaaatttagcattcaaagtaaacctctattacttactacgctcagctacaatgcagggaaacttattctaatattaaaaaaatataagaacgatgagtcatctagtgagaatactcaataa

SEQ ID NO: 300181 - DNA, 1485 bp, Proteus mirabilis
atgatcttgctggataatatcttacgctattgtcttgatgaaatttttaaaggcttctttgactatgattctttaaatgcttattccatgaaaatgacacgtgatgctgaatatgatttagccactgaaatggaatccagcttattagaaatgatgtcatctaccttaaaacaacgtcttaccgctgagcctgttcgttttgtctaccaacgtgatatgcccgatgaaatggttgctttactgcgtagcaaattaggtttatctaataatgactcggtcattgctggtgggcgttatcacaactttaaagactttattaattttcctaatgagggtagtaagtttctattaaataaacctattcctcgtttacggcatgtttggtttgataatttccgtaatggctttgatgcgatccgtgaacgtgatgtgttactttattatccttatcatacctttgagcatgtattggaattattacgccaagcgtcttttgatcccagtgttatttcgataaaaatcaatatctatcgcgtagcaaaagactctcggattatcgattcgatgatccacgccgcccacaatggtaaacgtgtcactgtggtcgttgaattacaagctcgctttgatgaagccgcgaatatacattgggctaaacgcttaaccgaagctggcgtccacgttatcttttcagcgcccggcttaaaaattcatgcgaaattatttattatttctcgtttagaagaaggcgaaatcattcgctatgcacatattggtaccgggaattttaatgaaaaaaccgcacgcctttataccgattattctctgttaaccgcgaatacagaaattaataatgaagtacgtcgagtgttcaattttattgaaaacccttatcgtccggtgacttttgaacatttaatggtatcaccgcaaaactcacgtattttgttaaaccagttgatcacaaatgaaattcacaatgctcaagcggggcaccctgcgggtattaccttaaaagttaacaatttagtcgatgaagagttagttaatcgtctttatgatgcctcacaagcaggtgttaaaatccgcctattagtacgcggtatgtgctctttagtccctaatcagcccgattttagtgaaaatattcaggtcaccagtattgttgaccgctttttagagcatgatcgtgtttatgtctttaccaataaaggggatgagaaaattttcctatcatccgcagactggatgactcgtaaccttgattatcgtattgaagttgccgtaccactactcgaccctcagctaaaacagcgtattttggatattcttgagatccagtttaatgatactgtaaaagcacgatatttagataaagatctaacaaatagctatgttcctcgaggaaataaacgtaagatccgcgcccaacttgctgtatatgaataccttaaatcattagaacaaccaggatcacgagcgtaa

SEQ ID NO: 300182 - DNA, 1536 bp, Proteus mirabilis
atgcctttattacaagatgactcttcttcaccacgtcctttagaaattgcggctatagaccttggttctaatagttttcatatgatcatagcccgtgttgtcaatggtgccttacaggtattaagtcgtttaaaacaacgggtatatcttgccgatggtcttgatgataatgataaactcagtgaagaagcaatgttgcgggggctttctgcactttccctttttgctgaaaggttacagggatttccagcagaaaatgtcactgtggtcggtacacatacgttacgggttgctagcaatgccaaagtctttttgcaacgcgcaaaagaggtgatgccctatcctattgaaattatttctggtcacgaagaagcacgcctgatctttatgggcgttgagcatacgcaatctgaaaaagggcgtaagctagtgattgatattggtggaggctctaccgaattagtgatcggagaaaattttgaacccatcttgatcgaaagccagcgtatggggtgtgtcagctttagccgtcaatttttcccgaaccaaaaaattagcgaatccgcttttcgtaaagctcgcgaaaaagcagcacgtaaaatggaaaaaattgcttggcaatataaaatgaccggctgggatgtcgcattaggcgcatcgggtactatcaaagctgcacatgaaattttggttgaatttggtgaaaaagatggtgtgatcacccctgaacgcctattaatgttgaccaaacaggtactacggtttaaaaaatttaaggatatcaccctaccgggattatccgatgaacgtaaacacagttttgtacctggtttagccattttatgcggtattttcgataccctaggcttaaaggctctccatttatctgatggtgcattacgtgaaggtgtattgtatgaaatggaaggccgttttcgtcatcaagatattcgccagcgtaccgccaaaagccttgctgaacactataatatcgatcgtgaacaagctaagcgtgtcctcaccacaatgcaatcactgtatgctcagtgggcggaacaaaatcctaaactggttcgtcctgatctagaagcgattttagtatgggcggtgatgttgcatgaagtgggattaagtatcaatttaagtggtttgcatcgtcattctgcttatattctttcgaatacagatctacccggttttaatcaagaacaacaacaattattaactacattagttcgctatcatcgcaaagcaattaagtttgatgagttacctaaatttaatctatataaaaagaaacagtattatccattagtacaaatacttaggttagcaacactacttaataatcagcgtcaatcaaccactaaaccggtttctttacgtttagtgaccgatgataatcactggacactctattttcctaaaaattatcttgccgataacacattgatggaattggatttagaaaaagaacaggagcattggcaggccgttccaggctggaaactggatataaaagaggaatctgcttaa

SEQ ID NO: 300183 - DNA, 1464 bp, Proteus mirabilis
atgtctcaatcagctatcaataatgatactgcggctgccatcaatccatattcacaaaaagtggcacacctgcgtcagcaaattctgaacatctttcttgaagatgaccgttttgttgaaacagtgttaggtgaagcaagtgaaagtgataggctgagccaccatgaacttcatgaaaaaatcaccactgttagagaattactacaagatctacacgcggcagatattgcagatattcttgaagcccttccctatgatgaacgtttagccctatggcatttggttgataataatgagcgtggtgcggttttagtcgaagcctctgtcgccgtttgggacagcctaattaaagatatgacggatcgtgaattattacgctcagtcgcttctttgcatgtggatgaacaggcctatattgcggagcatttaccccgtgataccatgcgtcgtcttttgacctatttagaaccaagtctgcgtaataggatcagagaagtcctgcaatatccgaaggatagtgttggacagatgatggattttgagtttgtcaccgtgcgtggcaacgtaacattaaaaacggttcaacgttatttacgccaacgtggctctattcctgaagccacggataaaattttcgttattgataatgccaatcatctgttaggtgaattacccttaaccacagtattaacccagtcgccggataaacgggtctctgatgtcatgaaaaccgatactgtcagctttatgcccgaagagaaaggcgaagatgcagcgggtgcgttcgaacgttatgacttaatttcggctgcagttgttgatagtaatggcctgttaatgggacgtttaaccgttgaagatatcgtcgataatatgcatgaagagagcgataccaacattcgtcgtatgggggggttaagcccagaagaggatgtattcgcccctgtcgggcaagcggttaaaacacgttggacatggcttgctatcaacttgtgtactgcttttgtcgcttctcgtgttatcggtgtgtttgagcataccatttcccaattagtcgccttagcaactttaatgcccattgttgcaggtattgggggaaataccggtaaccaaaccattactatgattgtgcgtgcattagcactacatcaaattcagactggtagtttctcgttcttaattttaagagagttaggtgttgcccttatcaacggtattgtttgggggggaataatgggagttgtaacttacttcctttatggtgatgttgcgatgggcgccgtaatgacaatggccatggtactcaacctattaatggctgccttgatgggagtattaataccgatgaccatgataaaactgggtaaagatccggctattggctcaagtgtgatgatcaccgcgatcaccgatactggtggcttctttattttcttaggcctagccactattttcttagtttaa

SEQ ID NO: 300184 - DNA, 1050 bp, Proteus mirabilis
atgataatttctaaacagcagttacaccaattaatcaaaaataagttacataatgcaggactgaatgaaaaccatgcagacattgttgccgatgtattagttcatgctgatgtgaaaggaattcattcccatggtgctgtacgtgtggaatattatgctgagcgcattagtaagggaggaacaaatacgcatcctaagtttacttatcaagagacaggaccttgtagtgcgatttttgatggtgataatggtgctggacatgttgctgctaagcaggccatggagcacgcgattaatatggcacaagagaaaggcattgctgttgttggggttagacgtattggtcatagtggggcgttatcctactttgtagaacaagcctctgcatctggaatgattggtatttcactttgccaatcggatcctatggtagtgccatttggtggatctgaagtttattatggcactaatcctatcgctttttcagccccgagtgcagatgataaacctattacctttgatatggcgacgacggtgcaggcatggggtaaaattctcgatgcgcgggctaaacatagtgacattcctgacacatgggcggtagatgaagcgggcaaaccaacctgtgatccctttgcagtaaaaggtttattacctattgcgggaccaaaagggtatggcttgatgatgatggtcgatgtattgtccggtattttattaggattaccctttggtaaacatgttagctctatgtatcatgatttgacacaaggtcgtgaattaggtcagctccacattgtgattaatccagccttcttcactgatgctgatttatttaaaaaacacatttctcaagtaatggctgagctaaagagtattaagcctgcagtcggttttgaacaggtattatatcctggggaaaatagtcagcttgcagcgcagcgaagcgaaaaagaggggatagaaatcgttgacgaaatttatcattacttaaattctgatgtattatttaatcaatcttatgataataaaaacccatttgccagctaa

SEQ ID NO: 300185 - DNA, 4458 bp, Proteus mirabilis
atgattgaacgaggaaaatttcgctcattaacattgatcaactggaatgggttttttgctcgtacttttgatttagatgaattagtcacgactttatccggtggtaacggagcgggtaaatccaccaccatggcggcttttattaccgcgatgatccccgacctgactttacttcattttagaaataccactgaagccggttcaaccagtggctctcgtgataaaggattatatgggaaattacgcccgggagtttgttacgccgttttagatgtgattaattcccgccatttacgagctgtcgttggtgtacgattacaacaagttgccggacgagataaaaaggttgatatcaaaccttttatgatccaagggctacctattgctgaaaatccaacagaaattttgacgcaagctgtcgatggacgccaagcacgtgttctaccacttaatgaattaaaagaaaaagtagaagcgatagaaggcgttgtttttagacaatttaactcgattactgatttccactctgtgctctttgatttaggggttattccgaaacgtttacgctcagcaagcgatcgggcaaaattctatcgtcttattgaagcttcattatatggtggtatttcaagtgccatcactcgctctttacgcgactatttattacctgaaaatagcggagtaagaaaagccttccaagatatggaaggggcattacgtgaaaaccgcatgaccttagaagctattcgggtcactcaatccgatcgtgatctgtttaaacatttagtcaccgaagcgacctcttatgttgcagcggactatatgcgtcatgctaatgaaagacgagtacaccttgatcaggctctatctttacgtaaagagttgtgggatcagcgtaaagcgattaacaatgaagcttatcgctttattgaaatgggcaaagagttagaagagcaacaagcgttatcggctgatttggaaacggattatcaagccgccagtgatagacttaatctcgtacaaaatgcggtacgccaacaagaaaaaatcgatcgctatgttgcggatgttgaagaaatcacattccgtttagaagagcaaagtgaagttgttgaagaagcaacatcaaaaaaagaagagttggaagcgcgagttggatctgcggaagaagaagttgatgaactgaaaagtcaattggcagattatcaacaagcgttagatgttcaacaaacccgagctattcaatatcgtcaggcggtacaagcattagagcgtgcgaaagcacaatgtggcattgatgatttagatgaaaccaatgcagagctatgggctgaacgtattcaagcaaaaattcaatccatcacgcattcattactttctatggagcagaaactcggtgtttctgatgcggccaaaacacaatttgatcaagcctataaattgatcacctcgattgttggggaagttgagcgtcaaaatgcgtggagtgcggctaaaagcgcattacgtgaatggtcatcacatcgccatcaagccgatcgtgttcaccctattcggatgcaattagctgaattagagcaacgtttacagcaaagaaataatgctgaacgtcagcttgcagagtttaataaacagtatggcaaaaatattgagcctgatgatctatttactctacaagaagagctagaagcaaagattgaagagctgagcgattatgttagtgattcaggcgaacagcgtatgcaaatgcgccaagagcttgatcaactaaagcaacaaattgaaaagttaagaaaacaagcgccagtttggtttgctgcacaagatgctttaacgcaactgtgtgaacaaacgcatcaatcttttgaaacaagcaatcaagttactgaatatatgcaacagttacttgagaaagagcgtgaagccacggttttgcgtgatgaaactgctgctcgcaaacagcaaattgaagctcaaattgaacgattaagtcagccaagtggggctgaagatagtcgattaattactttagcagaacgctttaacggggttttattatcggagatttacgatgatatcaccttagatgatgcaccttatttctcagcattatatggacctgcgcgccatgcgattgtggtacaagatctcagtgcgatcgaagagcagttagcttctttagaagattgcccggaagatctctattttattgaaggtgatccacaatcctttgatgatagcgtgtttaatgcccaagagatggaaaaagcggtacttattaaaagttcagataggcagtggcgctattcacgttatccagaaattccattatttggccgtgcagcacgagaaaaccagctagaaatattatcccgtcaacgagatgagctgtcagagctgtatgccacacaggcctttgatgtgcagaaaattcaacgtgcacaccatgcatttagccaatttgttgggcaacatatttcagtggcatttgatgccgatcctgaagaagatattcgccaattaaatcaacgtcgtaatgaattagagcgcgagttatcacaatatgaagagggcactcagcaacaacgtcagcattatgcgcaagccaaagagtcgctcaatttattaaataaactcattcctcaagtcaatttattattggacgaaacattaattgatcgtgttgaagagctacgtgaagagctttataacgcagaagagtcgatgcgttatttacagcgtcatgagaaagcattaactgcgttagagcctatagcctcgattttacaaagcgacccacaagagcatgatcaattaacacaagattatcaatacgcaaaagaagagcagcaacgttatcaacaacaagcatttttgctggtggaagtggttcagcgtcgtccacattttagttatagcgatgcggttgaaattgtcagtgaaaataacgatcttaatgaaaaattacgtcgtcgtttagaaatggctgaaacagagcgagcgacagcgagagagttatatcgtcaacagcaggcacaatgtgatcagtttaatcaagtactagcctcactaaaaagttcttttgataccaaatcagaactattaagagagcttgagcaagagatgaaagagactggcttgcaaattgatgcgggtgcagaagcgcgagccaaagagttacgtgatcaacgttatgctgcggtgagtgctaaccgtacgcgtattagccaacttgagcgtgatattgcgcttagtgaagctgaacgtgaaaatatggcgaagaaaattcgcaaattagaacgtgattatggccaaatgcgtgagcacgtcgtcagcgctaaagccagttggtgtgctgttatgcgtttagtgaaagaaaatggtatggagcgccgtttacatcgtcgtgactttgcctatctttcagcggatgagttacgttcaatgtcggataaggcgctaggtgcgttacgtcaggctgtggcggataatgaatatttacgggatgcattacgtcgctctgaagacgcaaaataccctgatcgtaaagtccaattctttattgcggtttaccaacatttaagagaacgcattcgacaagatattatcaaaaccgatgatccggttgatgctatcgaacagatggaaattgaattagctcgcttaaccgaagagctaaccagtcgtgaacaaaaactggcgatcagctctcgcagtgtggcaaatattattcgtaaaactatccaacgtgaacaaaatcgcattcgtatgctaaatcagggcttacaagcggtttcctttggtcaggttcgtggtgtacggttaaacgttaatattcgtgaaagccatcaaatcttactggatgtattatcggaagaagaagatagccaatatcaagatctgtttaaaaaccaaaacctaaccttctctgaagcgatggcaaaactgtatcaacgcttaaatccacaggctgattttggtcagcgtatgccacaaacggtgggtgaagagctacttgattaccgtaactatcttgagatggaagttgaagttaatcgtgggccagaaggttggttaaaagcagaaagtggtgcgctatcaacgggtgaagccattggtacaggtatgtctatcttagtgatggtggttcaaagttgggaagaagaatcacgacgcttaagaggaaaagatatttcgccttgtcgtttgctcttccttgatgaagccgcacgtttagatgcgaaatctatcgcaaccctgtttgaactgtgtgaacgacttgatatgcaacttatcattgctgcaccagaaaatattagtccagaaaaaggcacaacttataaattagtgcgtaaagtctttaatggaagcgagcatgttcatgtggtcggattaaaaggctttgggcaacaaagtgaaaaagataacattttatccgaaaatgttgcagatagttga

SEQ ID NO: 300186 - DNA, 228 bp, Proteus mirabilis
atgcgtatggaaaaattaaccaatgtaacttatggaacagcaggcctaacggccttttttgccagtctctctttatatgaatgggtatttgttatcgggatggcgttcagcatgcttctgggtttagccacttattttatgactcgtcgagaacaacgaaaacgcactcaattatttgaagagcttgttcgtcatgttgacccacaaaacccgaccgaaaccttatag

SEQ ID NO: 300187 - DNA, 261 bp, Proteus mirabilis; identical to SEQ ID NO: 299232

SEQ ID NO: 300188 - DNA, 174 bp, Proteus mirabilis; identical to SEQ ID NO: 297731

SEQ ID NO: 300189 - DNA, 1635 bp, Proteus mirabilis; identical to SEQ ID NO: 298570

SEQ ID NO: 300190 - DNA, 2718 bp, Proteus mirabilis
atgaattatatctctattattctttctgatactgatatcaccattaaatatctttcagaaaaaagccattattcatttaataccacaaatagccattaccttgattggctaaatatggctaaagctattaatcataaatttaaatctgctcaaggtggtttgatatattcgacaagtaataaatctgatagcgctattattaaaaccattgataataaagtaataaatttatcaaatttctttactgaaatatttaataaaccttttatttatatcaataaagcgcagcttgaacatcatcatgatttagaagaaaaaatggttacagttgccaataactttgcttggtcaattgaatattcaggcttagaaacaggaaaagatgaatattgccaagagtctctcttaactacggccaatggttatattgggttaagaggaactttgcccgaaatgactataagtgatgagcactaccctgctacctatattgctggcctatataatcaagcaagttcacaaatagaaaaccatcaggtgattaatgaagattttgttaatgcacctaatggacaatttatttctcttaaaattggtaagggagaatatcttcatccaaagcaactgataacacaccatttaacacgtcatttagatttgaaaacgggtgtattcactagccaatggcgtgtagaaacccctgaaggacagcaacttgatattcattgtacaaaatttgccaatatggctgatatgtcacattacgccattttatatacctttaaaccattaaatttctcaggtgagataacggttataactcgcctagaaggaaatacttataattacggtgtacaacgctaccgtagccttaatccccatcattatcatgtgttacaaactggagcgaataagcaacacgcatttatattagctcaaacagatcagtcaaaaatagggatcggattatcgtcaacaatcaggggggatttctttgcaaatgaagatattgtttgtcatgtttcagatacgcttgttgaacaaaccatcaccttcaacgctcaacaaaataccacctatcaacttgaaaaatgtgttgctgtaacaacctctacggcttacccagactcatggcaagatgtggttaattgggaacaacaacctttacacagccaattgataaatagccaaaaagcgtggcaaacgttatgggatagtgccgatatctcgatttctggcgatctgatgacccaaaaattactacgcttacataccttccatttactgtcatccgcatcaccatttagcaatcagcaacatcaattagatgtttcagtcaccgcccgagggttacacggggaagcctatcgaggccatattttctgggatgagatctttattctgccattttatattatgcacttccctgaaaccgcacgccaactattactatatcgttaccacaggctacctgctgcgcgtcttgcggcacgagcagaaggatttcaaggtgctatgttcccttggcaatcagggcatgatggtagtgagcaaacccagacactgcatttaaaccccttatcagggcaatgggatgccgaccatagttgtcgtcaacgtcatgtctcattagcgattgcctataatgtgtggctatattggctaaatactcatgatcaccaatttatggaacagtatggacttgaactactcaatgacattaccttgttctggttagaccaatgtcagtgggatgaaggcgatcaacgttttcatattaatggagttatggggccggatgaatttcatgagaaatacgcagactcacttgaaggtggcttaaaagataacgcatacactaatttaatggtggtttggttgtttaatcaaatagagatgttcataaacaatgatcgtttttctaaaaaattacaacagctaaacagccaatctagcgttttcaataaaatacaagaagttaaaaatcgtattgctatcaatattgatgctcatgaaattattgaacagttctcaggttattttcaattaaaagatctggattgggaaagctatcgaaaaaaatacggcaatatctatcgtatggatagaattttgcgtaaagaaaataaatctgccgatgattacaaagtagctaaacaagcagataccctgatgttatttaataacttagataagcaaaccgtacattccctaattacctctcttggttattcagtttctaagcactttgctgaaaaaaatctacattactatttagaaagaacctctcatggttccacactgtcacgcattgtccatgcttatctcgcagaacaaatacagttacatgatttgtcatggcaactttatcaagatgctctttattcagattataatgatattcaaggtggaacaactgccgaaggtattcatactggtgtcatggcggcaacattaaataccaccatcatggcttatgccggtgttgatattcgtcaggatatgttgaccatcaccccttcactccctcaacaatggcaaaaactaagctttaaattattgcatcgctctactttatatcaaattaatctcagtcataaagaaattagtattttaagtgataagcccagtactattttaattaaccatcaaacgcataagctaaccgccaatacgttattagtattaaagttaaatggagacacgcaaaatgactaa

SEQ ID NO: 300191 - DNA, 1329 bp, Proteus mirabilis
atgaatattttttctgaatcaccaaataaaccaataattaaaagtaaagaagaaatagataaaacttaccgatattggcgtttacacttaatgattgtaagttatatcggctatgctgttttttatttcaccagaaaaagctttaactttgttatgcctgaaatgctaaccgatcttggtattactaaagctgatattggaatggtaggcacagcattttatttaacttatggtgcctcaaaatttatttcaggtattattggtgatcgctctaaccctcgctattttatgggaatagggttaatcatgacaggggttgtaaatattctttttggtttaacatcatccattcctttatttattactctctggatgataaatgcttttttccaaggttggggatggcctccatgcgctaaaatcttaaacacatggtattctcgtaatgagcgaggtttttggtggtctatttggaatacatcacataatataggtggtgcaattattcccattttatcaggtagtgttgcattatggcttggttggcgctatgggatgattatcccaggtattatcgcaatagttataggcatattactttgtatttttttgcgcgaccgtccacgctctatgggattaccaactgttggggagtggagaaatgaccaaattgaaatcgaacatgaagaacaaggtgtgggattatctcgctggactatattaaaagaatatatctttaaaaataatataatctgggtgttagcaatttcttatgctgtcatttatatcattcgtacaggcattaatgattggggtaatttgtatcttattgaaacgcatcattatgatttattaaccgctaatgcgacagttatgatgtttgaaattggtggtttctttggtgctattgttgctggctggggttctgatttattatttaaaggaaaccgttcacaaatgaatgtcatttataccattggtataattgtttctgctctttgtttatggggcactccgattgataataagtatattttttctatacttttctttatgacaggttttttcatttttgggcctcagtttttaattgcaatggcagccgctgaaaattctcataaatatgcatcaggtgcatcaacaggatttgtcagcttatttgcttatattggtgcttctattgcaggattaccattatcattagttattgaaaattatcaatggaatggtttttatattttgttattggtactgtccatcgttttaatcatattgttattaattgcaatgcaattacaatatttaaaacgacgtaaaaatcttaattga

SEQ ID NO: 300192 - DNA, 2868 bp, Proteus mirabilis
atgggattttcattattccgctcacgccggaaagcgcaggcggtttctgctgaaaaaacggatgaaaacaaggctgacaaaaccgtacaccgcagtacaccggcagagaatgccggtttaggccgtcagccgctttcccggccgggaaaaatgacccgggcggatgagcagaagatttaccatgcgaatccgtcctttattgattacctgccctgggtggaatttctggatgaggagcaatgcctgctgcttgatgacggggtgtcggtcggggcggtgtatgccgttgagccggcgccgacggaagggcgctctgccggccgtctgctcgaaatccgggatgcggtggaggatgcgcttcaggacagtctggatgagcatgatgataacccgtgggtggtgcagtttttttgtcaggatgaggacgacgtgagcgtcacactggccacattgcgggactatatcctgccggcggcccggggcaccgcgtttaccgaagcctggctgaccgaaatggcgcgtcatttacgggggattgcccgtccggaagggctgtttaaggacacggaggtgaccggacaaccctggcgcggacagcagcgccggacccggatggtggtttaccgccggctggggaacagctataccgatccgatgccgccggtggcgatgctcaatcagatgtgtgaccggctggtcagcagtctgggcagtgccggcgtgcagtgtgtccgccaggacgggaggcaggtgcatcagtggctgctgcgtcatttcaatccggcccctgactgggtggaccgggagacgctgtaccgggaaggggcgtactggccggcggcggaggaagccccgggcaccctgccggtgctgaaggattttgcggaaacgctgtggtttaccccgccccggtcggatgtggaaaacggcgtgtggtggtttgataacctggcgcacggtgtggtgaatatcgaaaaactgcgtaaagccccggggccggggcacctgaccggggagcagaagcgcggtgacaaaaatatcaatgcgctgatggacctgtttccggaagggacgatgctgtcgatgaccatcgtcacacagcctcaggatacgctggagcaggaatttacccggctggggaaaaactcggtgggggaaaacaccgactcgcaacgtacccgccgggacgtggaaaccgccagaggcttactggggcaccgccataagctttaccgggcctccctgtcattgctgctgcgtgccggctcggtggaggaactgaacaaaaagcgcgtggatctgacggccacgctgctgaatgccggtctggagccggtgaagccggaatatgatgtggcgccgctgaacgggtatctgcgtgccctgccgatgtgttttgacccgcagacggataaaaaacactggtatacccggctgacctgggtacagcacctggccggattactgccggtgaccgggcgcaccagcggcaccgggcatcccggctggagtttctttaaccggggcggcggggtgctgacctttgatccgcagaataaacaggatcgtacccagaatgcgcatctgctgttattcggtcccaccggggccggtaaatccgccaccttatgcgcacagttatcgcagctgatggcggtccgccgtccgcgtctgtttattgcggaggccggtaactcctttggtttactggcggactattacgccagtctggggctgagtgtcaataaggtcagtgtcaagcccggcagcggggtgcgtctgccgctgtttgcggatgcgcatcagctgctgatgatggatgaacagcgtctggcactgaatgcggatgaactgccagagacggacagtgaatctgaggatgatgacgggcagcgtgacattctgggggaaatggaaatctccgcccgcatgatgatcaccggcggggatgtgcgggaagaagcggagctgaagcgggctgaccgggcgatgatccgccgggcgctgatggcgggggcccgggcgtcttatgccgccgaccggcagatgctgccggcggatttgcaggaggcgctgtatgccctctcccggggggaaggtgaagaggaagggcgggcattaaatccgcagcgccgggcgaaagcggccgaaatggcggaatccctggggatgtttaccgaaccgggcagttttgagcatgagctgtttaatctgccgggggagctgtggccggaggcggatgtgaccctgattgatttggggcacctggcgcgggaagggtatgaggcccagatggcgctgacgatggtgagtcttatcaactccatcaacaatattgccgagcgggatcagtaccgggcccgggacattaattttgtggtggatgaggcgcatatcgtgacggtcaacccgctgttatccccctatgtgaccaaagtggtgaaaatgtggcggaaactgggggcctggctgtggctggcgacccagaacctcgatgactatccggactgtgccgagaaaatgctcaatatggcggagtggtgggtgtgtctgacgatgccgcagaaagaggtggaggcaatcgcccgctttaagacgctcagtgaggagcagaaacaggtgctgctgtccgcagccaaactctccggctgttacacggaaggggtggtgctggcgcggaaagtggaggcgctgttccgggtggtacagccgagcttatatctggcgctggggatgacggaaaaagaggagaagcagcaacggcgggtgctgatggagcaatacggatgcagtgagctggaagcggcgttcagggtggcagatgaacttgaccggaaacgggggttaccgccccgggtgccgggatga

SEQ ID NO: 300193 - DNA, 675 bp, Proteus mirabilis
atggtaaggattttaaatacgatgcaggataggcaacgcaccgttaaaatgctagcattttacgatttgttgccgttgacctacagtcggtttttggggggtgatatgaagcaaattaatttcagaataactgacgaagaatatgttttttttgagaaaaaaataaaggaaaactttgatatttctttgcctatgttttttaaaaaagtaggtttaagtgttctgaataaggattcggaaatcaaaaaaataaaaaccagcctgtatgatgaattagggcttgaatcctattacatgaataataaaataacattatatatcaatgatgaattatatcatggtctaaaagaaaatgcagaaaaacatgggtggtcactatccaaagaaatcaggtttagactaaaacatacaatgaataatgaccttgatttttttgatcaggagttaaagattatgcgagattataataaccaattaaaacgtgttggacgcaatattaatatgatactacggcgggatgatgggaagattttagagaaagaagaatttaggcaagatatagttaatttgcaaaaaaatattaatgaaatgcaaagagagctagagggttacatcaaaaagtgtaaaggaagatcactttctcagcatgtcagcgtggtagattatgggtgttaa

SEQ ID NO: 300194 - DNA, 1170 bp, Proteus mirabilis
atgggtgttaatatagaaaaagagtatttagttaaacgtagtcgatctgctaaagggcaatcgctgaaaaaatccattcaggcgggaaagtcagcatttgctcataaagcgaaaaaggggggtaagttatacggaagcagggtaagagagcaaataggtaaacacggtcgaagtaaagaagttatggtaaaaatcactggctcggcacaaataaaacagggcattaaaaatagtgtcaactatatatctcgtgaagatacattgttgttaactgatgatgagggaaataaaattgatgcagtagatgctaaagattatttaattcagtgtgatgatgatgatacttatgactcaagaacaagtaaacagccagcaatcacaaaaaatattattttttcacctccggcatctgcacaggtaagtcaggaggatgcacttgaatcagtcagaaaaacattatctgaaaaataccccgacaataaatttgtaatggtttaccatgatgataaaaaagatcatcctcatgttcatgtcattctcagaactgataatgatgatacaggaaaaaaaataaatattcgtaaaaaagatttacgagaactacgcgagggattttgtgaacaactaaaactaaagggttatgatgtaaaagccacacataaacaaattcctgattttaaaaataagctgaaagaggaagatgcagcagcaccaagacggcaaaaaaatgtaagggaggtagtagattttgggcgcgccccgtatcagtttaaagagggtaacaaaccacaaaactatcttactgtgaaaacacttaatggcaaagaatatactgtgtggggtaaagaacttggagagcttgcagaaagagaaaaaattcaaaaaggctcactaattaaactcaaaaaatccggttcagaagaagtaaaagtaccaagattagataaaaacggggagcaggctggttggctaactacccaacgtaacaactggcaattggaaaatatcgggcaaaaaggcatagacagaacacaaaaaattggaacagaaaaacaaacggacgtaactgaacagttgaaacgccagcaggagcagcagcgtagatttaagcttcaagcggcagaaatgatcaagaaagaacaaaaactcaaaatagggttgaaattttaa

SEQ ID NO: 300195 - DNA, 357 bp, Proteus mirabilis
atgtataaaaaaattgagtttttaaataaaaaccaaattgaaacggtcaatattatcagaagtgaagtgcaggatcgctattggatattgaacaaaataagattaagtgagtttctgtattcagtaaaagaatatggtacgccagaattttacgatgattttaaaagaattaatcaaattacgcttccgtgtgtaatttttgatactcatgaaaatacattaaccgctgctattttttttgagagtgaacccgccgctgaggaagttttgaaaggtgcgggggtaacgtacattatgattaatcaaactaaagatgctttaacacatccggaattactccggttttaccgtgagtag

SEQ ID NO: 300196 - DNA, 528 bp, Proteus mirabilis
atgatgcctacaaatattaaaattatttgctggattttctttttcacaatactaattatttcgttttggtataaaaacaccgcccgacaacggcgacataaacgaaaacaaaagagcgcaaaagccgttttagaacggctttctggcattcatgaatttagtcaaaaaatagcctatttaagaaaaatagatccgtttgtttttgaagaactattattagaagcctttgaacaacgaggctatcaggttatcagaaataaaaggtacacaggtgacggtggagttgatggaaaggtaattatgcacggcgaaacattacttattcaggcaaagcgttatcgtggatttatttcgttacagcacgtttacgattttgaatctttgtgtgaaaaaaatcaatgcaaaggaattttttgtcacacaggaaaaacccgtcctgaattactaaaaaacatgaataattcaaagcgtcttatactcatcagtggtaaaaaattgattcagctactcacggtaaaaccggagtaa

SEQ ID NO: 300197 - DNA, 279 bp, Proteus mirabilis
atggatataaataaattaaaaaaacacgcgccagcaattgaacagtcagaaagtaagacggttaatgattttatcgcccaaggtgataaaaaaccgacaaagaaaacagaatctatcatggtaggttttcgcatggatgaagataccttagaacgattagacaggctgactaacggactaggcaagaaacgtattaacattttacgggcttcactgcttgcctttgaatcgctatcacctagcgataaggctaagtttttaatagaggtaatgaggtaa

SEQ ID NO: 300198 - DNA, 663 bp, Proteus mirabilis
atgattatagtttttggatcagataaaggtggtgtaggaaaaaccacaattacggcaaactcagcagtaatgttgcaacaaaaaactgcgtctgtcgcattagtgcgaacagacaaaaacgaagatttgaatacatggcaaagtttacgacgagaacagcccgttcctgatatcccaattatgacttgttacggaagcaatacacataaagaaattaacaaattgcacggggtaacagatgtaatattggtagacactgccggacatgatagcgttgaacttcgcagtgcattacttgttgcagatgtatttatagctccagtaagcccaacatccatgttggaagttgttacactgaataaattatcatccattgtgaacgaagctaaaaaggaaaacacaaaactaaaagcctttgctttacttaatcgttgccctacttcaccatttagtaatgatgcagtaaaaatcacacaatatcttaatgatgatcccctgcttttatctccattcaaaacacgcatatcaaacttaaaggcttttgaaaaagccataaatgaagggctgggagtgcatgagcttaaaggaaaaaatgtagggtcagcaaaagcacaattagagcttttattcgctgaactcattgattctgttcaggatagctaa

SEQ ID NO: 300199 - DNA, 276 bp, Proteus mirabilis
atgcccagtactcctgaagagaaaaaaaaggtccttacccgtgttcgccgtattcggggtcagattgatgctctggaaagagcgctggaaaatggtgctgaatgccgttccattcttcagcagatagctgccgttcgcggagcagctaacggtcttatggcagaggtgctcgagagccacatacgggaaacctttgaccagaatgacagctacagccatgaaatcagtaaatccgttgacgatacgattgaactggttcgcgcctatcttaaatag

SEQ ID NO: 300200 - DNA, 1110 bp, Proteus mirabilis
atgaaatcacgtgctgccgttgcatttgcaccagggaagcccctggagattgttgaaattgatgttgcaccacctaaaaaaggcgaggtgctgattaaaaatacccacaccggtgtctgccacacagatgcctttaccctctccgggaacgatcctgagggcgttttcccggtggttctcggccacgaaggggccggtgtcgtcgtggaggtcggtgaaggcgtgaccagcgtgaagccgggagaccatgtgattccgctttacaccgccgaatgcggggagtgtgaattctgtcagtccgggaaaacgaacctctgtgtatcggttcgcgaaactcagggaaaaggactgatgcctgacggaaccacccgcttttcttacaatggccagcctctttaccactacatgggatgctccaccttcagtgagtatacggtagtggccgaggtttctctggcaaaaattaacccggaggcaaaccatgaacacgtctgcctgctgggctgtggcgtgactaccgggattggcgctgttcacaacacagcgaaagtacagcctggagattctgtcgctatttttggtcttggcgcaatcggtctggctgccgttcagggggctcgccaggcaaaagcaggacgcattatcgctatcgacaccaacccggccaaattcgaacttgcccgtcagttcggtgcaaccgactgcatcaacccgaacgaccatgacaaaccgattaaagatgtgctgcttgaaatcaacaaatggggcattgaccacacttttgaatgtatcggtaacgtcaacgttatgcgtgcggcgctggaaagtgctcaccgtggctggggccagtccattgtcatcggcgtggccggcgccgggcaggagatatccacccgtccattccagctcgttaccgggcgcgtatggaaaggttctgctttcggcggagtgaaaggccgtacgcaacttccggccatggtagaagatgccatgaagggtgaaattgaactggagccatttgttacccacacgatgacgctggatgaaatcaatgaggccttcgatcttatgcatgaaggtaaatcaatccgtacggtaatccgttactga

SEQ ID NO: 300201 - DNA, 3513 bp, Proteus mirabilis
atgcgcactaaattacttgataaaggatatctagttaaaggagaaagaaccgatgtttctcatttagagagccttaagttgatgaatcaatacggtaaacaaataatatcaagtttactatccccagagtatgtaaataacaccaatcacagaaatgcgttagattcgatacaaaacccgataaaaaagaataaggtgactgattgggggatggtatatgtaaaacccaatgataatgggggtgatagtcgttttgatagccagattattatccaaacagaggatgatccgatagtcgctcaagcagcttcggcacttgccgctaaacatgccaaaaatagtatcgtggtacaattggatgccgatggtcattaccgcgtagcttatggcgacccagcacaactttcaggtaaaatacgttggcagcttgttggccatggtcgtgaaacaaccgaaaataatcatttacgccttagcaactacaatgctgatgagctttccaatcaattggttaaattcaataccgtattcagcaaagaaaataatatcaatacaactcctgaacatatcagtattgtcggttgttcattaataagtaatgacaagcaggcaggatttgcccaccagtttatcaatgcattagatcaacaaggcattcgtagtagcgtttctgctcgagtaacagaggtcgccgttgatagcaatggtcacaaatacaccaaagataacaacggagagtgggtagccaaacaaacccaaaacaaggtagtgttagattggaataaagaaggcaaaatcacgactgaatttgagcaaatacataatggtgttgctgaaggtgatattgatttgactaaagtaggtgcttcagctgacaacaaagtacgtggcgcaattgcagataataatgaagtctttaccgcccccaaaaaaggtaaaaaatcaaccaaacaaagctcatcaggaagtgataattcatcactaagctattctggcaatatccaagtcagtgtgggtgacggcgagtttacaacggttaattggggaacctctaatcttgggatcaaagtaggtactggcggatttaaatcactggttttcggtgataacaatgtgatggtacacgttggtaatggtgatagtaaacatagtgttgatattgctggctatcaagctttcgaaggtatgcaattatttgttggtacacgtaacgtcagctttaatctggggcgtagtaatgatcttattgtgatgttagaaaaatcaattccaacccctccactgatcaacccttttgatggtgctgctagaatcaccaaagttctagagtcaatcgcatgctcaggtgaaaataatgataatgattggttgtcggtacaaaacgatcagtggacactcgctggcgctaaaaaatttgccatagatatgtcaggaatagaccaaacgagcaatgttgactataaaacactgactgatctgaattcacagaataagcgtagtagccgtggattaaagagtgatctagaagccacactaaacaaaaaatataaccagtggttaggtggtagtggcaataacaacgagatgggaaaaatcagccgagctgagcaacttcgtcaactagatagtaaaatcgcttttaatttcgccattggtggtcaaggtgctgatattcaagttactgccgggaattggaacttgatgtttggtgataatatccagtctattatagacactaatcttggctcattatttggcttaatgacgcagcaatttacagcaactggtatggtggaaaccacctttacttataccccccaaaacttaccaactaagttaaaaaataaattgctaggtcggttagccagcgtgagttcagacacgactctgggggatatttttggagtagactctaccacagatggaaaaataatctctcgtaatggtgagcccattgatgttgtcgctattttgaaagatatgctcgctgtagtgactgagtttggaggtgaaaaactgtccgcatttactgatccgactaaattattagataacctccaatcatctattaatctgggcaaggatggtattatttcatttgctgaaagccatggtttaaaagaaaaagcgacagaagatcaacaaaatgaatctgaagtttcaattaatgcccaaacaccaataacaacgagtcaaactgaaaatagcaagatcacagaggaaaatgatcgccctttcggcttcaattcgctaaatatccccaatctatttgccacaatctttaataaagataaacaaacagatatgcgtgatctcgcagaaaacctcaaagaaaatttagcagctgatgtactgaacatggagaagaaaacgctcgatttcttgcgtaatagtggtcatttaaaaggcgatggtgacatacatgtctctcttggcaactataatttcaactgggggggagatggtaatgatctcggcgcttacctaggagataataataatttttggggtgggcgtggttcagatactttctatgcaacggggatctcaaatatttttactgggggttacggaaatgatctcggcgtcttgatggggcgctcaaacatgatgtttggaggcgatggagatgacactgctattatcgccggtcggatcaataatgtctatttaggtgacggactcgataaagcatttgtctttggggaaggcggtgaaattcacactaatgcaggtaatgactatgttgtcactaccggtaactacaatcgcattttcagtggtagtgaacaagattttgttgtcacaattggtaaccacaaccaaatatccttagaagaaggcaatgattttgcgaaaatttttggtaactacaataggttgaatggagggggcggtgatgacgaaattcaactaatgggttatcacgccgtagttgatggaggcgatggaaatgatcaactaattgcagcttcattctcgaaatttagccttcttaatggtaatacaggtaatgatattatcatattaggtggatatcagaaccacttcaaaggtggaaacggtatcgatagcttcctgattaataataatgtgattgattgttatatagacgatattagccaagaagataatattgtacttggaggtattgattggaataaattatggtttgaacgcagtggctatgatttaaagatctcacatattcgcttcccacaaaatacaggggaacaagccacatttgagcgcattggctcaactacttttactgattatttcaatggtaatcaggcaaaaatcgttatcgcaatgactgataaagatcactctgatcagcgcgaatatacggctttatcaagcaatgcactcgctattcaaattcaggccatgagtacatttcctatgaaggcaggcgcatccggatttttcgataatataagtgatgaggctaaacaaatgatagccgtagcttggacagatacaatttcaggaaaaggcatattagtgtag

SEQ ID NO: 300202 - DNA, 444 bp, Proteus mirabilis
gtgttattgctatcaatcggtggcgatttaactacctcgtttgtgttgccggcgatatttagtgatgatttttcagagccgtcaacctcattaaccgcgcatcgtcatgagtataaagacggggcagtaattgaatatgagccggcaacaggggcgctaatagtcacgggaattaaaaccgccgtgattgaagccagcgagtcggtcaaagtcacgtcacctgacattacgtgtgtcgcgacaagcaaaatcaccttagatacccctaccgttatttgtaccaacaacttaaccacgggatcactgacggtgcaaaaaggcggcactatgaccggtgatattacccatgttggtgggaaaatgtcctctaatggcgtggtggtttcatcccatacccacggtggtgtgcgtaccggtgatgataatacggggcaaccacaatga

SEQ ID NO: 300203 - DNA, 1227 bp, Proteus mirabilis
atgtctttgaaacgtaaaattgcgctggggaaaaatgtattagaagctgctcaagagagagtccagtggatatttgatacttttgaacaaatcactctctccttttcgggagggaaagattctactgcgctttttcatcttgttgccgcacaagcgcgaaaacaacatagaaaatttaatgtgatgtttcttgattgggaagttcaatattctgcgactatagatcatattataaaaatgaaatctatctaccaagattgtattgaacggttttactggatagcactccctatcaccactgaaagtggcatttctcaatatgaacctacatggacagcatgggagtctggtaaaaaatgggtaagacaaccgccagaagatgcgataactgaccctcactttttccctttttatcacccaaatatgctttttgaagattttacccctgcatttaaccagtggatcacaggtaatcatcgcagttcgattatcctgctaggcataagagcggatgaatctttaaaccgatttattgccattagtaataatcgaaagttacgttatgccgatgatattccttggacaacggcatcagcagaaggcttttattatatggcctaccctatttatgattggcatgttaaagatatctggacttatatagcgcgtttcaatttaccctataaccctatttatgatctgatgcaccaagcgggcgttagtttaagtcaaatgcgtatttgtgaaccttttgggccagagcaacgcaagggactatggttatatcatgtgctagagcctgaaacatggagtcttgcttgtgaacgagtgagtggagctgatgccggaatgttatatacgaatcctcgtaataaatcaggtttctatgggctgcatcaaattagcaaaccttcccatcatacgtggaaatcttatgctcactttttattagccagtttaccagagaaaacagcagaacattatcgtaataaaatagcggtctatcttcgctggtatgccgaacgagattacccaaatggcatacctgatgcacaagaaggtgatactagcactaaacaaataccttcttggcgacgaatttgtaagaccatcttgcgtaacgatttttggtgtagaacattagcatttagtcctactaaatcacactgttatgatcgatatttcaaacggatacaaggaaaacgaaaagactggcaacttatttag

SEQ ID NO: 300204 - DNA, 642 bp, Proteus mirabilis
atgaccattgaaactataatttctgttttaaaagagtacctagcaaaactaaatgatgaacaaaaaattgaagctctcaataaaataaaaatatcgcttcatcaaataagcccatttaaaaatgaacctactgactgtgttctttggataaagcaacaacaagttatcgctaatgactataatcccaatgtcatgtctccgacagaaaagagattactagaaacgtctctggtaaaagacggttatactcagcctgttgttgtcttacctattcaacaatccaaaaataaaccatcacaatggcaagtcgttgatggttaccatcgttatttattgagtaaaaaaaatagcttaaacaagcgaattaacggctatttacctattactatacttgatgttgaaagtcatactatggctgaccaaatggcagcgactattcgccataatcgggctagagggcaacatcaagtggcagcaatgtcggatatagttagagatttatcaagattaggttggaatgaccaaaagattggtgatgaattaggtatgtcacaagatgaagtactacgtttaaaacagattagtggcttagctgaattattttcagagcacgacttttcagaagcttggacggttaagtag

SEQ ID NO: 300205 - DNA, 213 bp, Proteus mirabilis
gtgcggtatatattattattatttatctctttgttttttattgtaatttttctattaaaaacacagggcagtaccaaaaacgatgttattaaccaacccacagaaatagaaagaaaattaaataaaaaagtcgaaagatgtatgtttcactcaaaaataaaaactaaacgtttgccttggataatgttaacacgtaaacgttcatgctcttag

SEQ ID NO: 300206 - DNA, 384 bp, Proteus mirabilis
atgcctgaacttatgctcacattgccatttccaccaagcgttaactcgtattggcgaaacattaaggggagaacgctgattagtgaaaaagggcgtaagtttcgaattaacacgatcgcctctgtctatgagcaactaaaacgaaaacctaaagctattaaagaaaatgtctctgtcctagttcgtttatacccaccaacaaaacagcgcagggatattgataactttttaaaggccccatttgatgcattaacacatgcgggtatttgggaagatgatcagcaggtaaagcatatggatgtgatgttaatggaagtcgtaaagggtggaaagttagaaatcactatccgctcatttaataacgtgatgtacggtcacgaataa

SEQ ID NO: 300207 - DNA, 387 bp, Proteus mirabilis
atgaaaacgacagagcaaatactgaaccaatataaagagggtgacaagattgatcgccatattgtgagtcgtgatttaggcatagctctatctagctcatcgagagcattgtcatacctgaatggattaggtgcattagtacgagtaggcaatgaagatcgccctgtacgttacattgtgaccaatgaggcagagcacatttaccaagcgataattgaagagcgcaaactaggtgaatcgacctacctgcaaaaacaaaaggccaaaaagcgcgcattacccacaatcaaatgggtaaaacatgccacctctaattttgatctcatgggtaaattgccaacagagccttatgactcattagtcagaacagtaagaggtaatcactaa

SEQ ID NO: 300208 - DNA, 639 bp, Proteus mirabilis
atgattgattacgcactgaaattacaggagttaaaaaaccaacctgctcataaattaaatgaaataggggatcagtggcaatcacccgaaaacctcgtatatggcatcaattcaatttatggtccattcacactagatctattcactgacggtgaaaacagtaaagcaccttatttctacacagctgaagataacgcgctcacgcaagattggtcagcgaagctaaaagaaatcggcggtgttgcctttggtaaccctccttactcgcgtagttcatatcacgaaggtcaacctttaacaggtgttggtcacatcatgagtcatgcattagctatgcgtgaacaatacggtcggtatgtttttttattaaaagcggcaacaagtgaaagttggtggccagaaaatgcagatcacatctgttttatccgtgggcgtataggttttgacgttccgaagtggtttattccagctgatgaaaaacaaaaaccatcaggtgcaatgtttgccggggcaattgtcgtatttgataaaacatgggctggtaaagcatttgattacattagtagagaagaattagaacagcgtggtaaggcatttattgagcaaatgaagtggctggcatcgagaggtgttgcatga

SEQ ID NO: 300209 - DNA, 1119 bp, Proteus mirabilis
atgacgactatttttgatgttgtacaagctatgtcagggcagaaaaacgtcattgttattcctgttccctatttagatttttttaagggggatcagcaagctcatgccttgtctgcaattttaaatcaacttgtcttctggtctggtgtttcatcaagtgctgatgatggttggttctataaaagccatgaggaactagcagaggaaattcatggtctttctggtgaagagcaggctcgacgtctcgttgataaattacgtaaaaaatattttcccggtgtgattgaaactaagacaaaaaaggtcaatggcacacccgttactcactacaagatagatggtaataagcttatctctatgattttcccgtctatttctgaaacgtcgaaagtgaggaatggaaacgtcgaaagtgaggaatcggaacgtcgaaactgcggaatggaaaccgcagaaatgcagaatcatggaaacgtcgaaagtgaggaatcctatctttatacagatcttaactcagataaaaacttacagatcagtaaagacctttcgtcgcagaattctggcgaatccagcgacaagccaaaaaatgattttttaactcgttatccagaagcagtaatttacagcactaacttccaaaaatggggtgatgaaggtgatttaaaaacggcaaaatggatgtttggtcgtgttaaaaaactgaatccatccgcattagagcctacttggtgtgactgggcgaacgatattcgtttgatgcgccaaatcgatggacgtactcatgagcaaatttgtgccttgttcgattgggctaacaaagattcattctggtaccaaaacattttaagccctcgtaagttacgtaaacactttgatgaactattcgttcgtagtcaaaaaccaaaggatgagccaaaggttcaagttgataccgttgagcgtgacagtgctttctctcgcttgattggttctcgttctaaacctcaaaaccgtattgaagaaattgcgcttgaactagcgggtaagacaggcattcgccgtatgagtgagttttctggtcgccaggcatggaacagtatttggaagcaagcgacagaaatgtctctggaggctcagtaa

SEQ ID NO: 300210 - DNA, 180 bp, Proteus mirabilis
atgagcaatgagaacccaaaccaacttgatcgctactataaaaatcaccgaggtatcgttgttcatgttgttcgttatgacagagaaaaacagcgtgtcatttttatgcttgatggttgtgacgacccacagtgtgaacctgtgcagcgttttaaagagaaatacaccagagttaagtga

SEQ ID NO: 300211 - DNA, 174 bp, Proteus mirabilis
atgagtagattatcaaacttagcatgtcgcacgcaagtgcgagcttcaatacgtgatggccgttttgtctatgaaattaaagtaccaaatggctaccaagaaaccaactaccaatttatgcgttggctggtagatgattttaattcaaagaatgggctgaggacgaggcaatga

SEQ ID NO: 300212 - DNA, 459 bp, Proteus mirabilis
atgagtaaccaatcaataaaacaagttgtgaaagagatgtgtgaggcaacagctggtgggcgtgaagcgatggctggggcgttgggtttatctctgacttcattcaataacaaattgtacgagaaaaacggctgtcgttcgtttgatttaaacgagctattagcgatgcaagatatttctcagaccgttttatttgctgaatttgtcgctcgtgaatcaaaccgcttactcgtggacagaattagccctgctgatttagatcagacagaactattcacattacgtagcaatgttgacgaaatgcaggggcgtttagcgttattgatgaaggacagcttagctgacggcgttattgataacgaagaagagcagaaaataaaaatgatgttagatggattaatttcgcagatccgcacatttatgaatgcatttgtttcgttacatcaaaagagaaattaa

SEQ ID NO: 300213 - DNA, 234 bp, Proteus mirabilis
atgcatcaagaaaattatacagaaaaagcaatcagaacaattggggtgccgtctgcagtatctcgaatgttcggctttaactcccctcagtcagttttcaactggattaaaaataataaagtgcctgcagaacgagtgatccaattatgtgagttaggtggttgggtcgtatctccacatcaactgcgccctgatctttatccaaataaaaccgatggcttgccaaaagaataa

SEQ ID NO: 300214 - DNA, 726 bp, Proteus mirabilis
atgacaacaatagaattggcagatagaattctacttatggtagaagataataaatatagtagtttcgctaaacgactaacccagcgaatgaaagaagctaatatagatattcggcagctgtccgaacaggttggcgtgtcttatgaaatggcacgtcgatatacgctgggtacagcaaagcctagagatgataagatggaattagtcgctaaaaccgttttttcaacccccgcatatcttgattatggtgtcggtttacaaacagatcctcagaatgaatttaataaagataccgcgatagtcaggcaaattgaggtatttgcatcagctggtaatggctatatcaataatccatttccagaggtcgtcaggtcaatagaaataccacaagaacgtgtttatgaattatttggtcgtaggactttagatggtgtaatgattatcaatgttgatggtgatagcatgacccctaccctaaatcctaaagatttactttttatagatactaaaataaaccagttcaatggtgatggaatttatattttcaatttcgaagactctacttttattaaacgattacagcgtgtaaaaggcaggaaattagctgttatatcagataatgatttctacccaccttttttcattgatgatcatgagatgcatgaagttttttttcatggaaaactcataagaagcctcccaatgtcgttcaaacagtttgcctaa

SEQ ID NO: 300215 - DNA, 204 bp, Proteus mirabilis
atgacaactgaaccaataatcatagcgccagatggtttcactaatgaagatatcgaaaagtggatgagggacaagttgcagtgcatagattatctccctgttttacacggtaagcgagaaagactaatgagcgatgtaaaaaagctagatgccgaaatagcagagtacatcagtaaaagcgctattcagatacaaagtaaatga

SEQ ID NO: 300216 - DNA, 324 bp, Proteus mirabilis
gtgagtaatattactaatgaaaaacaaaacatcaaaatctatgccttagtctttcataagaacgcgctaactctgtcaaccgacaatatccatgaagacttttggttagagctacacgaaaccatcggttggattaaatttgtaaaacatagtgaagaatctgagtttgttaagaacggagcactgtttgtagccactgaactgcgtccggtatctgattcagtcccttacccaatagttgaagcacgatgtgttttgtggcgtcagcgggaagctcttttaagcgctgcagatatcctctcctttcttctgggtcagagatag

SEQ ID NO: 300217 - DNA, 495 bp, Proteus mirabilis
atgtctaattttgatagagacctacaatttaaaattttagagttagctgtgaatgattatcccaatcaaatagatgatggcaatgtacctccagaactctatgaaatagataataaaaaactatgtgctaatattgcttacctccaagaagaaggattaattactggtggtgtcgaaatgtacatggatggccccgaagccgattttgcttttattaaggcaacatataaagccataatccttttaagtgaagaaggtagtatatctgcaccattaaatcttattactgtaaaattacatgacgatacactaaccgccattcgtgaatacataaaccaaactatctctgacccagaagaaaggagaggatatctgcagcgcttaaaagagcttcccgctgacgccacaaaacacatcgtgcttcaactattgggtaagggactgaatcagataccggacgcagttcagtggctacaaacagtgctccgttcttaa

SEQ ID NO: 300218 - DNA, 246 bp, Proteus mirabilis
atgaataatgaatataatagagaacaaatgaaattaggtgttctatatgctcgcaatcatttaattagctcatataaagcaaactttattgaatgtgacgaatgccagttcgcaatgtttatgaatacattatctctcgttgcaaacgaatcaatagatattgaattaatgatggaaaatgttttgtcatgtaatgacgaggctgaaaattggattaaagaaattctaattaaatattctaaataa

SEQ ID NO: 300219 - DNA, 270 bp, Proteus mirabilis
atggataaatcaaggcagcaatttgaagcatttataagtaaaggtgattacccttgggtaaaaggtattatccctgtcatgtggatggtgtgggaagcatcgcgcgaaagtgctgagccagaaattaaacatcatcaactaagagagcttgttaataccgcaagagatacggctattaaatatcaagggtgtcaatgcttacgttcagcgttatcaacagccataagacacagcttaatcagcaatggagtgaaaataaaagatgaataa

SEQ ID NO: 300220 - DNA, 174 bp, Proteus mirabilis
atgaaattaacaggcaagcaaattaaaacactggatattgtgagagataagtttggcgctggaattgatggtagaacacttaagtcttttgagaaaaaagggttaattagacagaccatccttggatggacactaacaaaatcaggatttgatatattaaataaggtggattga

SEQ ID NO: 300221 - DNA, 327 bp, Proteus mirabilis
atgacagataaactcaaagaagagattaacgcacttcaacaagaagtagctagaggtcacgtatatgagtgggagttacacagactaaatttattacttttagtgattgagcattacctttcagaaaataattccaaagaggctcacttgtgggcgcaaagcatattccagtggattgactcagagttttacgaagagatgaaaagcaatactggagatattaacgcttggtttaataaacaaatggaaggcgcagtaagcaccgagcgggcgttaaaaataactcgtgagttatatccagaaattgaaaagctacggacagcttaa

SEQ ID NO: 300222 - DNA, 339 bp, Proteus mirabilis
atgaaaacgctacatggtcgctgtattcgtcgttggaaactgagatttaaagatgtttgcgattcgaaggtttcaccttatttcagaaaacgcgacttaaaaggattttgtcgtgaatgtggcgttattactgctgacatgatgattctaaacatggcagagggtaatgctcacgttgattttgatggtaaacgccatggatggtcacctgaattttcaaagttctttgacgagaaccgagagaagtacattaccgaagcacgtttgtttctcaacgaagaagctactaacgacgaaatagatgacttaatcgaagaagaaatctctaattggaattag

SEQ ID NO: 300223 - DNA, 498 bp, Proteus mirabilis
atggctaacggatcagtaaacaaagtaattcttatcggcaatttagggcgtgatcctgaaattcgttatcttccttctggtggtgctgttgccaatttagctgtggccacatcagaaaaatggcgtgacaaacaaacaggtgaaaatcgcgaaaaaacagaatggcatcgtgtcgttctgtttggaaaactcgctgatatcgccagtggctatttatgtaaaggctcgcaagtttatatcgagggccaactacaaacgcgcgagtgggatgataacggcgttaaacgctatacaacagaaattgttgtaaagattggcggttcaatgcaaatgctaggtggtgctagtaaatcagcaggttcacaaccggcacagcaaaacccgccaccggctcaacctcaagcacagagtagtcaaccaccaatggatttcgatgacgacatcccctttgcccctatcggactcccctacccacgccacgctatttatgtgatttaa

SEQ ID NO: 300224 - DNA, 408 bp, Proteus mirabilis
atgcccattttggcggccatgacgcttgcacgatactctatcgccgcatctttgccatccttcatctctatttttaatgcagtaacattattttcaaggtcttgtagcatcacttcaaagttatttgataacttcgcttctaatgctgttctgaggttcgaaatagcaatttctgcttcctctggaggtacttttgcatcctcaagtgatttagcaagattgtctatctgggtttctatatcagcaataaccggagagcctagctctaatgttctcaacaataattcgttagcttcacgaactccgccaacggattttagatataaagcattagcttctatttgttcgtcggttttacctgtcctttctttttctgtcttgtttaataattccagtgttcgggaatag

SEQ ID NO: 300225 - DNA, 234 bp, Proteus mirabilis
atggcaacactttgtgcctgtgtggctagcgttacttttgctgacgctgcggcaactgcctcatttgctgactttaaggttgctttacctttctgctctagcgctattgctgcgtttaatcgtttagttgcaagcgcttctgcctcttttgctgctgcaatacgagcctctattgcggctatttctttaccagtaactgacaactgtgtctttattttgttttcggtggcgtaa

SEQ ID NO: 300226 - DNA, 723 bp, Proteus mirabilis
gtgaggaaggtaacattaacagtatctttgctaatattatttatgccttcagctaaggcaatagtggttgaaaaaagtgaagtgtcatggatggatgatatccctgaagtaagagcgttgggatgtaaagaatttacaaaattaacatactcaaaaataaagcctagagaagtaattattagtgaatctatattttctactcataaattaatgccaaacagttatttggagtgcagtatatggaaaaatagagatgatactgcatacgtgattaaaccaaaggaacattttaatatagaaggacataacataggtgtgtatcatgaggatggttctggaagaattgatggcagtaatggactatggtcttttgggtgtaaaagcgacgcgatgacagatgagtattattgttatttgtcggccaataatataaccgtgacaaaagatactgatgggtatcaagtgtatgttggtaatggggtattaaaatcatcaagatcgctaattagatttgataaagataagccaatcgaatccgaattaggtgggatatattatggagaaaaggctacagatataattaaaaggcttaatcataacccaaaagtaacaataaggtattatccatacaggaataataaatcagtagatgaaatcataaatattaataactttaatatagctaaaagcgtgcttgataaaatatatgattcacacaaataa

SEQ ID NO: 300227 - DNA, 795 bp, Proteus mirabilis
atgaacgaattaactttagcatcacatgaaacaaatgtcactatgtcaagtcgtgagattgcagaattaacaggaaaggctcaccatcacgtagttcgtgacattgagaaaatgtttatggaactagattttaattatccaaaaacggatgattatgtttctaaagagttttttattaagcgtaaaaattacaagggtcgttctgttattgatgaaataggattagaccaagatcttacaatgacgttaatgactggatacagtgttccattgcgccataaagtatcaaaacgctggagggagcttgagtcagggaaagcaacaccaattgttgcacttaatgatcctgaattcttgcgttctgctttattaaattacactgaaaaagtattagctcttgaatcatcaaataaagagctaacaaacaaagtcgagtgtatgtctaacttgttcaaagaaggcatgacaccgactcaattttgtaaaatgcttaacggtgtaaatactcaacaagttcaaatgtggttagctgaacgcaactggctatataacgaaagtaagtcaggtaaaaatattcgctggcgtgtcgcttcatacgctcgtgataagtacatgacagaaaaccagagtgaaattaacccacacggtcacgaacctttcattaagtatcagccagtattactaaagaaaggtgctaaacgtctttatgatctctatcttgctggtgaactaccaatgaaaaagaactgggatggtttatttactcatgataaggaattcaaagaagtagcttaa

SEQ ID NO: 300228 - DNA, 816 bp, Proteus mirabilis
atgaatatagatgataattttaaaaatcgcatacaactagttaggcaatctttaggccttactcaaggtgatcttgctgacaaggtaggagtggtccgtaggcaaatagccgcttatgaggctggtgactcaaaaccaagaattaatgtactaaacaatcttgctgcaacattaggagctaccgctgagtggttagctcaaggtattggcgcccccccagagattgggcgagtcagatccacgattaccttgccgctaatacctattctgacttttactcaagctgctaatctgccaagtgatgacaatatggttgggtatgattacatccctgctcctcgtttagcttcagatactgcgtttgctgtaaggatagatggtgattccatgcaatctaactctgcaattacctttcctgaagggagtattgttatatttgacccagaattagatgctaacaatggcgattttattctctgcaaacttgattcaagtaatgatgctactttcaaacagctaattattgatcaaggtgagtattaccttcattcgctaaatccaaagtatatgaatatgttagttagtaaaaaattaactattttgggggtagcgatagaatctagaaaggaactatcgccagatataattatgctatccagaagcggaatgatatctaactttatggaaaacattagcgataaggatacaaagaaagaaattgaatccaaaaaagatagtatttctggaagactagacaaaattgaatccatgctagaaaaactagtagccaacagtactcaacaaaatgataaataa

SEQ ID NO: 300229 - DNA, 351 bp, Proteus mirabilis
atgaaacttaccccagaactactacgtgacggatgtcaatggctagctcgagagttaactaggctagaacaactaaaccaacctttatcaataaatgattttttttcatggtcatcaaatgaagcttttattaaaaccatatttacacggtacagagagttcattaaggggctctatattcttgatcatgaaagcgaatattattgcgtagaacttactgagtatatggagaacgctttagcgagacatgaaaatgttataacccctgaagtatatggcgtcgtggataatgcatatctgctagctataaatgtcgtattttcgatagcaagggaagctgatgatctataa

SEQ ID NO: 300230 - DNA, 1014 bp, Proteus mirabilis
atgtcaataactaaacaagctgatggccgttggttagttgaactatatcccaacggtcgaacaggaaagagaataagaaaaatattcacaaccaaaggtgaggctgttggttataaacgccatattctcgaagagtcacaagataagccgtggctaggcgaaaaagaagataaacgtttattatctgagttgcttgaaatctggtttcgtgctcacggtattacattagctgatggtgaaagccgaaaacaaatgatgttattcggttgccaagcaatgggtgaatctttagcaacagagtttaatactaaattattttctgtttatcgtgaaaagagattaagtggaaaaattactcgtgccgatagaatcaagtccgttgctccaagaacaacaaaccttgaactagcttattttcgcgctatgtttaatgagttgcatcgattgggtgagtggaaagatgataacccattaaagaatgttcgctcatttcgtactgatgaatcagaaatggcgtttctttctgatgaacagattatccaactgctagaagaatgcgataaaagcaaagcgaaagatttatctattattgtcaaaatcgcactttctactggagcgcgttggtcagaagctgaaggtttaaccagttcacaagttactccttacaaaattacatttaccaaaacaaaaggtaaacgtaatagaactgtacctatatcagaagagttgtttaatgaaattccgaaacgtagaggccaattatttacgccctgctattctgcttttcgttcagcaataaaacgcgccaatattgaattacctcataggcaatcatcgcatgttttacgacatacttttgcctcacattttatgatgtcaggcggtaatattttagttttacagcgaatattaggtcataccgatattaaaatgactatgcgatattcgcatttcgccccagagcatttaaatgatgcgctgatgtttaatcctttagtgaagttgaagatatag

SEQ ID NO: 300231 - DNA, 585 bp, Proteus mirabilis
atggcattgctaggaataagtgttcagacagaagtgtttgtgccctattttttacaaatgatccatggtattactccgttactttccggttatttagctgctttagtcggtgctggttggtctttttcggctattatctcttcatctcaaccaagcaatattgctcagcgtcttatgcgtatcggccctgccattaactttactgccataattgttcttggcttattaatttcaaattatcttcttttaccttatgggcaagtgattattatttgtctagccctcttttttacaggtgcaggaattggcatggcttggcctcattatctcactcgtgtattacaggtttctcaaggggaagaagcgcaaaaagcggcgacgtcaatcaccactattcagctattttcaaccgctgtaggtgctgccatttcaggtactgttgtaaatatggcaggattaaccaaccccggaggtattgctggcgcacaaaatgcagcccattggttatttattgtattttctattaccccactgattgcatttattactgcaaaaatcgttgtttccaatataagaaaacattaa

SEQ ID NO: 300232 - DNA, 714 bp, Proteus mirabilis
ttgtcgccagaaacacagccggccgttgcaggagatgaaccggttttaatttatcatcgcactggcgtacctgttgccgttgcaccttctcgcagtgatgcagtcaaagcgctattagcgcaatatgatcttgatattattattactgatgatggattacagcattatgccctacagcgagattatgaaatcgttgttattgatggacaacggcgttttggtaatggctggtggttgcccgcagggccgatgagagagcgcgctcatcgtcttgattctgttaatgcggttattgtcaatggtggtgattgtcaagcgaatgaaatagcgatgagtttagagggagaaatcgcggtaaatctaaagacaggtgagaaaaaagccattactgagttgggtaatgcagttgctatggcagggattggtcatcctcctcgtttctttaattccttgcaagataaaggggttaagttaattgcaactaaagcctttaatgatcatagtgaatataccctacaagagttacaaatactgacgcctcaccaagagcctctgattatgacagaaaaagacgcagttaaatgccagcattttgcgcaaaacaactggtggtatttgcctgtcagtgcggtattgaaagatctatctgtgctaaatcaagtcagccaattagtgacaacgcgaaaaaaacttgtatatgatctgaaacaatga

SEQ ID NO: 300233 - DNA, 1650 bp, Proteus mirabilis
atgaaaaaattatcagggcgtatatatcttgcgcttgttcttattgcttcattatttattgtctttgagaaagcttctctaatttataccgcactactgtctgttagtgtttattttattatttttacgctgtgttttgttttatcgtcccgcgcgctattctcggcaatcacaacagggacactctttatcattatcaagtttatcaatcagcttaaagtccactattataaagagtcactgctattttcagattttagccttgcttttgatagctcaaatttaggcaccttaacgcagtattgggaagccggtgtcgcgattattgccatggctatttggctaatcattaatatggttaccgcgtggcgtttctcccgtaaatcacctattgctacacgcctaattagcttattactcattattattggccttacaactattcattttacggtgaataaatggcaatcggagtgggaaggtacgcttcccggtggtcgaggaactgtgactaatctaattatgtcgggttatcaaacggcttatcatcccccttactatgcacaaagtgcagactactttatcgagcaagccaaccgtgtggtcttaccggaaacacaaaccgaggtaaaacccgatattgttgtattactacaagaatctaccgtaaacccaaccatttaccaatttgataaaaacgtggatttgcccgatctttttatgtttaaaaaagatgaaggtgtcagtgcccaaagcccattacgagtacaaacctttggtggaggaacttggctttctgagttctcagtattaactggtctaaataccgatgattttggtgcgcgtaaaaactctgtgttctattttgtggttgataaactcaatgaaagtttattccgccaactcaaatctcaagggtattacaccgtactgctcactccctttaatcgtaacgcctatcacgcgggatatgcttatgaaaaattaggggtagatgagattatccagccacaagaattgggttatccggggagtttagaagagaatttatggactatccctacccaagatatgattaattatctaaaagaaatcttaaaaacacatacagataagccattatttatcttttctttaactatgtatgagcatggcccttataaaggctcacatagtgatgattatcaattagctggccaaacagaaagccctgatgcaccgggtaaatttagccactatatggaaaaaattattgccagtgatccggctattgaagatttttctcactttgtcgcaaatagagagcgccccaccctgtttctttattttggtgatcatcaacctaatattgacctaaaaaattatcaatcaccttttagtgatccagcacatattactcaattcaccttaagggataatttaacgcaaggtgcaaccctttctactggagaattaacggatattaattttttagggggaatgttgttagagcgcgctcgtttacctttatcaccttactataaagccaatattcaaatgcgtcatttatgccaaggcaaattaaatgattgtgaggatgaaaaattagttaatagttataagaactatatttataacaaattaaacgttgccggtggcaaagataattaa

SEQ ID NO: 300234 - DNA, 1038 bp, Proteus mirabilis
atgtccataagacagttatctcgattgactcatcgacttggtattttgctaacactaagtgtgatgttaatgatatccccaatgacacaagcgacagaaacccaagcaggatggcaacaatttaaagcgcgttacattactcccgaggggcgtgtcattgacagtgctaatcaaaatatttcacactcagaaggtcaaggatatggcatgttaatggcggttatgagtgacgatcgccaaacctttgtacaattatggcactggacggcaatgtcgctgtatcgtggtgatcttggcttatttaaatggcgttatgaacccgaaaataaccaacatacacccgatcctaataatgcaacagatggtgatattttaattgcttgggcattattaaaggctggggaaaaatggcatgatgaaagctatctttcagcatcagattctattcagcatgcgatccttgaacacactttagtgaagacagaaaactacagtgtactcttaccgggaattaatggttttaaaactcccgaagaaattatcattaacccctcctattttatctttccggcatggaaagatttctatcgagttagtcatgatagtcgctggaaaaatttaattaacgatagccaatccttattaagaaaaatgcgttttggtaaatataaattaccaagtgattgggtaagtttataccctgatggtcatcttgccccgagtgaaaaatggccagcacgatttagttttgatgctattcgcattcctctttatttagcatgggcacaagataaactcgcattacaaccttttgtgaattattggcaacaatttgatcgtgataagacgcctgcgtggatcagtattgatggtaaagagcgcgccgattataacttaacgccaggtatgatggcggtaagagatctgacaatgaaaacagcaattgaaaatgtcgatttaactaaggatacggattattactcttcagccttacatttattagccgcctttgcgcagaataatcacaatgactattag

SEQ ID NO: 300235 - DNA, 687 bp, Proteus mirabilis
atgtttaaatatttattaacgaaagaagaatttgacgcattaactgatgagcaaaaggctctttacaaagagtctggtggtaattaccaacttcaaatcgaaggtatgccagaaattccagatgtgtcaggacttcaaaagaaagttgatgaattactttctgagaaaaaatcagagcaggagaaacgccggcaagctgaagaggctgcaaaaaaagcagcagaagatcaagcgcgtaaaaatggcgatatcgaatcactagaaaaaagctgggctgaaaagttaaaggcgcgtgaaaacgagctattagcacagctacaggagaaagatgcgagtctacatacgctattagttgataacgttgctcaaactgtggctacaaagcttgctggtgacgctgccccgttaatcatgccacacatcaaatctcgattatcagtagaggacggtaaaacgcgagtggttgatgctaacggtcatccttctgcatttaccattgatgatttagaaaaagaatttcgtagtaacccgttatttgctccagtaattattggtagtaaagccaccggaaccggaggggaaggcggtaaagggaaatcaccagccggaggcagtgaaaaacccaaaagcgcgaatccgttagtggacagcgcacgtgaaatcattgctaatatccaagaggattaa

SEQ ID NO: 300236 - DNA, 546 bp, Proteus mirabilis
atgtggatcagcgcttcttttcatttaaaagtgatccgtacctttgatgctttagtgtcacaacagcaccaggagaaactcagtgataaggttcaagcgggcgtgatactactggaatcgatgtctaaaagtttaaacttctcgaattcatcaaaattaggggcttatcaaaagttacaagcaatggcggggttacctgagttagcccctgtttatgcgattgatgcgccaagtggatctatggatggctccagtcgtcctactgtggctttatcaacactgattaaaaaacacaatttacccatttcagcacagcaagcctataagcgattagccgaactaggcattgttgaacgtctatcacgcccaagcacgaaaactgctagcaaaacgaaagagttttggtctgttacggctagaggttgtcagtttgggaagaatatgacgagccctaataatcctcgtgaaacccaaccgcatttctttgagagtaaaacggatgagttgatccgtatggtgatgttgaataaacaggtgagcgcatga

SEQ ID NO: 300237 - DNA, 1026 bp, Proteus mirabilis
atgaagttactattaacgccgtatattcaaaaagaattgggggttgtgttgttgaaacctggtgctgagttgcttgagcaatttagaaaccatcagcgtgtgatcatcagtgatgtaccacagagtttagatgtgttgccctcaggcgcattaaccggtgatgaacagccgattttaaataatcagcacattgttcaatttctcaatagcaaaaaggtgatccacaccatagataaagtggcaccaatggatacgtgggtcgctcatcatattcattgttgtcagattaataacgatgcagataactatcatcatcatgaattggtgaccacatttcatgaagcgggtgtgatccgcacttgttggtatcacgataatcatattcgaaactcatcagcagggtgggttgctgagttggctcataaaaatcgtattgattggatgttagatactattcgttttcgtttgagattagatgatggccaccagctgacgatacctgattttttcacctttgctgttatgcataacgttatcgatgaattacctgatgccatattgcggagagtgttggactggcctgataaacccaaagaacgcagagtgcacggcggatttcctgaggctgacattgttccaaatgaaatgtcagcattatctgcaatgagcgggcgtttagaggcgataaaaccggttattaaagttgctgtcgatccggagccaccagcctcatttctgctgaaacctaaaatgcaacgttgggaaaatacccaatggttgcaatgggtaaaaactcaaccgtgttgcgtgtgtgggcaacaggctgatgatccgcatcacatcatcggtcatggtatgggaggcatgggtactaaagctcatgacctattcactattccattatgccgcattcaccatgatgagttacatcgagacccaaaacaatgggaagcgactcacggcaatcaactcgaattgttatttcattttttaaaccgttctttaggtatcggtgcatttatttaa

SEQ ID NO: 300238 - DNA, 681 bp, Proteus mirabilis
atgccaatttatgcgcatgacttgaaatatttaagtgatatggcatcgatagctacatcaaacttaagggcttcaacaaaaggtcagttagaagcatttgaagattttgggttaacagacacgagagcaacaccaagagttagaatacgagatttaaaattaaatggtcgttttgtttgtcgtgataccgatccaatctatgtattagaaactcgctgtcgtcgaacaccaaagccgatgatagagcctgtggattttttattatgctcatggcgtagggctatcaatgcattaagtgaagagcaacactcatggataatgtattgttatggatatagtttgaaatttgagcatcaagttaatatcagtgttcatgtgtggtctgaatttgaaaaacagcataaaggtaaaaagataactaaaaaagttaaagaacgactaagatcattagtctggttatcggttcaggcttgcactaggcgtaattattcacaaacagagctggctcgcttggtgggtgttaagcgtgataattggagtaaaaactatcaagtatattgggattatctactttatgtgtgttatgaattagataaattggcattactttcaatgaggcgagttagaatcgagttgatcaataaaaataataacgacaacttgcaaaagtcaacaaaatag

SEQ ID NO: 300239 - DNA, 195 bp, Proteus mirabilis; identical to SEQ ID NO: 298769

SEQ ID NO: 300240 - DNA, 1023 bp, Proteus mirabilis
atgcaactatttaatgacgacgcactatctgtattaaaaacactacctgataacagtattgatttaatcgccacggatccaccgtatttcagagtgaagtcgtgcgcatgggataatcagtgggataatgttgagtcgtatctgtcttggctcgatgaagtattagctgaattctggcgagtattaaaacccaatggcagtttgtatttattctgtggttctaaattggcgtcagatactgaattgcttgttcgcgggcgatttaatgtattaagtcatatcatttgggctaaaccatctgggccatggaaaaaacaaaataaggaaagcctgcgcgccttttttccttcaacagaacgagtactttttgctgaacattaccaaaaaccagtcacagctaaaggttctgagttttcgttaaaatgtaaagagctaaaacaaaatgtattcaagccattgattgattattttagaaatgctcgtttagcactgcaggtgagtgcaaaagaaatagaccaagcaacaggtaagcaaatgtgcagtcattggttcaacaatagtcagtggcaattacctagcgaggaagactataaaaagttacaaacactgtttacacacattgctgataaacaagaaaaactatcaccgttatcccgccagtttaccgaattagagcgcgagcaggttacattacaaaaagactatcaagaattaataaaagaatatggtttattaaggcgaccattctttgtaactgcagatgtgccttacaccgatgtgtgggattatccacctgttcagtattatcccggtaaacacccttgtgagaaaccatcgtccatgatggaacacattattcgctcaagtagtcgtgaaggggatctggttgctgatttttttatggggtcaggtgcaacactgaaagcagcactaaagcttaatcgaaaggttttaggtgtggagcttgagagagagcggtttgagcaaaccgaacaagaaataaaagcgctaacttgtaagtaa

SEQ ID NO: 300241 - DNA, 423 bp, Proteus mirabilis
atgtcaaaagagataaacgaattacagtttagtcttcactatgcctcagaaacagacagcgaaatgaatatctcaaccattttaacggccaatattcatacggctgatggtgaaactcaacaactgacacaattaatttgcacaacgtctcccgcaggtaaaaagcaatatcgaattggcttgcaaaaaattagtgatgcaggagagccatcgctagtggcgattgaatcttattggcgtaaaaacacacaagagagttgtgtttatttgttagagaaagcgaagcaatttattcaaggacacttacaacaaacgaatacatggatatccatgtacggccttgtgattgtttctaatgcgtcactggaagaacagttgcctgaagatttattaaaagcacttaaagtatcaatacccgcctaa

SEQ ID NO: 300242 - DNA, 528 bp, Proteus mirabilis
atgaagaaatccataagaaaaatatatagaagaatgctatctacaaagcattctgaagaagcaataagcaagctagacaataaagacaagttagctgaagagttcagatttaattttgttcctgcggcatctttaacattaatatcatctacattttttattggattaataagttataaccctaacagcgctggattgataaataatattttcatgttcatgtctattgtatttttctccatatcaatatccatgaactcctggttctgtcttatgttctttttgataagacaagatgatagagaacttactgacatggctgtattaatgaaggtgaatctttatgtcatgttgaaactgacttcattcatatcaccagcgcttggaatgttatttctcattgggtaccatagtatttttgctttctttttatcaatatttatattttttttcataattcttctttatcagagtactaaaaaaagaatatataggagagcaggaaaaataaaaatagatgatatataa

SEQ ID NO: 300243 - DNA, 279 bp, Proteus mirabilis
atgagtattgattacgaaccaaagttaattgttggtactgatatggataaagtaactattaatgaagaggaaatcgacgatttactgcatgatgattacacgcgacacggatcatatttcagcgggctatttagttttattggtaaagaggtgcgtgcagaagaaatcatcgaccctaatttcatgctgaaatacttatccctcaaaaacgaagtagcaaaagaactaggcgttacaccagtcgatatcacgctaaggaatggcgtgttaatcatgtaa

SEQ ID NO: 300244 - DNA, 489 bp, Proteus mirabilis
atgtctagggagtttggttatcatcttgaaggcgtaaattacttatccgttgatgatataatttatatcaatgaggctcttattaaagcgcaaacgccagatgagccaatccgagttctaaaccaaagcaacctagaatcttcacaagctagacctagcttaataagatattatgaacaaacagaggatatgtttaggctatcctctgttcttattgaaagtctaatccaaaatcatcctttcgcgaacgctaataaaagaacagccatgatgtgtggttatgtttttttattaataaatggctatgagcttactgcgccaggtgatgatatggttgatattgcatctggtttagccactaaaaattatagttgcgaagatcttgaagattggttgtgtcattggtctagggagtatgacgcagcagaattatgtaatcctgattttggcaagctatgctgcagtgtgattaaattaaaaaacacctaa

SEQ ID NO: 300245 - DNA, 180 bp, Proteus mirabilis
atgagtcacgcactgagaaaggctagtcgattagatataccgcctcgtgacaaaagtaaaattgcgtctcctagagcggtagttggatataattgctcacacaaagatcaggtgagaaatgctttcatccttggatttgatcgttatgagacggctatggataaattatctaaggtgtaa

SEQ ID NO: 300246 - DNA, 450 bp, Proteus mirabilis
atggagcatttacctgtaacatcaaggaaatcaatatccggtcactccatgggggggatgggagcgctggttctgtcgctgcgaaatcctgatgaatatgtgagtgtatcggcattttcaccaatagtgtcaccttctcaggtgccatggggacaacaggcattcaccgcgtacctgggtgaaaataaaaaaacgtgggagcactacgatcccgtcagtctcattttacagggtgcgaaattaccagaaatttttattgaccagggattaagtgacgccttttatgaagatcagttacgcactaaaagtcttgaaagagtgtgcaacgagatgaacatcaacacatcattccgatatcatactggttacgaccacagctattatttcatttccagctttattggtgatcacattgcttaccatgccaacaggctcaggctgtcagcatga

SEQ ID NO: 300247 - DNA, 636 bp, Proteus mirabilis
atgttcatcagagcttatttaagggcatcgacggaagatcagttcgccgatcgggcaaaagagatgctggagcagtttgttcaggagcggggacataaaatagccagttactaccgggagaacatcagcggtacaaaacttgaccgcccggaactggggcgcttactgatggacagtcaccgcaatgatattttactggtcgagcagatagaccgtctgacccgtctgagcaacagcgactggatgacgctgaaaaaacaaatcgagcaacacgagctgcggattgtcagcctcgatgtacccacctcatggcaggcgctgtcagataaagatccttcgcaggctgacccaatcacccgcgccgtgataaccgccatcaataatatgcttatcgacctgatggccgcgatgtcgcataaggactggctgagccgccgccatcggcagaagcagggaattgaacgggcacatacgctgggaaaataccggggcaaacaggccgatcaggaacgacataagaaagttctgtattaccgacaggtcaagaaactgagcataagagaaactgctgaagccaccggttacagcacatctcaggtctgcaggattcaggccctgttcaggcctgaaaattaa

SEQ ID NO: 300248 - DNA, 1053 bp, Proteus mirabilis
atgaaactgaccattgacaatataaagccttaccttttatttgaaacaatttcaggtagtcgttcacaaaatttggcaacagatagttcagatactgatattaaaggtgttttttatctacctaaagagatgttttattgctctgattatgtgccacaagtaagtaataaaactaatgatatcgtttattatgaattagggcgatttgttgaattactgtgtgcgtctaatcctaatattttagaattattaaatgcaccagagcatgttgttatttatcgtcatccattatttatgcaatttaacccagaatggtttttatcaaaggaatgcgtacagacttttgtgcattatgctcaagggcaaataaaaaaagcgcaagggttaaataagaagatcatggatcctatagataaagagttaaaaacaatccttgatttctgttatatcattgaagatggaaaaagcctattactgaataattggcttaaaaaacgttgttgggagcagcaaaatattgggttggttaaaatcaatcatgcacaaaatctttatgcagttttttatgatccaaatagtgattatcaaggcgtaataaaaaaagataatgccaccgatgttttactaagcagtgtctctgaaacagccatattacaagcctatcttagttttaataaagacggctacagtacctattgcaagcagtatcatgcttattggcaatgggttgaagagcgtaatgaagcccgctatcagcaaaatattgaacatggacgaagttacgatagtaaaaatatgatgcacacttttaggttgctttatattgcattaggaattgccactgaaaaaaaagtcaaagtttggtgtgataacagggatgaattgttagaaattaaatctggggctttaagttatgaaacattatttgagcgaagtaaaatattaatagaaaaaattgagcaagcttttcaacaaagtcaattaccagaaaaaatcaatcctcaattaattaagcaagtattagtgaatattcgtaaagaattatatcaataa

SEQ ID NO: 300249 - DNA, 780 bp, Proteus mirabilis
atgcataatcagatattaaaaaaactgccacaaatagagcaaatgcatcaaataaaactactttatgttgctgaaagtggaagccgtgcttggggcttcgcatcaacgaatagtgactatgatgtacgaggtatttttatacggcctcgcaatgcatatctttcaattgataaacctaaagaaacatttgagtggatagaaaataattggtttgatgtaggagcttgggatattacgaaagcattgcatctattacgtaagtcaaatgctatcttatttgagtggttacaatcacctattgtttatcaacaatatgctggtatccaaaaagaattatttgagttggcacaattatattatcaaccccaaatcattgttcatcattatagagggatcgcaaaagccgttagtagacatcattttgaagagagtcatgcaagtaaagcgatagatgagcccataaaattaaaaaaatatttctatctcttacgttcacttttagctgcttattggacagtaaaaacggggaatatcccaccgatggaacttaatcagctaataaatatattaactacagatgagcaaataattattcgagagttagtgagctttaaagcagataaagatgaacactttacttggctaccaaccgataatatgcaaaaactgatcacttttttatggcaagaaacagcaactcaattagcgaaacgcaccgtaccagatagtgaaatattaaataattggtttaggaaaatacttgatgaaactgaccattga

SEQ ID NO: 300250 - DNA, 861 bp, Proteus mirabilis
gtgctggatgaaatggatgcgcaacatgcgctccagaccgatgggtggacgcccattgcctgccttggggtagtgcggtgcgatttcatcgcacagcgcagcccacggcaccagcgcatccatggtcttgagaaattcgtcgcgccgggtgggtttgcgatgctgttcaaagcccgactgtgcgtcggccgccatggcaagggtctgctgcttcatggcccagtaatttacccaggctggggcagcagcggagactttttcagcattgccctaagagcctcctcgctacacacgggaagcgcacctgccgaccctatgtcttgcatcgtcgataccccctcatgctcgatgcgcgacccaacccttgaaggtgaacgcgcaatagaaaaggtcgatgtccgtgaatccagcctcgcggagcagatcgacatcctgcgcgggcgaaagctcgggcagccgttccttgatcgccgcgatgctgccttcggcttgacgcactggtacgccggaagtagccgcgaacgccgcattgcgcgagagccatctgtcccgaccgggatcttcgccgggaaagctgtgatgcgcgacgataaggggcgcacagggcttgagtcgcaggtgcatttgctgcagcgtcttcgggcgctcggctggcggcaggaaatgcagtgtcagcaggcaggtcgcgccatcgaagggccccttgggggcgctgtcgatataggcctcgtgcaagcgcacgtggggcgccatcgggctcagatgcgcgcgtcggccggcgcgcattcagccagcagcacgccaaccatccggggctggttgcgcaggcccggcacgatcctcgcggttctttccacatag

SEQ ID NO: 300251 - DNA, 924 bp, Proteus mirabilis
atgaatcacgatgtgatcgtcgtcggcggaagctactcaggaatggccgcgaccctgcaactggtgcgcgcacgcaggtcagtgctggtgatcgatgcgggccagcggcgcaaccgcttcgccagccattcacatggatttctcggccaggatggtgtgccgccaggtgaaatcgctgcaaacgcacgccgccagcttcaagcctatccaacgctgacctggcttgaaggtcgggtggaaacggtcgccgggcagacggatgaattcaccgtcacgacagccgatggcgagtcgcacctaggacgacgcattctgttggcgacgggggtgaccgaccagcttccagccatcgacggactcgcgcaacgctgggggaagacggtttttcattgcccgtactgccatggctatgaacttggacagggacgcatcggcatcgtcggtgccagcccgctgtccatccatcaggctgagctgctgacggattggggggatgtcaccttgctcgtcaacggtgcattggaactcaatgaggaaatcaggtccactttggaacgccgaggcgtagtcatcgacgaggcccgcatcgacaggatcgaggggcatgccgacgtggcgatggtggatggaaggcgactgagctttgcgggcctgtttgttgcaacgcgaaccgctccctccagccctttggccgagacaatcggttgttcactggaagaaacgcccatgggaatccagatccgcacggatgccgagagcaagacctcggtgcctggggtctttgcctgcggcgacgtggcacggtttcctcattcggtgtcgctggccgtgggcaacggtgccatgaccggcgcccagattcaccgatcactgctttggcccgagacgatcgagccagcgcaagcggaaggccgcgctcgatga

SEQ ID NO: 300252 - DNA, 555 bp, Proteus mirabilis
atggcggaacatcgccggcgccatccggaccaccccattcgccttcacgaagagcgcctggaggatcagcatcgaggactgctcgcgggggctttcgaggcgggcctctgccagtcgcccgcagcccctgaaggaatcgatgtccgtcccgtctggcgcgacgcgatggcattggccgtgtcggcccatcaccccttgctggcctttgcgtcagtgtccctggagcaggcggccgactacccttggatcgccctggatggccgcgactgtgtgggctactgcgggcagatcgacacgctgctgacggcggccggcgccttcccctcggacgtcaccacggccacatcgttcgggttgatgatgaccctggtgtccgccggctacggcgtctgcctggcacccgccgcccgcatcgagggccatcgttcccttggcgttgtccagcgtcctttgcaagagggcgcgctgacactcaccacgtacttcctgagccgtcgaaatgcggacagcacccgcctggagcggttctttcaatcgctccgggcaagcgcctga

SEQ ID NO: 300253 - DNA, 186 bp, Proteus mirabilis
atggaaagagtcccattaactaaatttgctaccgagctaggacaacacaaaacggctgaattgttaggtgttaggcaaagtgcgataagtaaagcaattttaaaaaaacgaaatattttcgttatcagaaaacaagatggaacagttgaagctgaagaagttaaaccgttcccatcaggtaaataa

SEQ ID NO: 300254 - DNA, 711 bp, Proteus mirabilis
atgaaaaagaaaccgatcacagaagaacaaaaagctgacgctcttcgcctaaaaaatatatttgaggcaaaaaagaaagagcttggcttatcacaagaaaccttaggcgattcaatcggcatggggcagagcgctgttgctcagttattgaatggagtaaacgctctaaacatagagaacgccgcaaagttagcagaagcattacaggttacagtcgatgaatttagtccgtctctagctaaagaaattagaggtatgtttaaagctatcagtccattaaaaacaccaagcatggatgaaaaataccaataccctctattcacgaaggtacaggctggagctttctcaacagaatttaactcatacactcagaaagatgcggtgtcgtggataccgacagctaagaaagccggtgagcgtgctttttggttagaggttgaaggccaatcaatgacagcaccaccaggaggtaaaccaagttttcctgaaggaatgcttatcttggttgatcctgatgaagaagtggaattcggagatttctgtgtcgctcgtttgctaaatgatgaattcacattcaaacgattgattagagaaggtggaatatcatatttagagccgttaaacccacgctatgacctgatccctattaacggtaactgcacaatcataggcaaggtaatcaagtcacaatggcctgacgacacgttttag

SEQ ID NO: 300255 - DNA, 2256 bp, Proteus mirabilis
atgtccttaattgagcaggatactaggtttataatcaataacaacttagtaaataaagggtggatacttgatatatcaaatccatctaaaaatgttttttttgaatctgatattttgcgaatttttgaaaatactaaattaaaaaatagcaaaaaacgtcctgattatgttttgtttgataatgaaaaaaatgcaccaataggtgttattgaagcaaaatctggcggaaaaaatttagattctgcgctagaccaagctatggagtatgcagatatgctgaatgctccactggtctttgccatgaacaacggattctgtcaaacaaaacatctacacacagggaaaccactattcattgatgaaaatgaagttacagagattatatctataaaaaatgcgaaagaatttatttctcaaaatactgactctatatatataactcctaaggaagttttattatcgcgaaatgaattaatcaatatattcaagttactaaacaatacattacgtggtgaagggctgcgggctggaatagaaagactatcagaatttgcaaatattctttttttaaagttatatacagagaataaagatcctactttatggagctctataaaaaatactcatggaaacttacttatcccaacaatagattcaattttaagtaaaattgagcaaaagtatgatgcttctgtattcactaaattacaaacaaaatcaacaaaaactatagctgatgtaataaacaaactagacaaacttaaactatcatctatagatacggatataaaaggtgatgcttttgaatattttttgcaacaggcaacagcaactaataatgatttaggtgaatactttacacctagacacataactagaactattgtacatatggtcaacccgaggttcaatgaaaccatatatgatccgttttgtggcacaggtggttttttaactgaagcatttgaacatattagaaagaatacactaataaaaactaatgaagatcaaataaaattgagtcatcaaactgtttttggaagagagatcacatcaaatgcaaaattagccaaaatgaacatgatattgcacggagatgggcataatggaattgaaaaaatagattcgctatcatcacctgtatctaataaatatgatatagtcgtcaccaatatgccattttctcaaaaaacaaattactcatatctctatgaaaatggtttagcaaagaataatggtgatggtgtttgtgttttacattgctttaacgccgtcaaaaaaggagggaaagtagccttggttgtacctgaaggttttttatacagagacgacctcatggcggtgagaaaatatatattagataacgctaagttatcagcagtggtgtctctcccgaaagaggtgttccttccttatgcaaaggtaaaaactaacattctttatcttactaattgtaaagaacacagtaagtataattatgaaatagcatattatgaagttcataatgatggatattctttggataatgttagaaaaaaaatagctgaaaacgaccttaaatatctagagtttgtagatctaaatgcaaaatctatcgataaattattcatgaaaacactaggttttgattttgtagattctcgtgtgataaaaaataatgactataaatttaactatgcaaattatgcaactgctggaataacatctaaatttgatacaatcatgctaaaagaaatacttgaaatatcaggtaaggaaaaagtaaaaaacactaccccacccgttatgagtattactatggagcatggtctaataaatcaatcagaaaaattcaagaagcgagtagctagtcaagatataagtaaatataaaaaagtattcagaaatgaattagttgttggatttcccattgatgagggtgtactagggtttcaaaaaatttacgatgttgcagccgtaagtcctgcatataaaatatggaaaattaaagagaatgttgatgtaaacattgaatatcttgactatctgttgcgtagcgattctatgagaaaaatatacaaagctaaaatgcagggtagcgtagaaagaagaagagtgataccagatgatgtttttttaaacatatctattcctatccccccagaaaaaatacaaaagcaattagtttgtaaattcaaaaaagctgaagagatagaaaaatcattacaaaaagctatatttaatgcaaaagcatcgataaacaatctatgggattaa

SEQ ID NO: 300256 - DNA, 612 bp, Proteus mirabilis; identical to SEQ ID NO: 14549

SEQ ID NO: 300257 - DNA, 423 bp, Proteus mirabilis; identical to SEQ ID NO: 103759

SEQ ID NO: 300258 - DNA, 444 bp, Proteus mirabilis
gtggatccgtggggttggagttgtggtcctaaattaaaaactgaagcagattataaaaaggctattcaaaatttagaatcgcagcatggtgctttaaatgctcatggattaagaagacatggagcagggacaatcttagagcaacaacaatatagagccagaacaggtaactcacctgataatcattatacaatagttcttgatagaaaaacgttaggaagaagcgcaccttcatccacaagatttctgagttataaagatcaatatgacgctatttcgcaagtacttaaatatgctggctcgaataaagcaattgatatagatatgggacgtatagttgcaaaaggatatcaaagtggtggaagaatatatggttcaacatcaaaaataagagcttattttgatgcaaatggaaaattaattacaatatttggaatcttataa

SEQ ID NO: 300259 - DNA, 747 bp, Proteus mirabilis
atggatattcctcgtattttcactattagcgaaagtgagcatcgtattcataaccctttcacaccagagaaatatgccaccttaggtcgagtattacgaatgaaagaaaactggcaaattcttgatctcggaagtggctctggtgaaatgctatgtacttgggctcacgattacaatattacaggtattggcatcgatataagcccgttgtttactctacaagcaaaatctagagcagaagagttaggcgtcagccatcgagtacattttatccatcatgatgcctcagattatattagtgataaaaaatgtgatatagcagcatgtataggagcaacttggattgctggtggtgtaattgaaactatcgagctactagcaaaaagtattaaaacaggtgggcttattcttatcggagaaccatattggcggcaaattccaacaacacaagagatagcacaagcttgtggtgcttcatccatatcagattttttaactttatctgagcttgttatctctttcgacaatcaaggatacgatctagtcgaaatggtactggcagatcaagagggttgggatagatatgaagctgctaaatggatgactatgcgccgttggcttgacaaaaatagtgccgatgattttgctcaagaaattcgaacagaattgactatagcccctaaacgtcatgttagttttacacgagaatacttaggctggggggtatttgcattaattgctcgataa

SEQ ID NO: 300260 - DNA, 390 bp, Proteus mirabilis
atggcaaagatttatcattttccacaaggaaaagaaaaaaataaaattaaaaagcaaattaaaaaaattaaaggtgcttctgttgtaaagaggcgaaaagaaacagcactaagtgcgctgaaaaaaatttttttctttattcgtgtatttattggtgtgtcttgtgatgtgattttttctatgattgttggtttatgtagaggtgttatttatctgaccgttattttggggggatttttcctgattatcaaatacaacactaacggtggtgtgtgggacgggagtatgtggtttgttatccttatgctcgtattagggtctttgggggatgtgagtgagtggtgtttattccagagattgatgggaacatattcatttaaaaatagataa

SEQ ID NO: 300261 - DNA, 855 bp, Proteus mirabilis
atgaataaaaaatcactatctcggttaactaaagtcagacatagaaatgatttgaatttaactctttctgcattgccaatagttgcaaaaaaagttttatttttagccatgagtcaaataaattcaaaaaacgaatttgatgatgatcacatattttatgtaagtgctagtgattatgttcaatgggctaatgttaaagcaaatgcagcatacgcagctttaaaagagggggctgctattttggatagtgtattattaaagctaaataatgaggatattttaaatcttaaaaatgagttaaagctaccttttacaaaaaaaaatattccagattcaatgaacctgagtttgacagagttttctgtttattataacgatgaggggcgaattggaattaaatttacaaattcagcaaaaagatttttatgtaatttggtaggtgtggaaaaaaaatatactacacaagttttattgtctgttgtaagtttatctagcgttaatgctgcatctttatatcagttaattagaaaacattatagtgctaattctaggttaggtttttttgatatttcaattgatgaattaaaagatgaattaaatctttattcaattgatgaagatggtaataaagaatataaataccctgattttcctattttcaaaagagatgttttaaataaatcagttaaggaaataattaaattaacagaagttaaaaacttaaagtttgaggtttcgggaaaactcggaagaaaagttgaccgtttgaaatttagttattctttagattcagttaatttaactgatgatgaacgtgagtttttagatatgtttgataaaaacttttcatcttag

SEQ ID NO: 300262 - DNA, 525 bp, Proteus mirabilis
atgaatattcagcaagccttaaacgttttcggtttatctggcgaactcaccgagcaagacatcaaaacagcttacaaaaaagcgtccttaaaattccatcctgaccgtaatcagggcaaccccgtagccgctgaaatgatgaaagctgtcaattgtgcctatgattttcttatgcaaaatatggacaaaattaatgcgtttcagagtgaagaagcaacagcgcattacaactacggggaagaactcgaaaacgccttaaatgcattacatgcgctttctggtgtgatttttgaagttaccggcaactggatttggatcagcggtgacaccaaaccacacaaagaagctctgaaagcaatgggctgtaaatgggcgaaccaaaagaaaatgtggtttttccgtcccgaagaatacaaggcgcacggcaaccgcaaatcgcacagcatggacgaaatccgcgccatgtatggcacgacaggcgcatacaaagccaaaggaagcagacagatcgaaagccgcgcttaa

SEQ ID NO: 300263 - DNA, 207 bp, Proteus mirabilis; identical to SEQ ID NO: 286930

SEQ ID NO: 300264 - DNA, 360 bp, Proteus mirabilis
atgttgttattattggtgatattacaaatgagcgataattatggcatggtaatcaaatctaaaaaatatggaattaatttattaaatacatccgatagggttggacgaattgttggttggcatgatattactccaataccacttatgactaaaaaaacttttagttatgaccattctgatctaaataaatatggagaagtatttgcttggtttggaacttcttttatgagggggttagctggagatgttattttaaatattaataacggggtaattattcttgaactcgataatgtttatagaaatggcttaatcgatatatatgatgacatcattaggttatattatggagtatattga

SEQ ID NO: 300265 - DNA, 141 bp, Proteus mirabilis
gtggcaagaacgttagagcagattctagagcaggagaaaccagatgttgttcagcaagctaatgaaaaagcaaaggaaattataaaagatattgatgagaaggctgaggcgtcagccgctggcgataaattagacggctga

SEQ ID NO: 300266 - DNA, 411 bp, Proteus mirabilis
atgacatatcacttacaccttaactttgaaaatagagagtactttttatcagatggagcttggtcaactgaagagaccattcaaggccttcttcttcctatcgcagcgcatcgtgctgctgatgaaaaggacgcatggagcgcgattgatgaacttaaatctttgataaatgaggttcttgataaggttgagattgagtggaacgactggatgactcaaaagccaacgatcatctacaaggaagatgttaagttgttgataagcaggctcaaagaggaattttatgttaactcatttttctcttgcttaaacaatggaaaatttagtgaacaacataaggaaatggctactgatgagttttacaggaatttacctcatctagaagatgaaggttggttcaacttcagttga

SEQ ID NO: 300267 - DNA, 270 bp, Proteus mirabilis
atgctgggacaaactaaaacagaaatccatcaattcgacgtgtgtggccgcgtgtattaccgtggggttaactacaccgaaaaagaaggtgaattagctgttgaaacggtggaggccttatcccatgacgaggcggaaaccgtgtttcgaaacaatctggttgaacacgctcgcaagttcaacttgaccgtggatcgcatcgaaatcactttcactatcgatttgacgattgctgaaagtgatagcgatgaacctttcttggtccattaa

SEQ ID NO: 300268 - DNA, 420 bp, Proteus mirabilis
atgaaacatgtggccaatgttcttctgctgggagtggtacttctcgggatagctatgatgactgatacgccttgggggcttggtgttgcgttagctccctttgtcgtttggggcggaagattcctgttactggttcatcggagtatctgggcatcaatagtgttctgggcgggtgtggcctatttcagttggcaagccgctcttgttgtcctgcttagttttctcgcggtgcaaatggttaaagttgtacgccaagagggtgtacgaggacggaaacatcgtcggaaaaaagatgatctccacctttatcttgactctcgttcgacaggtggtttaggtattggaccgatgggggatggaggattccaggactcctatgactatgaccggaggtgtcacatcggcacgagtgacgattaa

SEQ ID NO: 300269 - DNA, 327 bp, Proteus mirabilis; identical to SEQ ID NO: 14564

SEQ ID NO: 300270 - DNA, 948 bp, Proteus mirabilis
atgccggctcttaaacactggatatatgcggatgatgggatacccgcctggcagacggcgatagcacaaagtctgcatttgttgctggccggctgcgcggggatactgaaaccggtcagaccgctgtcttttccgccgttaccggaactgacttcatacggtgcaaccgggcctgtttccccgggaaacacggctttcacgcactgggttgacctgctgatgactgcaccggatttgacaccgtcatgttgtcagcaaatccatcagtggtatcagatgtggttatctgaaggcggggcgtaccattcctgggactcgctgacggcgacgcagaaagcgagactgtccccgttgttatcgggaagcagttttgactggcttaaccggtttaccggagaggatgagagccgggtggcgacagcctgggaggatattcagtaccttcgcagtaccggagaagccataccgatggatatgcggactctgttaccgaccagccttgcggctgaattacacggttttaacggctgtttatggaaaacaccggaggtcatctggcggcaggcgcgctggcaggcgtttgcccccggtaacagtacatatcacctttatcagtgccgttatggtgtgaaatggccgaacggcagtggttttcactgtattgatggcgggtatgcgacggagttatccgcagagtttgatactccgtgggggccgccgtcagcagcggttttgtgtgctctgtctgcgcgtttccgctgtcaggtccgtcatgtctatgccgaagaaggctgtggtttctgcggatacagcgagtatgaccatggccggttaaccgaccatgaatctgatgagattgagttcagtgatgaagagaatgaggacggtttccaggatgtgacgggaccggactatattcttgattcattgccacattacggagggtga

SEQ ID NO: 300271 - DNA, 327 bp, Proteus mirabilis; identical to SEQ ID NO: 103752

SEQ ID NO: 300272 - DNA, 156 bp, Proteus mirabilis
atggagatggagagtaagcatgaccgaatgagtttttattcaacctataacagcaaagccgagaaaaaacacaggcgagatgttgaagtaaagcgcctgatagctcttggtcacacaaagaagtttgcccgccaacaagttaagcgcatcaaatag

SEQ ID NO: 300273 - DNA, 216 bp, Proteus mirabilis
atgagcattaaagtaatttctgatgacaaccctgttaaacgagttgcttttgatatggcgctagctttagccgctaaacaggattctattaaaactcctgagcaacttatggctgaaattgaatcgctttaccctgagtgtttagaggttgctgagaagcaatacaaaaaagagactccacctccgatgggggttttgctaaaaagtacaatctaa

SEQ ID NO: 300274 - DNA, 216 bp, Proteus mirabilis
atgattaacttaaaaatgtatgaatatctaagaaacgatggaacaagaattttctttaagacagaaagtatttcttcaataaaggaagagacctggtcagatgggaaaccaatcactaaattaactctaaattgcggaacaaccattatggaattagttccgctagaagagtttttaaaaatgcatcacataaagatagagaaattaaagtcttag

SEQ ID NO: 300275 - DNA, 228 bp, Proteus mirabilis
atgcctgaaagccacttgtgtgaatatgaagccttttatcgcaaacaaccctttggtttatggcgagaggattatcggatggcacaagtggtgcatcttcttgcgatgataaatcgtgatccgaaaacgtctccaccggaattgatggattttatgccgatgtggcaaaagaaagccgcagaagaaacgtgggatgcggtcacagatcaagtcttagcatatcgatag

SEQ ID NO: 300276 - DNA, 711 bp, Proteus mirabilis; identical to SEQ ID NO: 296484

SEQ ID NO: 300277 - DNA, 594 bp, Proteus mirabilis
atggctgagaaaacagaaaagccaacacagaaaaagcttgatgattcagcaaaaaaaggacaatcgtttaaaagtaaggaactggtttctggtttagtctatttcattggtgttatatatttatttaatcaagtgaagttggatgaatttaatcaattttatcaatcacttttactgcatccaacaggtatttctttaaagagttatgttgaagttatatcaaaattattctttgatattgtactaccgatcattattgtgacttttttatctggcgcaatcccttctctatttagctcccattttaaacttgccactgaagcaattaaaattgattttaatcatattaaccccatttctggatttccctccatatttttatgttcttgcttaacttcatgtttttccatcatcatatcttttatgaataaaaagaaatcagcaataatatttaaaataagaataggtatcgataaaataaaaaatataaatataaaactaacaaccaatgagcaccatttatcaatcaccccctctaaatcagcgcgatatagtataacgacttcccccatatgtaaaatcatgaaaacataa

SEQ ID NO: 300278 - DNA, 411 bp, Proteus mirabilis
atgttgaataataacaattttacaataatgtctgttgaccaatttcccattattaccatgcaggttttcccagaaacgttagagcatgctaataactggattgctgaaatggacttagtgcttgctcaaaaacaaaactttgtattggtttacccacctatcaacaagaaaaatgaacaagaggatatggagggcatgaaagccgttagacgctggctgaaaacagggaaaatgccattaagtcaatattgtgctggaatgatcatgaccgtcaatcaacaaacaaatgataaagagcaactgatgcagttatctcccgttgtttctgcggtgtacggtgtacctatctttgttgaagaaacccttgatggggcttatgctcaagctaataaactgctgggcaataaataa

SEQ ID NO: 300279 - DNA, 585 bp, Proteus mirabilis
atggatcgtctctggctaaaaagaagaatttatattctcagtggtttaactatccttcttttcttattacaaattatagggagcctcttcccagtccatcttcttcaatatggtattattccaagaagcagcgaaggtttattcggtatctttatttcaccttttattcatggctcatggtctcacctttttagtaatttattaccttttcttatacttagctttttattgatgacacagtcattacgagaatattgctattcaagtatttttatcattatcatcagtgggttattagtttggttgtttgggcgtaacgctattcatgtcggtgcaagtgggtggatctttggattatggtcactgctaattgcccatgcttttactcgccataaaattatcgatatcctcatcgccttatttgtgctgttttattacggctctatggcttatggattaatccccgggcaattaggggtttctacagaatcacatatcgcgggcgttatctctgggttgctttatgcttggtgtgcaagaaaaatcattcgtcggaaaagccgtgtagtagaaataataaaatga

SEQ ID NO: 300280 - DNA, 393 bp, Proteus mirabilis
atgtatacctacgaaacaaagcttgctttggccaagcagtttcatgccgcactgacccgccgcgactggcaggcgatccgtaagcttcttaccgacgatgccacctgggttctgcccggagacaatcagatctctggtccagcggtcggtgcggaagcagtcgttgccagagctgagctaattgccagcttcggcctgaatttcgagctcaagcacattctggtaagccgggataatgtcgcgctctcgctgcataacactgcacgccggaatgacctcgtactggacgagcatctggctacggtctgcaccttgcgcgatggcaagatcgctgctatcgagacctacctgtccgacctgccgggcatgaatgccttttttgccagggactga

SEQ ID NO: 300281 - DNA, 885 bp, Proteus mirabilis
atgggtctactggtgtcgttggatgttctgcttgaagaggccaacgtcactcgtgcagcacgacgcttagccatcagccagcctgcactctcagcccaactggcccgcttgcggcaggtgcttgatgatcctttgctggtgccggccgagcgcggccgaggtatgcgtttgacgccacgtgcagcgcagctgaaatcacccctgcatgagttgctgacacggcttgaggatcttgtcgaggcgccctacgctttcgatcccagcacggccaagcgcgatttcacgatcgccctcaatgacaatgccgcgatgacgattggactggatctcatcgagtgcattcggaagcagtcctatgcaggcattagattggccatgctccagataccccgggatgaggtcctggatcttgcagctcgcggccgcatcgacctggtgatcggcacccgagccttcatgccccctggtttgcgcacccatgatctggtcgacgacaggtttcaggtggcccaacgcaaagggcatcctcgcggcacggctgcaatgacgctggagcaatactgcgcttatgagcatgtgctggtgtctaccaatggcagttatcacagtgggatcgatgattttcttgcagagctggggcattatcgacacaccacggtatccgtgcagtactacacagcggtgccaccgatacttgagcgcacgaactgcctggcgacgttgcctgagcgcttcctacaccgctttgatcacatgatcgaccgcttcgacctcccattcgcattcgatccgttccagctgcaggtcggttggcatccgcgctttgacgaagatttaggacatcagtggctgcgtgaacagctgattgcggtgaggcccttctaa

SEQ ID NO: 300282 - DNA, 582 bp, Proteus mirabilis
atggaactgcaggcgcgcggcatcaaggtcaacaccggcaccatcgtggacgccaccatcatcggcgcgcccagctccaccaagaacgccgacaaggccagagaccccgagatgcaccagacccgcaaggggcagcagtggtatttcggtatgaagctgcacatcggtgtggacagtcagacggggctgagccacagcgcggtggtcaccgcagccaacgttcacgacaaacacccactgcctgatttactgcacagcaacgagcagcgcgtttatggcgactcggcctatgccagccagaaggcgctgatatcaagcaaagcgcccagagccaaagacttcaccaaccagcgcacgcgctgcgctggagaggtggacgaagtgcagcgggccaagaaccgcaacaagtcgcgtgtgcgtgctcgagtcgaacacgtctttgccgtggtcaagcggctgtggggatttaccaaggtgcgataccgaggcctgcagaagaacgccacgcgttcgttcaccgcattggcactggcaaacatctacctgtgccggggacatctgcgtggacaggtgcgcccgtaa

SEQ ID NO: 300283 - DNA, 306 bp, Proteus mirabilis
atgggtacgctagatttcatcatcgggcataaaataaaacaaaaaaggacggagctaaaattaacaggtaaacaaatgagcaacaagctcggaataagccaacaacattactctcggttagaaaatggaggtgcgaaaattaccgttgaacatttattctctatcgcgtttgttttaggggttaaacctcaagaactattacctaattataatttttcaaatgaaaaagagataattaaagcaaaacaatcattatcagcagaaatcattatgccaataaagaaaaacgacatgtatcctacataa

SEQ ID NO: 300284 - DNA, 261 bp, Proteus mirabilis
atgcttaaagaaatagattcttttgataagaaaaatattctcgaatctacccgcataacattagatagcatggttaaagatggcttattagagaagatatccagctatgaaaggcgacaaaacaaacaccatgactcaagttcatcaccgggtgttcgctgtgtcgttagtcggtatggattacaaggaaagtgtcgtcttgtgaaatgcgaaaatgacggagatgtctttattgaaggtaagtacatcagaattgattaa

SEQ ID NO: 300285 - DNA, 231 bp, Proteus mirabilis
atgaacctcgcaaacctaactcaagaagaaaaagacaagattaatgtcgatttgaccgcaagtggtgtcgcatataaagaacgactcaatatgccagttgtcgcctcagaagttgaacgacaacaaccagcacatttgagagcatactttaatgaacgattagcgttttatcgtgagataagtaagcagttgccggatgggaattcggtgcagtatttgaaaatagagtag

SEQ ID NO: 300286 - DNA, 339 bp, Proteus mirabilis
atgacgactatcgaaaaaattgaacgccaaatcaaagaaaatcccatcctgctatacatgaaaggatcaccaaaattaccaagctgtggattttctgcacaagccgttcaagcgatttctgcttgtggtgagcgttttgcttatgtcgatattttgcaaaaccctgatattcgtgcagagctaccaaaatatgctcattggccaactttcccacagttatgggtggatggcgaattagtcggtggttgtgacattatcttagaaatgtatcagcgcggtgaattgcagaagttattaaaagagactgcagataaataccgtggtgaagaagaagcataa

SEQ ID NO: 300287 - DNA, 645 bp, Proteus mirabilis; identical to SEQ ID NO: 297688

SEQ ID NO: 300288 - DNA, 489 bp, Proteus mirabilis
atgagttacaaaaagattgcccccgttgatgctaagtttttggaaagtacgggattaaaatcaacaaaaattctccactggcaaaattatttacaacacatagacttttcccgttatgatacggtttatattgttttgggaacaaatgattttattcaaaaatcagaagttcctgattatcagaataaagcttctgcatttatccgtgctatcaaaaaagaaaatagtaatattatttggatgctcccgcccactctgaaaaatatacaaaaaaataaattattatcaaatacacgtgaagctatcaggcaagcagcaagacaaaataagataaaaacaatagatacccgtttatcactcgggtatcaatatacagagtttattaatgggatgaaagtaagaaccagtgatggtattcatataacagaaaatggggctgataatgtaataaggggtttaattaatgtcgataaagaaaataacagatag

SEQ ID NO: 300289 - DNA, 789 bp, Proteus mirabilis
atgaaggtcgaatcgaacagcatagagatccatgtcgaggagcaagggcaaggcgatccgtcactcgtttttctgcattactggggcggctcctcccgcacttggaagcacgtctgctccaggctggcgccgaacttccatacgcttgctctcgatcatcgcggctggggtcaatccgacgcgccttcgatgggctacgggctggcagaccttgcagccgatgcagagggcgtgattgcagcgctgcacccgaagcgctacgttctgatcggtcactcgatggggggcaaggtcgctcagcttatggcttcgcggcggcctgccggactggccgggttggttctcgtcgctccttcaccgccatcgccaatgatcttgccgaaagaggcacgcgaaatgatggcaggagcctacgcaaaccgtgaaacagtggaggcgactatcgataacgtgctgacggccctcccgctgtcagcggaggatcgcgaacaagtgatcgcggacagcttgcgtggcgcgccagcggctaagctagcttggcccagagcgaccagcttggaagacatcactgggcaggtaggtgccatagacgtacctacgcttgttattgcgggtgagctggatcgcgtggattcgcccgaggtactgaggaaagaattacttcctcgcatatcacaagccgtcatgaccgtagtaccaggtacagggcatttgtccatgttggaaacaccggatgcattgacaccattgattgagcatttctgccgttcgttgcctgagagggggtga

SEQ ID NO: 300290 - DNA, 702 bp, Proteus mirabilis
atgattaaaaaatatattgtttatataatatcatttgtctttacattctcatgttatgcttctattcaaattaataaggatagatttttttataaagaacaagataaggaaattctatttgacataagaaataaaagcgaacaaaaagcctatattattcaaagttgggtatcacactataacaaagaagataatagtgaggcaccatttatcatttctcctagtttaataagattagcaccaaatgataattttacattaaaaattatcaaaacggatgatataaaagaaatcaaccaagaatctgtatatagagtaaatataaaattagttccggttatagatgatgaaatgactgataaaaacctgctgcttatctctttaaactcaatatataatcttttctatacacctagcaatattattaacaaaagtgataataaagatattaatttttttattaatgatgaagattttattaaaataaacaaccctactccttattttataaccatagcagaggcaaaaatagatagcattgatatgttagataaacaagtaaccatacaaccatttaaacattattatattaaatataaaaagacaactaaaaatattaaaaataaaaaagtacattggaagataatcgatgaatttgacaagattatcacagcaacaccgaaggaacttgtgtatgagtaa

SEQ ID NO: 300291 - DNA, 546 bp, Proteus mirabilis
atgaaaaaatcattattttcactattaattctatctacacttgctttatcaacacaagctattgcacaacagattcaccttggtggttataatatagatatccaaggcagagtaattgacgagaaactaacttgtgtcgttcaagatattgctccaattcaattggatgatgcttacgttgattctttactacttactcctgaaaaacgatttagtgtggatttttctggctgtactaatcaagcaagagatagaaaagtcaaagtagtttttggacaaaaaaacactactcatttaatgaatactggttcgacagaaaatgataccaatgctcgagtagcattattgcgttctacaggtgaacttgttccacttaatggtgagaattcagaacgtacattttcttcggaggttgccggtgaacgtggtagcttagaatttttattaaaatatgatagaccagcatcgattgatgatgctgttaccgcaggtgctttcaaggctaccttatctcttgatgcttacgtcactgatgatatccaataa

SEQ ID NO: 300292 - DNA, 384 bp, Proteus mirabilis
atgtctattgaaaattttagtgccggtgttcaatatgatgattataaaggttcaactgctgctgataatcaagatattaataatgtttataaatatttagaaggaaagcaactaaaaattaaagataaagttatcgttggaatttctttggatgcttctcatctatctttggatcctgatcatgagttatctgttagatttttcttatccgatttacaaggtgaaagtgatgttccaacactaataaaatcaaaaaatccattgagtgtaaaagaaataaagattgatatgtcatataaggaattttttcaattatttaaacgatttaatttaaccttatctactaagggattattagaaaataaagatattgatattatttaa

SEQ ID NO: 300293 - DNA, 1695 bp, Proteus mirabilis
atgggtgctcaacaagataatgccacaggaaaaaccttcactggtgcgcaattaattgtttatttactggaacggcaaggtatcactacggttgcggggatccccggcggagccgctcttcctttgtatgatgcattaagccaaagtcagtctattcgccatattttggcacgtcatgaacaaggggcgggttttattgcccaaggtatggctagagcaaatggtcagcctgcggtgtgtattgcctcaagtggaccgggggcgacaaacttagttacagccattgctgatgcaaaattagactcaattcctttggtttgcattacggggcaagtctcttcagccatgattgggactgatgcgtttcaagaagttgatacctatgggatgtctattcctattaccaaacacaactatttagtccgcgatatcgcacagttgccggaaattatctgtgatgcgtttcgtttggcaatgtcaggtcgccctggacctgtatgggttgatgtacctaaagatattcaacaagcgactatcaccttagatcaattgccaccgataccacaaaaagatgcagctccagcctttaataccgatttggtgatccaagccgcgcaaatgattaaccaagcgaaaaatcctgtgctttatttagggggcggtattattagctctgaagcgtgtaaagaagcgattgagttggcggagaaaaatagcctacccaccacgatgacgttaatgggattaggtttaatgccaccaacacacccgctatatttagggatgttaggtatgcatgcggcacggagtaccaactttattttagaagaagccgatctgctgatcgtattgggggcgcgatttgatgatagggcaattggtaaagcagaaaaattttgccccaatgcgaagatcatccatgttgatattgatagggcagagataagcaagatcaaacgtcctgatattgccattcatgcagatgctaaagcggtactgtcgctgttattacctttaattaatatcaatcagcgcaacgaatggatagatagagtcaataccttaaaacaagaatatcccttagaaatgaaaaactcacacaatattcttagcggttacggcatcgtacttgccgcggcaaattgtgttgatgatgaagcgattattaccaccgatgtagggcagcaccagatgtgggttgctcaagcttatccactgaatcgaccgcgccaatggttaacatcaggaggcttggggacgatgggatttgggttgccggcagcgataggggccgcattggcagagccaaataaaaagatcctctgtttttcaggggatggtagcatcatgatgaatattcaggagttagcaacagccgctgagcatcagttagatgtaaagattattttgataaataatcaagcattagggttagtacaccaacaacaaacactcttttttgatgagcgtatttatgccgcagcctacccttatcaaacggattttattcgtattgctcaaggatttgggttggatacttgtgatttaaatcaagaagcagatcctcaggcggcgctacaagcggcaattgctaaacctgggccttgtttaattcatgccatgattgatattaacgaaaaagtatttccaatggttccgccgggggcggcaaatatcgagatgataggagcttaa

SEQ ID NO: 300294 - DNA, 1353 bp, Proteus mirabilis
atgagcaaacattacgattatatcgccatcggtggcggtagtggtggcatcgcatcaatcaatagagcggctatgtatggccaaaaatgtgcattaattgaagcgaaagcgctaggtggcacttgcgttaatgtcggttgtgtcccgaaaaaagtgatgtggcatgctgcgcaaattgccgaagcaattcatcaatacggtcctgattatggttttgatactacagtaaaccgttttgattgggatacattaatcagtagccgtactgcttatattgatcgtatccaccaatcttatgaacgtgtattaggtaataataaagttgatgttatccaaggctttgcccgttttgttgatgcgcatactattgaagtaaacggtgaaaaaattaccgcagataatatacttatcgccacgggaggccgtcctattcagccaaacattccaggggctgaatatggtattaactctgatggtttcttcgaacttagcgcattaccaaaacgagttgctgttgtgggtgctggctatattgctgttgaattagcgggtgtattaaatgcgttagggagtgaaacacacttatttgtgcgtaaacatgcaccattacgtagttttgatccactaatcgtcgatacgctggtggaagtaatggaagcggaagggcctaaattacacacccatgcagttcctaaagctgtggttaaaaatgccgacggtagcttaacgttacaacttgaaaatggcttagagcagacggtagatactttaatttgggcgattggtcgtgaacctgctacagataatatcaatttagcggctacgggtgttaagctaaatgaaaaagggtatattcaggttgataaattccaaaataccaatgtgcccggtatttatgccgtaggtgataacacaggtgcggtagaattaacccctgttgcggtagccgctggacgtcgtttatcagagcgattatttaataataaacctaatgaacatttagattataccaatattccaacagtggtatttagtcacccagctattggtactgtgggtttaacggaacctcaagctattgagcaatatggcgctgagcaagtgaaagtctataaatcttcttttactgccatgtatagtgcagtgacacgccatcgtcagccttgtcggatgaaattagtctgtgtgggtgctgaagaaaaaattgtcggaatccacggtattggttttggcatggatgaaatgttgcaaggttttgcagtggcattaaaaatgggtgccacgaagaaagattttgatgatactgttgctatccacccaacggcggcggaagaatttgtgacaatgcgttaa

SEQ ID NO: 300295 - DNA, 1455 bp, Proteus mirabilis
gtgacaacaatcgacttcaagcaaattcgcagtaccccgaaaagccgtaatgatagttttgaggctctctcggttcagctttttcgaagtatttgtacagcacctaaaggctcaacttttgtgagtttgaggggtgatggcggcgatggtggtgtcgaggcctatttccgcacgccagagggttccgttctaggtattcaggccaaatatttctttaagcttgatttggcagagcttgggcagattgatggctcactgcaaactgcgctcatgaatcacccgaatctgtccgaatactgggtgtatattcccttcgatctcaccggacgggtagccgctggaaagcgaggcaaaagccaagccgagcgattcgaagagtggaaatgcaaggtggaggctgaagcaagtgcccgaggctctatgctcaggatcattccatgtactgcggcggttattcagagccaattgttaaaactagatcaaaacggcgggatgcgcaggtactggtttgatgagtcggtgctgacaaacgcgcaaattcaacattgtttagaggaggcaacggcgtttgcgggcccaaggtacactgccgctcttgacgttgtcacaagtgcgcatattgggctcgatttctttggcgggatcggtgactttcaggcttggcgcgacgaatcactagcgccaaccatcgctgaaattcgatcgctcaagggctggggagacaaggcgctaattatcttgggcgacgctgataccgcaacagctcgcaagttgattgaccaggttattgcagagtgcgatggcatgaaggatgccttgttgagcgcttcggggttcagtgatgtctgccgtaacttggcaagcctattaccatttcccaccaaggtgcgagaggctcaggaacaggccttctatgagaaatacggacgagataaagacactcctggattccgtcaattccatgctgaatacatgtgtgccttccctgccggggaaatggatgctgcacgcaagtgggaagaacaaacgctaaagctacaagctgtgctcacttctcaggaagttggtgccgcaacaacacactctctgctattggttggtcccgccgggattggcaagacccatgcgattgtaagtgctgcgcttcggcgactggcgtatggtggacactcattggttgtctttggtgacgactttggcaagacagagccatgggaggtaatacgcagcaaactaggctttggagcagatattgcgcgcgcgaccttgcatcctgcgcacgcgttcgggtcacacagcaccagtggatgggaaagcagctccatcagggaaagctcgggatggatcaaggcgggatgccgcgccggcaccgcgacgaccagaggctcgctccacgccggcgtggccagcaatccttcccccggatgctccgccttcgcgaaccccgcgtcgtag

SEQ ID NO: 300296 - DNA, 828 bp, Proteus mirabilis; identical to SEQ ID NO: 297319

SEQ ID NO: 300297 - DNA, 375 bp, Proteus mirabilis
atgagccaagaagatcgtaagacaaatgtccctgactttctttctgaattagatgctggcgtttttgaaaataaagtctctgctgttttaaatgatgtggctttaggcgttttaaataatggtggaaaaggcaaagtcactattgaattagattttgctcgccttagtaattcaatggaagaaaaacgagttgaaataactcataagcttaaattctctgcaccaacacctagaggaaaacggactgaggaagataccaccaaaacacctatgtacgtaggtaaaggtggcaagttgaccattatgcaagaagatcaaggtcaattattttctttacaaggtcagcccgatggtaaattaaaagccattaattag

SEQ ID NO: 300298 - DNA, 573 bp, Proteus mirabilis
atgttttcatctgtatttagaaatttttatttaaatattgataaaatactaattttaaatctattaggaaaagaagtagccggatactatgctatttcatttagattttttaatgttcttcttatgatattgaatagtatctcaggtgttaaagaagcaaaattatatcaattatatgaagagtcttttttgaagtttaagagtgaaataaaagctataaataatcttagtttaaaatattttattttttccatacctctatggatagttgttgctataagtatatattatttctaccctttatcatgcctgtatatattcataatgcttatgcttatctgtcctattcaattactatcttttaccatgctaaatgcactaaatagcataggccttgaaaaccaaagactatctttgatgatatttagtgtactaattaattgtataatatctttttctctatcaacatacatatcatggggtgctatagttattggtatactcatatcaaatataattatagttgcatcttctaaatattatatatacacatatgaatataaaaatttttaa

SEQ ID NO: 300299 - DNA, 486 bp, Proteus mirabilis; identical to SEQ ID NO: 298414

SEQ ID NO: 300300 - DNA, 546 bp, Proteus mirabilis
atgaaaaaatcattattttcactattaattctatctacacttgctttatcaacacaagctattgcacaacagattcaccttggtggttataatatagatatccaaggcagagtaattgacgagaaactaacttgtgtcgttcaagatgttgctccaattcaattggatgatgcttacattgattctttactacttactcctgaaaaacgatttagtgtggatttttctggctgtactaatcaagaaagagcaagaaaagtcaaaatagttgttgcacgacaaaacactactcatttaatgaatgctagttcgacagcaaatgataccaatgctcgagtagcattattgggttctacaggtgaacttgttccacttaatggtgagcgagaacaacgtacattttattcggatgttgccggtgatagtggtagattagtattttcattaaaatatgatagacctgaatcgattgatgatgctgttaccgcaggtgctttcaaggctaccttatctcttgatgcttacatcactgataatatccaataa

SEQ ID NO: 300301 - DNA, 576 bp, Proteus mirabilis
atgttatcaactaaaaatgataatggctatcatcgttctcattggaaaggcgattcaattaccgcactctctctagcaaaagatagtaacggtactagtgggtgggtatttattggtgatcattttgattatttattaataagaggtggagataacgcagtaaatattttaagagatccgcttatccaccatgataaattgagcgtagaaaatccagttgaatttattattgataatgaaaagaagcaatttaatgggaaaattaaaataaattataactggataactcaaaccgataaagaagcagcactaacttacggttttatatgtaaaaaagatataaacacctgttcactaaaaatagataatttacttggaacagttcatcaaaaaaataaagaacaaaaaaatgagtatttactaccttttaaccatccctttaatgttgaattctaccaatacaaagaaaatcttattggtgccagcacaccaagaatattattacccgttactttggcgctagatatagtcacatctcctttacaattgctgatgatcccaatactaagcaagtag

SEQ ID NO: 300302 - DNA, 540 bp, Proteus mirabilis
atgggctggaacagtgatctgatgtgcggcaattttgatatcaaaaccacggtgggcaaccagctgaacggggtgacggccggctttaagaatctgatgagtgaggtgatccagaatgccaccggggcggtggccagtctgccggcgatggctatccagcgggcgaatcccggcctgtatgaaatgctgaccaacggggtgttgcaggctaatgtggcgtttgataaggcgcagctgaactgtcagaacatggctaaacggatgatggacttttcagaaaataatcagtggacgcaggcggcgatcctcgaagaagcaaagaatatcatcaataacagtgacggggatgcggtaaaaactgaccagcaaattcagcaaagcagtggcgataaaggggttgtatggataggcgggaaacagcgcggtggggttggtcagcctgcgattcagccggcgcaggattttgcacaggccggctttaatatcatgaacggtctgccggcaaccagtacggccccggtgccggcagaccgttcatga

SEQ ID NO: 300303 - DNA, 459 bp, Proteus mirabilis
atgaacaatccatctcgtcgtttctcctttgactcaaaagccactaaatcgccattacaatcaacccatcctctctgcctatcccattgtagatccaaaactttgactacgtgctggcatgggacgctgagatgttcgctccgttcaggcgtcgtatgggatgtcgtcgaagctcatgctcagatgctcgatgaaacggcgaactttcaacgacacatggcgcttgctcggatagatggcatgaatcgccaaatcctttgttttgtggtcaggcagcaggacacgaagcgcaccgctggcgatggactgctcgaacacaaagctagggccgtagaccacccccgcccctgtcagcgctgccgcgagcagcatctgcatgttgtttgcagcgagccggatctcaccatcaatgtgatatgtctggccgttagcatccgtaacgctccagtctccggctga

SEQ ID NO: 300304 - DNA, 639 bp, Proteus mirabilis
ttgtgcagtggcgccttcatcctggcacgcatgccatctagcagccccatgcgtgccaccacccactggcgtggtgtacaacttctggcagatctcttcccacaggtcacagtcgaccccaatgttcttttcgtggacaacggtcggatactcacctcggcaggcgcgtgcgccggaatggatctgtgcctacacatgattcgacaagactgcggcaatgccgttgcagcagacacagcacgatgtgccgtcatgcctcttgcacgagatggcgggcaggcgcagttcatcgcttacgatcccccagacgcatcttccaatctcagcccattgctgcaatggatcgaagagcggctagatcaagatttaaccctgaaggacatggctgggcgggctgcgatgagtagccgcaccttgaatcgacggtttcaggaacaactgagcactagccctctccagtggcttctaagggcgcgtgtcaggcgtgcgcagactttgctagaaacgacaaacctacccgttgagcacatcgctagtgcagtgggctttggaagccccacctccctgcgggaacatttcggccggatcgtgggagtcagcccaacggcctatcgaaaatcctttaatcctgtgcgctga

SEQ ID NO: 300305 - DNA, 342 bp, Proteus mirabilis; identical to SEQ ID NO: 297214

SEQ ID NO: 300306 - DNA, 666 bp, Proteus mirabilis
atgacaaagccaaagaaccataaagcgacgcctttcctcggcacgaagatctttgtgcaaaccggcttaggagaggcgatgaccgtgacggaagcgacgttatcacccgcaactattactatcgccaataataaactgaaagcggatgacatgattatgttatcgggtttaggggagttagatgggcgtttccccattgcacaggttgatggcaataaagtgaccctgtgcgacgaagtggattggagtgataaaacgctacctacggatttttcaaacgccaaagcacaacgtattcaatggtctaataatttctgtgcggtaaaaagtttcagtaaagacggttcgacaaccgaacaaattgatgtcaccaccatttgcagtgatggcaaggaatatgaatccggtgatacggaatacggctcaattaaattgaccttcttcttacgttatagctccagtgaggtgcagcgactcttgcgtaaatatgaaaacagcaaagaaaaatttgcggtgaaaatggtcttaacacgagatgagggctccatgttttattacggctccgtcgaaacgggcatgaatattgatggcagtgtaggacaaatgatggattcggggatctcgattaaattgtctggccgtgattatttgaatgcgaagaaataa

SEQ ID NO: 300307 - DNA, 423 bp, Proteus mirabilis
atgattgcggcgctctatccctatttggtggcgacgcacgtgacagcggtggtgtttctggtaggcggcttgcttgcgcaagaaaggatagtaaatgccatttcgcagtccccaccggaagaacaagcagggatgctggctgcattgcagcgctttgatctccttgtcacgacacctgcattgttgttgacctggatcttcgggttatcactagcgctcagcgcaggatggctgtcgtcacgatggttgctggtcaagctggctttcgtcgtcgcgctctcggctttgcatgggttccgttccgggcgaatacgtcattgcattcgaactggagcagctataagaagaattcccggtgctgatctcggcatcgtgattgcgatgctaaccatagctgtgttggcatttgtgaagccggtctag

SEQ ID NO: 300308 - DNA, 450 bp, Proteus mirabilis
atgaaggcgccactgcacaacgatgcgatcctcgcaccattcttttccgctgctcggatggcttccagcagggtgttggggataggggaaaggacatcgtcgagccccggaatgatgacagtctgggcattcacggcatggctcaagccccagcggatacgcatgtcgaacaactttgttcgaatacgattcgactgggcgcatacgagaacctcgtatgggatcttccccggcgggaggggcgcgcgcccgaacatctcgcaggccatcgtcaggtcaaacggcacaacgccatcaaacgccaggatggctaccctgtgtactgcactttgcttcacagaactcgctcccttgattggcgagaatccttcgatagatggcattctagcctattggcgaacttccgacatgtcgacatacttgcgcttccggcgagaggaaagtcgctga

SEQ ID NO: 300309 - DNA, 288 bp, Proteus mirabilis
gtgatatcatcattaaatggcaaagtggtgacaccgtttgtcgtgaagaatggacaggtggttattcatgaagccttaatggataaagcgtggatacagaaactagtagtactcaattattttaaatcatcgggatttgataaagggaatggctttttattggatgcaaaaaacaatattttccgctttacgggtggtaatggggcattaaatatcaccaataatcaattggtcgtcaaagatgagaaaaaacgccttgtgatgaaaatcggttatctagggaattga

SEQ ID NO: 300310 - DNA, 498 bp, Proteus mirabilis
gtgctctatggtgatgatggggatgatatgcttatcgattattatggtgctaatatgttaaatggtggtaagggtaatgatcggatctgtgtagcatcaatggatagagggcttccaggcagaaatatcattctagggggagaaggtgatgatgaaatatatttaggcacaggaactcataatgtaacaggaggacaaggaaatgatacctttaattttttctgctatgaggggattgaaagcaatagttcaatttgggattttgaaaaaaacaaggataaaataacgttgatcactagggattatagaaaaatagatatatcaaaaatgaaaaaagttgataaattatcaggagataaaaatgaattttcattaaattataacaaaccagccaacaaaaccatcatagacgtttcaacatcttctaacgatgataagtccattgtacatatagagattgtcggtatatttaaccacgatgaactctttgcggtataa

SEQ ID NO: 300311 - DNA, 1020 bp, Proteus mirabilis
atgcatgctaacaaacgtgaagaaattaaagaagttcgtgcaggtgacatcgctgctgctatcggtctgaaagacgttactacaggtgatacactgtgtgcaattgatgcaccaatcatcttagaacgtatggaattcccagagccagtaatctctgttgctatcgaacctaagactaaagctgaccaagaaaaaatgggtatcgctctgaaccgtctggctcaagaagatccatctttccgtgtatctagtgatgaagagtctggacagactatcatcgcaggtatgggtgagctacacttagacgtgttagttgaccgtatgcgtcgtgagtttaaagttgaagcgaacgtaggtaaaccacaagttgcttaccgtgaaacaattcgcgaagaaattactgacgttgaaggtaaacacgctaaacaatctggtggtcgtggtcagtatggtcatgttgttattgaccttagcccattaccatcaggtggtgaagagaactatgtgtttgtcaacgatatcgttggtggtgtaattcctaaagaattcatcccagctgttgacaaaggtatccaagaacagctgaaatcaggtcctttagccggttaccctgttgttgatatcaaagctcgtctgcacttcggttcttaccatgatgttgactcctcagagatcgcgtttaaaattgctgcatctatggcctttaaagaaggtttcatgaaagcaaaaccgattctgttagagccaatcatgaaagttgagattgaaacgccagaagattacatgggcgacgttatcggtgacttaaaccgtcgtcgtggtatggttgaaggtatggacgatctacctactggtaagatcattcgtgcacaagtaccactggctgaaatgttcggttatgcaactgacctgcgttcacaaactcagggtcgtgcttcatactcaatggagttcttgaagtacaacgaagcgcctagcaacgtcgctcaggctattatcgaagctcgtaaagcgaaataa

SEQ ID NO: 300312 - DNA, 183 bp, Proteus mirabilis; identical to SEQ ID NO: 286971

SEQ ID NO: 300313 - DNA, 162 bp, Proteus mirabilis
atgaaaaaatacacagttttatttgcagaaataagcaaaaaaaatccggatgatgaacctgatgtttatcgctttgagtccataaaagaatttctatcttttgttaaaaaagtaaaattccaagaaaaaatgaattttaattcatcattatattttatctga

SEQ ID NO: 300314 - DNA, 345 bp, Proteus mirabilis
atgaaaatgtatcttgttaaattagatttttttgaagtctgcgacaatgaaagaatgttcacggatagtaaagaatatgtgattgtagaaaaatcagaatcacgggttgtagaaaagttcattaaatttaataacgcattgttaatgagtgtcactcaatacgatttattcaccgaaccgaaaaaaattaagtttattatgtcagcgtacaacgtaaacggggaggtgatttttgtcgaaacattaccgattgaagttaaaaacacattagagttaattgagatactaaaagcccgccgaagcggtgactatttaaccgtagattggaaggaggtagacaactaa

SEQ ID NO: 300315 - DNA, 135 bp, Proteus mirabilis; identical to SEQ ID NO: 286968

SEQ ID NO: 300316 - DNA, 462 bp, Proteus mirabilis
atgaaatacggaaaactctatgccgtcattgcgatggtaggcattatcgtgggtagttattgggtgattaactggcaagctaataggattaattcactgacagatatcaacaaaaaactggccgtggctctcgaagaacagaagtctattaatactgactatcaagcacgcataatgcgattaaatcagttggatattcaatatacgcaggagctagcgaatgctaagaatgaaattagtcacttgcgtgatattagtgagcgtcatccagagcgggtgtacatcaaagccgagtgccccaaagtcaaaaccactccctacaccagcttggcttatgcaaccaccgcccgacctactgacaccgctatccgaaattattggttactcagagagcgaattgcagagtcagaacagatgattaaagggttgcaggattatatcaaacaagaatgcatggaataa

SEQ ID NO: 300317 - DNA, 984 bp, Proteus mirabilis
atggataataattcgctaaaaaatgcgagtttatttgataatgatcccgttctttatgctgcatggctttactatcaggacggactcagtcaaagtgaagttgcaaatattatgagcgtttctcgagtgactgttgtgaagtatttacatctcgcgagagaaaaaggtttcgttaatataagcttggattcatcagtattttctacgattgattattcaatcagaataaaagcaaaatttaatcttaataatgtgcttattttacctgatgaagaaaagaataaattgcaacaaacatcaaatatgaatcgagaaagattagctaaagcaggggctatgtatctttctcagataatcagcaatgatgatattttaggtgtagcttggggaagaacaatccataaactagggcactatctccccactaaaacactagaaaatgtcaccgtgttacaaatgattggggctgtagccccacaacctgattttactactgcggaatctgccgctttgatcgccaataagttttcaggttgcagtattaatttgcatgtaccggctgtagtgtcaaatgcacgtttggcaatggagctacaagcagaaccaataatacggcgtaatttctctgctttaaatcaatgtaataaagctttgtttgtagtgggtaatactcaagatgacaatcctttgattacaacaggcgtactcaccacaaatgagatggcacaatatcgcgatttaggtgctgttggtgtcatttgtggtcgattctatgatgcacaaggtaatcctctgctttctgatatcgaccttagaattatgggaattagtcttgcacagttaagacagatcccacagcgtatttttattgctggaggcgttgaaaatgttgctgcaaccataggcgcaataaaagggggatatgctacagatattgtcatcgatgaagtgacggcattagcattattggaattgagtatttaa

SEQ ID NO: 300318 - DNA, 687 bp, Proteus mirabilis; identical to SEQ ID NO: 298352

SEQ ID NO: 300319 - DNA, 963 bp, Proteus mirabilis
atgatgaaagctgttattcctgtcgctggattaggcacacgtatgttacctgcaactaaatccattccaaaagaaatgttaccgatagttgatcgtcctttaattcaatatattgttgaagagtgtgcacaagcgggcgttgaagaaattattttagtgacacattcatctaaaaattcaattgctgatcattttgataccagctttgaattagagaatatgttagagcaacgaataaaaaataaattattaaaagaagttcgctctatttgtcctgaaaatgtaaaaattatccaaattcgccaagggcaagcattaggattagggcatgccatttgttgtgctcaccctgtcattggtgataatccttttattgtattactccccgatgtgctattaaattctcactactgtgatccttaccatgataacttatctgccatgatcaaacgcttccaaaaaacagagcgtagccaaattatggttgaacctgtcgcactcactcaagtacatcaatatggaattgttgattgccaaggtgttttttgtccacaaggtaactgggcgcctattcgtcgtattgtggaaaaacctaatccagaacaagcaccttctaatctttctgtggtggggcgctatgttttctctgcagaaatctggccgttactcgatgggttgcctgcgggggttggcggcgaaatccaattaacggatgctattgatctcttattgagaaaagaggttgccgaagcttacaccttagttggtaaatctcatgattgtggtaataaactcggttatatgaaagcctttgttgagtatggtttacataatagcgaactgaaagaagagttcgctctttggatacaagagttgtatgcaaaagatgtattatcccaaactatggccaataatcgcccaacactaaaagaagtcgataacagtgtgatgacaattttttga

SEQ ID NO: 300320 - DNA, 996 bp, Proteus mirabilis
atgcccaaaactcttatgagtcttaaacaaaatgattttacgcataaaaaaattatcgtaggtattagttcatgcttattaggggataaagtgaggtttgatggtgggcataaatgttgtcatcttgctgctgatgaattatctgagttctttgaatatcaatctacttgcccagaaatggctattggtttaccgacacccagaccagcattacgattagttcagtctaagactggtgaagttaggttaaaatttagtaatggaagtgaaggtgacttaacccaaatgatgaatgattactctatagaatatttgaggagatttaatcaatttagcggttatatcgtgtgtgcgaaatcacccagttgtggattagaacgtgtccgggtttatgatccaataggcaacggcaataaaaaatcgggtacaggcatttttactgaaaatctgaaaagaataatgccgtggttacctatagaagaagatgggcggttaaacgatccctatattagagaaaattttattacacgggtgtttgcgcttaatgagctaaatcaattgaaaataaataactttactcgccaggcattaattgattttcatacaagatacaaactattgttattagctcattcacaaccgctttatcggcaactagggcgctttgttgctaacaataaagattgggattcattagagactttctttgttgaataccgtaatcgatttatggctctattacaacatcaagccacacgtcgtaatcacactaatgttcttatgcatgtgcaaggatattttaagcaagatttaacttctaagcagcgacaagcattaagccaattgatcttagagtatcgtcaaggaatacaacctttattggcaccattaacattaattaatcattacttatcagaatacccagataattatctgagtaaacaaaaatacttttatccttatcctcaatctttaagattacgttatggtttgtaa

SEQ ID NO: 300321 - DNA, 375 bp, Proteus mirabilis
gtgttaacgggatttgttgattcccgattgtatcgcgggacgtattttaaatgtactgtagcatcggacagaaaacccgatgcaattgcacagaccatcacgcggaaaattttatgctgtgtacgggaagaactgataaaagcgcgagagattgaaaaatcacatcaggacgcgctggagcaggataaaatcattaagggtatgctgtcccgtctggtgaagctggaaagccattacaacgcttttacgggctttcgggcggataatgatttacggggggatataactaaacggtttgacgggtacgggctgacagtgcaagggttgaccgttgagcaattagtcaaattaacaggtattattaatactatctaa

SEQ ID NO: 300322 - DNA, 267 bp, Proteus mirabilis
atgaaaaccataagaaaaaacaaaggtgatgtaacttattatttaagcagagagaataacgatagttatcgtcttattaaaaaaatcaaggcgagagcgactcatttagttaaagacgggcataaaacaaccaaagtaacattaagtgatttgttattaacgcatgaccaactttacaacttagattattcattaaacgggctgagggcagatgataaagccacaattgaattgcttataggggagttttttaaaaatggaaaataa

SEQ ID NO: 300323 - DNA, 231 bp, Proteus mirabilis; identical to SEQ ID NO: 286927

SEQ ID NO: 300324 - DNA, 522 bp, Proteus mirabilis
atggttactgaaagtgccatgcgtaaggcttccaatgcacaagctatagcggaggctacaaccactggcgcagcaattacaaatgctatggctccggcagcagcgacaaccagtattgccacgatgggctctgccgccacatggggtatggctgcaatggcaacagctattcccgctatgattgcgcttgctggtgctcgtaaaaatggtgggcccgtaaatgctggctctatgtatcgagtgggtgagggtggtaagcctgagatattcaaggcatctaacggtagtcagtacatgataccgggtgataatggtcgagttattagtaatcgacaaatgggtaaaggtggtaatggtgtcagcatgggtgatatgcactttacattccaagttcaagcgcctaatggcatcactcaaaaggaagcacaacagatacagcaaatggtgagaggtacggtttatgacgtacttggtaacgaaatgcgtagcggtggtgctttggaaaaagtaagaagttggtaa

SEQ ID NO: 300325 - DNA, 321 bp, Proteus mirabilis
atgaatgagcaaagtcgagggcgagaagtgcggttgatgatggttgccatcggtgaagagggaaaaccgcttcttgctgaaatcttatttgtcggacaaatcacatcgattaatgtggtatctggtgaagagaatgccgtatgtgttaatatctcaaatcgatttgagcgatggtcaattggtttgcctgatcggtttactgatgagtcgtggtcatcaagaaggcaaggggatcgtatctttcgttatgttgctcaaatggctgaacgggcgatttattggggcagcaagaaagatgcaccatcatttatttataaataa

SEQ ID NO: 300326 - DNA, 144 bp, Proteus mirabilis
atgctattaagaagagcctcatcaatattaaaccaagataatatttttttagggaataaagatgctgataataatatcaaaggaataattattgatatcgtattaaaaaataaagaaaaaatatgctttttatttctattttga

SEQ ID NO: 300327 - DNA, 663 bp, Proteus mirabilis
atgttcaaaaaaagcttattagctatttctttacttactttatcaagtagtatcgctttcgctgcgacaccaaccgctaaattaaaagtaagtggggatatccaaccaccaacttgtaccatcaatggcgaaacaagtgaaactactgttgaatatacttttgctgtaactcctggccttttccctgcaaaaggtgatttaacattagagcctcaatcaaaaaatattgtcgtaacttgtgatgcaaaaacttatctagcttttactcctactgataatagagctgggacagaaaaaaaagaaggtgattcttattttggtttaggcagttataagatggcagtcgatggaaaagaggctgttgatactaaagtaggttactacacagtttcaatgaaaaatgccacagtaaaagaagatttgactagtgaagaaaagaaagtctatgtaatggattctagatatggcagatctacttctaagacactagtaaaaaatgattcattaggttgggctcgtagtaatgctaatgattatgctgacggtcaagtatttgcggcagattttgaagtcacaccaaccatcaatagcgcactaaaaaatagtgatggtgatgctaagttagatggtttagccacattaacattccaattcggaatttaa

SEQ ID NO: 300328 - DNA, 261 bp, Proteus mirabilis
atggagcatagttttgggggtattaatactggccgagataagtttaaaaaatatttctctcatattcaatcttctccagaggagcaacatcagaatttgcaggatacagcatataaggagcaattagaaaacactcagaatttaatttatgtggcttgttctcgtgctaagaaaaatcttcgggttttgtatttagatgatatcagcgatattcgagctgggataagtcaattattcgatagaatagatcaatttaattag

SEQ ID NO: 300329 - DNA, 597 bp, Proteus mirabilis
atgtctattcttgaatggccaaaagaggtgatccccacgcaggaaaactggcaattattgagtaacagcaaaacctttacctcaccatttaatggaagtagtcaaacggtacgctttccgggaagtcgttggcgttgtgagctgacattcaataatttaaatgaagagaaatcgcgccagttagaagcgctagtggcttcattggatggcatgtcgggacgggtcaaaatatcaagctggataagaaaagggcgttatgggtatggttcgcctcgtattgcaataccgagtcaattgggtaatcggctagaaacaaaggactggaagcgcaatatgcgcgtattacagcaaggggatcgcttaactgtgggtaatgaactcaaaatggtggtggcggatgtggtcagtgataatcaaggacatgccattattcttatttcgccgatgttaagaacatcacctaccgtcaatgaaatgctcgaggttgagcgtccttttggggtttttcggctcgttgataatgaacagggtaaatttcagcatcgtcgcttggggtatacctatatcacgttatcttttgaggaggtgttgtactaa

SEQ ID NO: 300330 - DNA, 321 bp, Proteus mirabilis
atgaatgagcaaagtcgagggcgagaagtgcggttgatgatggccgccatcggtgaagagggtaaaccgttgcttgctgaaatcttatttgttggacaaatcacatctatcaatgtggtgtctggcgaagaaaatgccgtatgtgttaatgtttctaatcgattcgaacgatggtcaatcgggttacccgatagattcactgatgaatcttggtcgtcaagaaggcaaggggatcgcatctttcgttatgttgctcaaatggctgaacgagcgatttattggggcagcaagaaagatgcacctgcatttatttataagtaa

SEQ ID NO: 300331 - DNA, 336 bp, Proteus mirabilis
atggctaaatcgttattcataatctgtttttcaataatcttatcgggttgctcagtgaaaaaagaaatagtacctatcggtggtagtaaagctgatggtacggttcgtatgggttatacatatggtgataaattcggtgcttttgaagttcctgttgttgatatagaacgtgcaaacgaattagcaacaaaaaaatgtaaaacttggggatatgaaggcgctgaagcatttggtgggaaaactgaaaattgtggtatgagtaatggatttgcatgtacaagaatgaatgttgctattgaatatcaatgcatcggtggtaaatcagcacaatattag

SEQ ID NO: 300332 - DNA, 288 bp, Proteus mirabilis; identical to SEQ ID NO: 298415

SEQ ID NO: 300333 - DNA, 687 bp, Proteus mirabilis
atgaagaaaaaatttctctatttggccttactgaccatcgtatcatcatcaagttttgcggcgataccttcagctaagttacaaattaatggagatatcaagccaccaacatgcgccatcaatgggggtaatcaggagatcctttttgattatggaaatatatctccatcaattattcctgaaaatgctaaatatgctttaggctctcaacgtagagatattaaaataatctgcgatgtagatacttttttaacatttacagtttcagatttatttacagcaaataaagccggcacatggaaaagcggtacttttgggttagtgaatgcaaaaaataatcaacaagaagttgggggctttttaattagggcctataatattgaaattgatggtaaaaaagctttcttcggaagagtaaaggaacaagaaaaatggaagtctaacattatcgttaaagatgctataatgggttggacaaatgcaacacaatttgtcattcataaagattatttagacctagcgtcaggaaaagtttttagtacaactttagagacaggaggaacagaaagcaatccagattatggatatatcttgtctaaacaagaacttgctaaagaagatatcgatatttctgaaggtttagattatataggtcaagctactattacatttaattttggcgtttaa

SEQ ID NO: 300334 - DNA, 159 bp, Proteus mirabilis
atgaaaaaacgaacaaacagtgtttatactactggatttaagcaagaagcggtcgcattagtcagcgaacaaggttatagcgctccaaaagcggcaggttttttagggatcaccgataaattactttatagctggaaagcaaaattagacgctgagtaa

SEQ ID NO: 300335 - DNA, 330 bp, Proteus mirabilis
atgatgcgtctattaaccaagtcgatagattttacagcagtggtcacctataacgactttatggctgctggggcattatcggtgcttgatgaaaatgagatccctgttcctgaaaaaatttcagtgattggctttgatgatgtacttatcgctcgttatattcatcctcgactaactacggtgcgttatccgatacatatgatggcagagcaagcagcaacattagcgttaaagctttctcaaggggaagctttaacccaaaagcagcgtatttactcacccactctggttcagcgcaactccgtttataatttaagccacctttcttaa

SEQ ID NO: 300336 - DNA, 174 bp, Proteus mirabilis
atggtggctaaaccgctgctgttaccggcagatattattcagttaccgaaaggacaggcgtttgcgctgctggaaggcgggaagttatggaaaatcaggatgcccctgcctcggattggaaatatcggtgatcccggataccagggttttggtgtaaatatccacttccggtaa

SEQ ID NO: 300337 - DNA, 456 bp, Proteus mirabilis
atgttgcgtgtccgtgaactgatgaccgcgaaattactgacggaacagttaccggaagtggatatttacaccaaaaccctggtatccgggatcaccgatatttccaatccgaggcaggggagtgattttacctccaatacccaggacagggtcagtatggtggctaaaccgctgctgttaccggcagatattattcagttaccgaaaggacaggcgtttgcgctgctggaaggcgggaagttatggaaaatcaggatgcccctgccggcggcagaggctgatgccctgatgccaccggatttacaaaaaatcgcacagtatatggagaaaaattaccgtaccggcgaaacttggtggactgcgtcatcattttcggatgcgcggcatgacagcggcggtatgaatgtggctgagatggcaccggataccgaagggggcaacgatggcaactgctga

SEQ ID NO: 300338 - DNA, 297 bp, Proteus mirabilis; identical to SEQ ID NO: 286967

SEQ ID NO: 300339 - DNA, 285 bp, Proteus mirabilis; identical to SEQ ID NO: 286966

SEQ ID NO: 300340 - DNA, 303 bp, Proteus mirabilis
atgaaaaaagcccgttttagtgaaactcaaatcgttaatattttaaaactcgctgattctggtatgaaagtggaagatatttgtcgccagaatgggatcagtaatgctacttattataattggaaatcaaagtatggtggtatggaatctaatgatattaaacgattaaaagagcttgaagatgaaaatactaaactgaaaaagccatttgcagaagtcagccttgaaaatcatgccatgaaggagcttttcgcaaaaaagggttggtgctggctgagaaaaagtcctgtgctcaggctttaa

SEQ ID NO: 300341 - DNA, 309 bp, Proteus mirabilis
atgattatcgcttattcaacagctcctaatgaaactgtcgcccatgaaatagctcaccatcttatacaggcgaagcttgcagcttgtattaacgtccttcccaatatcaaatctatctatcattggaataatgaaattgttgaagataatgaggtacttatgatgatcaaaagcgagagttcaaaacaacagattttgattgatacactagtaaaaatgcacccttacgatacaccagaagtcattattgtccctatagaaaatgggtttcatggttatctagaatggatacatcaaagcctaaattaa

SEQ ID NO: 300342 - DNA, 423 bp, Proteus mirabilis
atgtcaaaagagataagcgaattacagtttagtcttcactatgcctcagaaacagacagtgaaaagaatacctccatcattttaacggcgaatatccatacgactgatggcgaagctcaacaactgacacaattaatttgcacaacgtctcccgcaggtaaaaaacaatatcgaatcggcttgcaaaaaattagtgatgctggtgctccattgctggtggcgattgaatcctattggcgcaaaaacacacaagagagttgtgtttatttgttagagaaagcgaagcaatttattcaaggacacttacaacaaacgaatacatggatatctatgtatggtcttgtgatcgtttctaatgcgtcactggaagaacagttgcctgaaggtttattaaaggcacttaaagtatcaatgcccgcctaa

SEQ ID NO: 300343 - DNA, 210 bp, Proteus mirabilis; identical to SEQ ID NO: 297729

SEQ ID NO: 300344 - DNA, 195 bp, Proteus mirabilis; identical to SEQ ID NO: 297730

SEQ ID NO: 300345 - DNA, 426 bp, Proteus mirabilis
gtggctggtaaaggataccgttatccgacacggcaggccgcctggcaggctttacagtcgtttttacagacgacatcccccagacgtattgatgtggggattgcacaggtgaactggggctggaacgggcatcacttccgttccgcctgggaggcctttgatccttataccaatttgcatgtggccgcccgcatcctgcgccgctgttatgaggcgtcaccgggtagttggatccgtgccgccggctgttatcaccatccggcgggcggtcagcccgcagtacgctataaaaatagtgtccggcgtcagctggcgacactgacgggcggtacacaacccgttcccgctcatttaccggcagtcagtacagatcgggctgtatcgtttgtgtggatagaaccggagaacaaaaccgatgcgaaataa

SEQ ID NO: 300346 - DNA, 159 bp, Proteus mirabilis; identical to SEQ ID NO: 300334

SEQ ID NO: 300347 - DNA, 198 bp, Proteus mirabilis
atgccaagaatgaaattagtcgcttgcgtgatattagcgagcgtcatcctgagcgggtgtatatcaaagccgagtgcccaaaaagcaaaaccacttccgccaccagcttggcttatgcaaccaccgcccgacctactgacaccgctatccgaaattattggttactcagagaacgaattgcagagtcagagcaaatga

SEQ ID NO: 300348 - DNA, 159 bp, Proteus mirabilis
atgtcatggaaacctttaatcatcattatcggctttattcttgcattactcattacagtcgctggtggcatttatctcttgattgataactcatgtactaaagaccaagtgagtttagaaaagcgctgtcagattgcactctcatatcatcggtactaa

SEQ ID NO: 300349 - DNA, 336 bp, Proteus mirabilis
atgatcgatacagcaataagtaagcctttctattcatttataggatggggcaaagattattttggagatgaatcaagtgcaactgataatgaacacctttatattgccctaatatatggtcccattatttggatattgatattatcagtagcattctactatggtagtatttatacgataaaatatctttactctaaaaattttgaattacttctcgttcctacaactatgttatgctgggtgattgttgctattcccgcagcttttataacttatcccgaagctctaatattaagtgccttactgctaaataatagtaaacgatatgaatactaa

SEQ ID NO: 300350 - DNA, 522 bp, Proteus mirabilis
ttgcaacgagcggaggccttttgccgaaattcatcaaatacagattataatcatctggcggatgaatttaaaaatattattaaggaaagagttgaaagaataaaaaaagaagatgttataaaaatatttaatgaagtgttggtaaggtatgataatgaaactcgatttaaaaatagcaatgaaagaatactagctaatttttcaagtaataaggagaaagaaaaatttctgtctaaaataaattttctagtctgtgtttcaaaatataatcttcctcttatggtagaggtagagaagcttaaagaagaatttccagtacagttacgggaaataatgaataaaattctttatgaagaaagtataatggatgaaattcttaataaagcgaatattgattgcgtatataagtattcacttaaaaaagtgcaaaatatttggattgaagaatatataaataagttttatggtggtaaagaaataataatagataaaagaacagagagctgccatttaaaacgataa

SEQ ID NO: 300351 - DNA, 279 bp, Proteus mirabilis
  misc_feature (227)..(236): n is a, c, g, or t
atgtatccaccgatcttccaagtatgcagcgcctcggccgcagtaaaggaactgatcggcactaatccggtcaggctctatccgttcgacgaggcgccgcaaggcgtcatctatccgtatgtcgtgtggcaactggttaacggatctccggagaattatctcggtgaccgcccagacattgacggctataccacgcaagttgatgtctatgccgacagagcgaccgnnnnnnnnnnccgccgcgcgaaacgtggccaaagcgttacgcgatgcgattga

SEQ ID NO: 300352 - DNA, 255 bp, Proteus mirabilis
atggctggcgcattaggtcgattaaatattgatttgacgctgaatacggcaaattttacaagtgcgatcaaccgtagccagcgccaaacagaacaatttgggcaaagtattcgcgccagccttcaaactatcaccgtgcaacaagagcgaatggtatcgcaaaccgcaaaatcttcggcgctttttgcccgttttgcgagcgtcgcagcaagtgcattatctgtacggcaagtgattaattatgccgatggttga

SEQ ID NO: 300353 - DNA, 276 bp, Proteus mirabilis
ttgagttatgctgacatcgacactgttgaacacacactgactgcagatgaagtggcggcaggtaaagccgatgtgactatccccgcagataaagtgacagcagatggtaactattctgttaccgcagaaattactgatccggcgggtaataccagtggtcagggtaaacctacggactttatggttgatacgcaaattccggaatggtcaccaccggtgtggtatccaccgtaccatcaccgtctgtatcacccggaatttgcgtatcaaccataa

SEQ ID NO: 300354 - DNA, 462 bp, Proteus mirabilis
atgaaacactggaaactttacattgtcgttgtgatggtggggattgttgctggtggttgtgcgctgattaatgcacaagcgaaaagaattaacacactgacagaaaacaacaaagaactgactaccgcactcgaagagcagaaggatatcaatattgactatcaagcacgcatagagcgactaaatcaacttgatacaaggcacacacaggagcttgttaatgcaaagaatgaaattagtcgcttgcgtgatattagtgagcgtaatcctgaacgggtgtacatccgagccagttgtccgaaagacgaaaccaattcaacctccggcatggatgatgcaaccaccgccagacctactgactccgctgtcagaaattattggctactcagagagcgaattgcagagtcagaacagatgattaaagggttgcaggattatatcaaacaagaatgcatggaataa

SEQ ID NO: 300355 - DNA, 159 bp, Proteus mirabilis; identical to SEQ ID NO: 300348

SEQ ID NO: 300356 - DNA, 348 bp, Proteus mirabilis
gtgcatggtggtgaatttgtttttaccaaagaagcgacggctaaattgggtgtcggcaatctctatcgcttaatgcatgcggcgcaaggttatgcttcggggggctttgtgggctctgtcgcaggacgaatacccgttacaccacaaccgacgttagcccgtgcgggtggtgtacaaatgacggtcgtcaatcatattacggtgacaggaaatggtgacgctgtacttgcgcaggcaatgaaagaagccgcacaacaagggacagaagcaggcgcacagaaagctcacgcgatgatgttacaagactttcaaagtaatggcgcagcacgcagaacattaggagtttaa

SEQ ID NO: 300357 - DNA, 171 bp, Proteus mirabilis
atgctgcaaacggaaatggaagtgcgtaaatccattgccaataacgcgatgctgacggtgattgagcgtgatcagcaacggacacaggcgaaccctgccacccagaccccagataatacggatgtgcgtgtacagggactggagcaaaacagtgacaccggaggacgttaa

SEQ ID NO: 300358 - DNA, 258 bp, Proteus mirabilis
gtgcagcgtaatggacaagtcaaaacgcgcatttgggtgaaatcattatcgggtaaaaaggtgtctgtctttaaacaggtaacgggaaaaagtgcggcattgaatccaaatgatccgttttattggtggtttgtcgagtttggtaccgccaagatgcccgcacaaccgtttatgcgccccagctttgaagcgaaaaaggaagcgacggctaaagtgattgttcaaacactcaaagaggatattgaaaaaacaaggtag

SEQ ID NO: 300359 - DNA, 264 bp, Proteus mirabilis
atggaaactgaaatgtttagggtaaatctggcagactggattaaacaggaagaaacagaatccggtgaaaatgctttttatcatcctaatactgaatacttcaaagttatgcgtgaaatcaatcagtatgaaactgaatttattgctaatagtggtgatttagtaaaaatggctaaaaagcattctgctacttataatcaactcaatgaaaaagataaagattttgttgattttcgccccctcgatgccgtaaatttcgtttaa

SEQ ID NO: 300360 - DNA, 684 bp, Proteus mirabilis
atgaataagataaaattaatcctttttttattattgtggtttccattaaaaaatagttttgcagtaaatgtaggtaatataacagagataatatcttctgatgaaagtagtcttgccaaagaaattgaaaatacagtaaatacggcaagattagtcaatttgacaatagaaaaattagactcaccacttgaaaatgggaaaattattccggttactgatcccaatgaaattttatcaacaccggctaatctgattcttcccggtcatgcaagtgatgtatttaaaatcatttatcaagggcctaaggatgataaagagcgttattatcgattaaattggaaagatgatcctattgctgaaaatggtataacacaaagctcaaaatcagcgacagcaacaacatctgcaactattagtacaattttagtggttgcacccagaattgagaattttaattatcagtatcatgataataaagtttctaatatcggtaatagttcatttcgtgttgtggcttcaggcccttgtctagcagaaaaacaacaatatggtgtggaggggatgtgtcgcgagcgttattaccttatgccacatttagccgttaaattacaacttgtcgatctcacaaataaaaaatctagcgtaggcatttggcacaaaggagagttcattgttgtcaaataa

SEQ ID NO: 300361 - DNA, 528 bp, Proteus mirabilis
atgaacaaaattaatttttgtaggataattacaaatcatattaattcattcactagtaatggtgaagcaaaggcacctttacaagatataatattccatttaataataccaattgttgcagcaatcattattactgtaattaatggagtaattccaaattcagttgttgggattttagtaaattttggagcaataacgacagcattattgatgagtgcagttgtgatggtttatgaccaaaaaacaaaattagttgaaaagaaagaaaaagaaacaattcaagacaaaattaaaacgttgaataaaaacataagtatttacaatgagttgtgcaacaatatttgttttgcaatactaacatctatattgactgttatcactgctttagttttatcgttttatacaaatacaactgaatacaaatggtttttttgtataataactatattttgttacatttcatttatttcaacaatcgtaacattttttatgatcttaaaaagatttggcataattttaaataattaa

SEQ ID NO: 300362 - DNA, 2937 bp, Proteus mirabilis
atgacggtatctactgaactaagccatgaagagtatgtgggtaatggagtaacaacagattttgattttcgttttcgtatctttgaaagcaaacatttgattgttgtggttgctgacagtgacggcaatgaaacaacattaaagaatggtactgattacactattgttggtgcaggttcctatcatggcggtaaggtggttttaaataaacctttagctcaaggctggaagatattattagaacgtgatttacccgttgtacaagaaactgacttacgtaatcaggggaaattctttgcagaagtacatgaagatgcttttgattatctaacaatgttaattcagaaagcattgggtactttctcgttgagtctgcgtaaacctacttatttatcgaactattacgatgccaaaggtaatcgtattgctaatttagcgcctcctaagttgggtactgatgcagtaaataaagactatgttgataacagtattaagtatattgatagtaagacattaagggtgaatgataaggatatacaagcattaccatcagctgagcaacgcagaaataaacaacttggatttgataatgaaggctatcctcaattacttgatcctgctgaaactggttcacttggttatgtctttgttgactcttttgaaaaaggtgcagagataacaactcgctatcaagctcttcattttgaaaataatggagaatattatcgttgggatggtgtgttaccaaaaaaagtaaagttaggatcaactcctagcaactctggcggtattggggttggtaaatggattagtgttggtgatagtgttattagatctgaaattaatattatcgaaagaaattttaataatatttttgaaatgctgaattccagcagaacaagaaacgaacaaaaagtttttgttggtggttattatgaaaaaacagatggtggagctgccaattggcatcgaaatacaactcttgatggcggtacatacacaggattaccagtgttcttaaatggaaatattgtcatttactctccatctggttttgcatatgtattagatacaccacttgtaacgcaaacaattgatttgcggcaaataggtgctaaagaatcagaacatattgaccatattttttctgttgcgacttcatactgtaaaagtagcaaaaatgtaaaaagaattgttattgttggtaattatacccatgaaaaccctttagttattcctgaacgagtagaggttgactacctaaattatttatcatcatctacaacaaaagtaaccaataatacatctgggctacctattttaactggtggatacggcggggatttggttatggatgtagacgcgtgtatcattttagatcatggatacggcgctaaaataaataatttcaacttaaaatgtaatgcaccaaatagtgttgaacatggtatatatcacggatttactcgggaagttgttattgctgatgcaattggtcggataggagaaaaaggtgatgataagttaaagaaactaaataatgcgatcacggctcagcaaggattttttcatctgtatgggaatgtaactagttttgttaataagagagtatggaattatatttttaattctaaaaatactggatgtaatgttattaggatacgtcaagcatggaactacggagcagaagaaagcgtgatgaagtttcaaggttctacaagcgtatctttggggcagcagtattgtgagggaactaatggtcaaatatatgaattttttggttgcacaggagctacatgtgagatcctatcaattgataggcacgaatgtaattccatagctccggtttttcgatctagaaactcacaagttgaatttggtgcaattacaatcaatgcaatcacagtaaaagagggtgatattggaattttatttgatcactcgtctagcggtggtatttatggctgtttaactatcaacggcatcacggcaagacctaatgatagaaatatcgaaaatttaaccactctagttaagagccgtgataattgtgttattcgtggcatgccaattcctcctatcggcgccattggaaatattggaggatcacctaattctttgtggtcagcagagaaagatacaggcatagcaacgacagatcagaatagaacattgataagcagttatgaaagccaagcatcagggattagaactacagttgcaaactcatttagaagcattgctgataaagaaggttcgacagtattaagtagttctcttgttcgttctgggactggttatgaagtttgcggtggatttgggggatcgtctggtgaaaatatatcttctgctaatcgtaaatggtctctagattcgtctaacgggaacattaaggctgctggagtgataactcaaggagcttcattttctgattacgctgaatattttgaaaatgcagaatatggtgttattccactaggaactattgttgaattaatagcggataaaataagaccagcgaatggagatgaatttattggagttatttctggcacagcaggtattgcactaaacgcctcgtcattatgttggagtaaaaaatatttgacggggaagtatggcgagccaatttatgagattattaatggacataaagttcgtaaagaaaactctgattatgacccatatatcgatagatatggagatgaaatttacttatcaagggaggaaaggcctgaagaatggtcatgtgttggtatgatggggcaagtttatgtgaatgtatcaaatgatgtttcagtaggagattatatctgcgcaagaaatggtattggaataaaatctaaagtaaaaaccagactcaaagttatggaaattaatgaatttgttgctaaatgcttattttatttatcggaaaacaagaggcataataattga

SEQ ID NO: 300363 - DNA, 537 bp, Proteus mirabilis
atgttaaaaaaaacaacactagctttatttgttgcaacgttctttctttctactaatgcattggcgttatctgataatactattacttttcagggggaagtttctgatgaaacttgttctgtctcaattaatggtaatcaggcaaaacctgtggttattttaccgactgttagtgccaaggagctaaaagatagtggagataccgcaggacaggtaacatttgatattggtctttctggttgtacaggtaatacagataaacccactaaaatatcgacggtttttgtcggcaatcaagttaccagcaatggcaaccttggcaatacgggaaacgctaccaatgtggaaattcaacttctggatactgctcagaaagttatcaatttaactggtggttttaaaggtgagggagatctgcaattaaagccaggagaaacgcaagccagcgcaacttacactgcacaatactatgctacaggtgccgcatcagcgggtactgttgaagcaactctacaatatgcggtttcttatctgtaa

SEQ ID NO: 300364 - DNA, 891 bp, Proteus mirabilis; identical to SEQ ID NO: 297517

SEQ ID NO: 300365 - DNA, 177 bp, Proteus mirabilis; identical to SEQ ID NO: 300067

SEQ ID NO: 300366 - DNA, 1560 bp, Proteus mirabilis
atgaataacattaaaagggaatgtgttaactatttattaggattaatggcgctatttttattaacgataagtaagataacttttgcagaaataaataataatgtaaataattgcttcttaattaatgaaataaaaatagaaaggaatggtttattaactaataaggcacaaaaagaattaatatctaaatatataaataaatgtttaacattaagtgatatgcaacatatcattaaatcaatgactaatgcgtatattgaaaaaggctatattacttcacaagcttttattgccgatcaagatctctcaaatcatcaattaaccattaacgtaattgaaggaaagataaaatcaatctttattgataatatgacttcccccatggttgatattctatttccttcatatcaagataaacgacttaatttacgtgagttagagcatgggcttgaacaactaaatcgattaacaacatcacaatatagattagatattcaacctagtgacaggataggatactcgactatttttatttataagaaaaacaaaacgcatcctttcagaaatcaacttactattgataattcaggttcaaaagcaacaggtgaaattttactgacgaataccacaacaatagattcgttatttggatttggagagcagtgggatctctccttaaacagtaatacagatttattacattcacattattatagaggctatacagcgagtataaatattccctatggctattggttttatcaatatcagttatcttataaccgttcttctcattttattaaaagttatagtaataaatatatctataaaaatataaatactaatcagcaagttgatattagtcgtttactttatcgggatagtaagaagaagataatattaaaaggcatattaaagcataaaaaagtaaaaacggaattagccaaacagccgatattaatcaatagcccaacattaacatcactatcattagccccccaatatcattttaatctgacatcaggttatttatctattaatccatcagcagaaattgggttgtctttttttggggcatcacctgattatattgctgaaaactcaccccgaagccactatagaaaattgagtctaaatatacattatcaatatttatttccttactctgtctcctatattacgtctttttatggtcaatatacatctgataatctttatagtgtggaaaaaataaccatagatggattaaatgcggttcgtggtactaaacaaaataagcttagtgccaatagaggactttattggcgtaatgaaattaatacaccatggataaattcatttttaggtcaatggcgttttattacggctgttgattatggcgttatctattctgatcaatatgaaacaaagcagcagtctttattagctggcgctatggggctttcattttatcgttcccctttttcttcacaactattgataaacaaaccattcatttatccaaagtggttaaatgctaaccaatggtctttatcttggtcaatttctttcgctctttaa

SEQ ID NO: 300367 - DNA, 750 bp, Proteus mirabilis
atgctaatgacaatgattaaatcacttatttttatcccttatctattattaagtggatgtggtgagtatatcaatatatatcttgataataaatttcctgtcaatatgaataatgatggcaaaaaaatcaaggtttattcaactatttcccctgaaacagtagtggaagttattggtacttatacgtcaaataagtgtgaacgttctcattttaatgcttcttatactaaagtcacttattcctctttaacgcaagaagtggaagcagagcgtaaaatagcagaggataataaaaccgcaacctatatcgtgcctattgatggagggggatggtgtaattggaagctagtagaaatagatatagccccagtctctactatttataaaagtcatatggtgattagtgaagttattccaattgtcgatgacaagcattcaaaaatagaactatttactacattagctcccgtaatagtggaaagcaagaatgatcaaaaaatctattatgcatcatcagaaatggaaggtgaaaagaaattatctaataaattaaatggaaaaatttattttaattataaagttgaacctaaactaactacgactatctcaaaggatgacaaagctattttccctaacggtaatattaaaacactgagtggttcgacttatagtaaaatgattggttttaatgaaataatcgagaatagtgatgaaaaagcgtttacttcttttgttcgatatattgattga

SEQ ID NO: 300368 - DNA, 1680 bp, Proteus mirabilis
gtgaaagggatcaccgaatttatcattgaagatacagaagcgtgccgccaacaagcttcgagtcctatcgaagtgatagaagggccattaatgaatggcatgaacacagtgggcgatctgtttggtgaaggtaaaatgtttttaccccaagtagtaaaatcggcacgggtgatgaaacaggccgtagcttaccttgaaccttatattcaagcgacaaaaaaagcaggcagctcggcaggaaaagtgttactggcgacagtaaagggagatgtccacgacattggcaaaaatattgtcggagtggtgttgcaatgtaataactatgaaattatcgatctgggggtcatggtaccttgcgataaaatcttgcaaacagccattgacgaaaatgttgatattattggattgtctggattgatcactccatcactggatgagatggtgaatgttgctaaggagatggaaagacgcggtttttctcttcctttaatgattggtggtgcgacaacatcgaaagcgcacacggcagtaaaaattgaacctaattacagccacccaaccgtttatgtgcagaatgcgtcaagaacggtcggggtggtcgctgcattattatcggccacacaaaaggctgattttgtcgctaaaacacgccgtgaatatgaagtggtacgtcagcagtatgcgagaaaaaaaccgcgtacgcctcccgtttccttagcgacagctcgtgccaatgcattgcagcttgactggcaacactatacgccacctaagccgaaccaattaggggtacaacaagttacagccaatattgaaactttacgtgagtatatcgactggacgcctttctttatgacttggtcattggcggggaaatatccacgtatattagaagatgaggttgtcggagaagaggcgagacgcgtttttgcagatgcgaatgccatgttggataaactcagccgtgaaaaattactgacaccgaaaggtatcgttggtttattccctgctaatcgccttggtgatgacattattatttaccaagatgaaacgcgacagcatgagttattacgttgttgccatttacgccaacaaacagaaaaaaaagagtaccctaactattgcttagcagactttattgcccctgtggatagtggtcttgctgactattttggtgcttttgcagttaccggcggtctagaagaagatgcactcgctaatgggtatgataatgctcatgatgattacaataaaattatggtaaaagcgctatccgatcgtcttgcagaagcttttgccgaatatttgcatcaacaagtgagaaccaaaatttggggttacagtcctgacgaagcgctctctaatgacgagttgattagagaaaaatatcaaggaacacgacctgcaccgggatatccagcttgcccagagcacacagaaaaagcaaaaatttggcaactgttaaatgtagaaaatcgcattggtatgaagcttactgatgcttacgcgatgtggccgggggcttcggtatcgggttggtattttagtcatcctgaaagtaaatattttgccgtcgctcaaattcaaaaagatcaggtggaagattacgccaaacgtcgtggtatgagtatgagtgacgttgagcgttggttagcccctaatttaggttatgagccttaa

SEQ ID NO: 300369 - DNA, 963 bp, Proteus mirabilis
atgttgataaagaaaataacagatagcattattgcatttatatataagacaacggataattatgtcattgatcagttaaatgatgttaatttaggtaaagttgagctatataaacccacggcggattcaaatactattttgagatgggatgagctttttaagaattatatggttaggggttttcctacagaaattaaagatataattactaatttgtgccgtatcgagaaaactatagactatttttttgattttaataaaatacaatcattaacagcatctaaaagttttggtggcattcctgatggcgctataaacggtagctggttttatgatttgtatagttgggggcgcgcaatgtatcccgacgaaagaatgaaagcggaaaatgaagatgattggaaacgaaatattgcgcacattgaatctgaggggttcagaaagtgcagacctattaatgtcatatattacgaatggttaaataggtttgttgcccctaatacaggcggttctcatcatgccgcattggtagtgtatcaatcaatcagagataaaattaaatacacaagagaaactattttagaaaaggtttctcttaatagttattatatacgaatgctggataatgaatactattcattcatcattaataatgatagcaatcccaaatccctatcggaaagtgataaatttattaatgtaataacagagctaatcagtacgcatatttcaattctgaaacccgtacattattatcagaacttaatgattatctttattcctaaagaatcattaaaaatagattccgaattatttaataactggattaataaagcacatgaccagaaaaaaataatcaatctgccgaactattttagattaccaaatgaatatcatacaaaaccttatttgcatgaacttcgttatctgaaaatgccaaatccaaattctatttttcaatag

SEQ ID NO: 300370 - DNA, 1158 bp, Proteus mirabilis
atgtctttattcagaagaggtaaaatatggtacggaaactacacgacgccaagcggtaaaagaatcaaggaatctcttggcacagaggacaagaagctcgcgcaggagttgcacgacacaagaaaggtcgaactatggcgcatagaacgtcttggtgactttcctgatgttactttcgaagaggctatagttcgatggattgaagagaaagcagacaaaaaatcactggatgatgataaaggtcggctttctttttggctagatcactttgaaggttaccgacttaaggatattacagaagcaaaaatatattctgttatcaataagatggtaaacagaaaagcaagggagagatgggaaaaacaagcggaatcagctaaaagaaagggaaaggaaatccccgcatttactgatgtccctgtcagtaacgcaaccaaagcaaagcatctcgccatcatgaaatctctgttaagagctgctgagcgtgactggaaatggttagaaaaatctcccgttatcaaagttccaacaatcagagaaaagcgggttcggtggttagagcatcatgaagctaaaagactgattcaagaatgccctgaaccactgaaatccgtagttacatttgcattggccactggattaaggcgatccaatattatcaatttagagtggagtcaaattgatatgcaaaggaaagttgcatggataaacccagaggatagcaaatcaggccaagcaattggtgttgctttaaatgacactgcttgtcaggttcttaaggagcaaataggaaaccatcacaagtgggtatttgttcatactgaatcaaagaagagaccagacggaacattaacgccaagcgttaggaaaatgcgagttgattctaacacagcatggagagcagcgttaaaaagagcaggaatagaaaacttccgttttcatgatctgcgccacacatgggcgagctggttaattcagtccggagttccgctttcagtattacaagaaatgggtggatgggaatcagttgatatggttagaaggtatgctcacctagcgcctaatcatttaactgaacatgcaaagcaaatagacaatatttttggctcttgcgtcccaaatacgtcccacttaagaaaagtagagaatttaaaatga

SEQ ID NO: 300371 - DNA, 471 bp, Proteus mirabilis
gtgactcagattctagatatgtgctgtggtagtcgcatgttctggtttgacaaggaagatagccgagcaatttacagcgacatccgcgcagagaaacatattttatgtgatggcaggaagttaaatatcacaccagacattatcgctgattttaaaaacctccccttccctgacggctcgttttatcaagttatattcgacccgcctcatttaattagagttggccacaacgcatggatgtttaaaaagtacgggcgattaaataaagaatcatggaaagacgatttatcaaaaggatttagtgaagcatttcgtgtgctcaaaccaaacggaacattggcttttaagtggaatgaaacgcaaatacctacaaagcaagttttagcgctaaccgaccaaaagccaacaatagtccagcgtgtcggcaagaacgataaaacgcattgggtgctgtttattaaggaggcgtga

SEQ ID NO: 300372 - DNA, 366 bp, Proteus mirabilis
atgaaaaaattcgatatagataacatattgaaaaacttatctaccgaagatgtagagagaataaataaaacttataatgaccaaactaataaagaagaaagtttcaatgaatggttttttaatacatttatatttgatcgcttcctgtttgaaggattgtttatttcaagtgttataattttcattcttataattatgtccgaatccacaccccacctattttattcattcttaatgttagtttttttttacattaccatgagttttgtcatcactgtttatgattgtgttacgaataaaatatcacttattttattttttagagtaaaaagaattgctgtaatgacctacttaatggaaaaatga

SEQ ID NO: 300373 - DNA, 2862 bp, Proteus mirabilis
atgattgataaaataatgacatatgttaataagttaacagaggttggtgtttttaataattataaatcaacaaattatatttccgatgtgtctaatacccctgctgtatataatacaaatattaaacagtttagcttaaataatgtaaataattatgtttatcttggatcaacaaatagtccactacttaataatatgggaattacccttgatgatgatggaaccttaatgttaataaaagggaaaacatatgatttatttaccggattaattcaaaagtactttaatggaggttttaaatataatgtatttcatatcaactctcaacatggtgatgatataaaatttaaagaactatatgtcgattataatgggtttttaattgggagtaagagagatagttcaggaaataataatgaactttataaaataaaatttaaaaagattgaaggtgaatataatttaagcgatgacgccaccgataatactaatattaattttattattgaatatgaaaaatatgaaatagaagatagtttaaaacatgatttatctaatattaataatattatagagaaagaagaaggaaatgtattaaaaataaatagagaagggatgcctattactataaatttacaagataataaactttttacatatggcttaccaccaacgctaatgcctaaagaggatgacgtagatggtaagagtaaaaaaaatgaaataaaattgccattaaaatcaaaagataaaatattagcgataaaaccggtgttaaataaaatccaacttgtggttgataaaggtaataaaataaaaatatattactttgatcctctgcatatttttgcattaaaagattatcattatgaaatcactcgtttaactcaagagccaccgttatctttttattcaatggttggagaaaataactataaaaactatcactcaggacagccattttctactcaaaaaataggtaattttagtgctaaaaatattccctttttttcgtcggctattgataatgcaagggttcactttgatagagcaaaacaacaatatgcattaaaaaaatatggtgcaatggtaaaagatatcgcgaaaagtcttgatcctggttttagagggatgttttctactataaaagctatagttaattctgctacattaccgagaacaattaaaacagatgctctaaatgatgtaaaaaaagcgattaaacatgattatcatctgcttaataaatatattactggaattaacaatggtaaatctcaaggtgaggttgtttattctttagtagaacaattaaatgataaagagagtattacaattagccaatataatgatatccgtgcattctttggcattagtgcatttaatttacctaaaagcattgatgtaaatgcatttcttttagctaattatgcaaaaacacatgctctgacaatttcaaaaaataagcaagatgaagttgtattctcatttgtaaataaaatggatgcggggattgctacgggcttatctgctggggtttttagctatgatcaaaaatggagagaagggccgattgattatggttttgttacaccgttaatggccagtgtgatactcgattatcattatgaaaaaaaatctaatttttcatttaaaattcaaccaaaagatttagtcgaatttattaatcaaggggtatctcttacagagagtgaacttaaggataatgcaacgctggaatttaatagaacacaaaacgcgtcattaggtgttgaacttagaagtgaagctagttttgatgtgggagtttctgctaatgaaaatatagaattaaatttaccgagaaatgcggttggtgctaatctctctttaaaaataataaatgtcattcacaatataaataaatttattggtcatggagaaaccaaagcaaaacagttggaaaaaaatgttgatgttgagtattttagcggaagttttgaattataccgagatttaaaatttacaccttcagcgacaaaagcatcgcataatattcactggtatccattgacatcattgaaaaattttgaagtcatgttagaaaaaagagttaattcactatttaaacatagaatttatgatggcaaaataaaacaagacaaaaaagaatttgaagcacataaaaataatttaaaaggactttataaaagagtacttaaaataaataacctatttgataaataccctgttcaatacgatgttaaaagaagtataaataaacttgatcatgtttatttacagttggatgcaaataagaaattaaaaaacaaactaaatccacaattgatggagaatgatctttctctcaagagtgatgtaatagataactcaatagatctagtacacaataataacagagtacaacaattcttagctgatttaacagaaaagaaaaaaatactttcttcacagaaaaaaaataatatgaatgaaaaatttacgccatattttatttctaaatatcagctaaatagtgaggggagagtgcgttattcagtgcttgaaactcaactggaagagcttatcaatgaagtgaaaacagatgaaaatctaacagttaatgatataaaagataaattagataatttctataataatgcgaaacaagagttaaataatattgaataccagcttaattcaatagatgtgatgtctataagtgaactcgccgataaagcaaaatcatttcctcttgcttttttacgattagaaagcaaaaagtctattatgcatcatcaagttaaaggtgaaattaattttttatatgataaatatgaaaagcaattggagaaaataaccactaattattattttcattaa

SEQ ID NO: 300374 - DNA, 1110 bp, Proteus mirabilis
atggctaaaaaaacacccaaagaacaacaagcaattagggaaagtgccgaggttcgatttgctgaagaattagaacgcttaacaaaagcggatgctaataatccgaagccccaaggatggcttcgctctcctcgggctgtgcgccaatttattttaggtgatgatactttaggtatcacacctaagtttttcggtgatgatgccttagttgatcgtgcaattgttacattattaggcaaacagggcttaatgctggttggtgagccaggtacagcaaaatcaatgctctcagaactttttgcggctgctatcagtggtgattcaggattaaccatccaaggtactgcagggacgacagaagatcatatcaaatactcatggaactatgcgttactattagcagaaggcccaacagaacgagcattagtcggctcaccgatttatcaaggcatgttacaaggtaaaattgttcgttttgaagagataactcgctgtcctcctgaaattcaagatgtactggtttctttaatgtccgaaaagcagttaatgatccctgaaatgggcgacggtgcgcgtattagtgcaaaacccggatttaacttgattggtaccgcaaacttgcgtgaccgaggtgtacatgagatgtctgccgcattaaagcgacgttttaattttgaaacagtaaaacctattcgtgatccagcttttgaaatcagtttgatccaatcacagcttgaaaatgagttaggtactttagcgacagaaatcaccgttcctatggatgtggtggaattactggttaccacattccaagaattacgttcaggtaatacgcaagatggtggcaatatcaaaacacctgatgcggttatgtcaacagcagaagccgtaaatatcgcttatgcttgtgcgttagaagcgcattatttaggtgatggcgtgatgaatgccggtgcgattgcacgtcaattaatcggcgttgtattaaaagataatcctgatgatattaagcgtattcgttattacatggacaacgtcgccagagaaagggccagaaatagtaaagagtggaaagcgttctttgatgcatcaaaagacttttggcaataa

SEQ ID NO: 300375 - DNA, 471 bp, Proteus mirabilis
atgtctctcaaacagaaaatagcggcgctaacaacagcaggagcaacagccatcgcgttagtagtaatagcccattttgaaggtgtacgttatgaaccttatcgtgatgtggcaggtgttctaactgtttgttatggacatacaggcaaagacattattcaaggcaagagatacacacaacaagaatgtgatgcgttattacaaatcgattttattaagacacaacagcaagtcgatgcattaatcaaagtatcactcgatgactacaccaaagctgctttatattcctttgcttttaatgtgggtacaaccgcatttgctcgctcaacattactcaagaagctaaacgctggtgatagagcgggtgcctgtgaagaaatgaaacgttggatatatgcaggcggaaaggtctggcgaggacttgtcagtcgtcgagaagcggagtcagcactatgtcatggaaacctttaa

SEQ ID NO: 300376 - DNA, 213 bp, Proteus mirabilis; identical to SEQ ID NO: 297307

SEQ ID NO: 300377 - DNA, 1962 bp, Proteus mirabilis
ttggatgatggtgataatgctgctttcattaaataccactatcaaggccattattataaacaaaatagtttaaatggacaacacatacataacctacagctatataatggaattaatttatttgcatggcgttatcgtcaagatctaaactataataataataattctttttctataaaccagcaatatgtatataggacacttagaaatattaattccattttaactatgggtgatttctatgcttattctcctaacttaaacacttataaaatactaggcgtgcaaatcaatagcgataatgcaatgaaagatggctctctagtaggttatgcacccattataagtgaaaccgcctatacctatgcagaagttagcattgagcaaaatggagaaacactatatagcacatctgtaccacctgggccatttactcttaataaccttccctctttaggtacaaatggtgaattagtattaattataaaagaagaaaatggcgaagtaagaaagaagaaaatctggaattattcttcacagtatttattaagaaagaaccaatggaattattactatactatgggtttagtaaacaatcctcaaaaaagacagtttccttctaataagaaaaaagaactattaactcaattgaatttaagctatggagtgagcaattatttaacgacaatgataggagctgaaaaaaaaggagatgatattaaagcacttattggaaataccctaggattaaatatcctgggtatagtctcattagaaaacgcttggataagagagaaatatcatcaacaatatcagtccaataagattaattaccaaaaagtattttctatggaaaatacaactatttcattaaactcatcattctactttagatttaaagagaattatgctgtaaataaagaatataagaaatatgatttaggatttcacttttcacaatcattaaataataatattgctttaacgttggggtataatattgcaacctattatcactcaaaagaaaaaagccaacgactttttattaatactagttcaaattataaaaaactttcctattcattagagctagagaatagcaaagatcagtacagcaataataatcaattatcaatttttttaaattatcctattggtcaagatctctctcattgggcaacagcaaggatcaattatgataatagagaaaaatattttcatgagaatatttcatttagtggaaatacattagaaaataatcggttaaattataaccttaatttttctaaaaataataaagaacacttagattcatcaatgaaaattagttatttaagtaggatagccaaactaaatataaactctcgatttaataaagatagttattctttaggctatggactcaatggcggcattgtgtttcataatggaggagtaactttagcccaagatctaaatgatagttttgctatcctaaattttgcaggtgctaagaaagtaaaaataataggaaagccaacaatagaatcagaccgaagaggttatttaatcattcctaatttaactagttactataacaataagttccacattgatgcgaaatcattagattataattataatattgataattatagctatcatttaattcctactaaaggagctattattgcaaaaaatattaaggtaactaaaggagaaagtgctttatttacatttaaccaaaacattccttttggtgcaacagcctatgtgaaaaattctgatggcaccctatccgatatatcctatgtaaatgaagataataaattatatatttctaatttacccatcttaggaaagatttttgtaaaatggggaagttccaacaaacaacagtgctcatttaactatcaattaaatgataatgaaaaacaaaatagaatttattttaaaactgtaaattgcattaaagaggaataa

SEQ ID NO: 300378 - DNA, 231 bp, Proteus mirabilis
atgaaatacattattattttaatttatttactctcattccattgttattctgatgaatcaaaatttagtaacaattgcgtttatgacgatataaaagacaatggttttattccagtacataatattagatttaaagctagtgatattgatttaggtgtcgatattggccaacctatcgcagaaatgagttttactgatgccgctctatctctgtctcttatacacatctga

SEQ ID NO: 300379 - DNA, 681 bp, Proteus mirabilis
atgaaaaatggcaaactctctttcgatgcaaaaatcatatcatcagtcttagtctctatctgccgttttttaaccgggatcagagccaaacaaatatctccgattgagaaagataaaccttgtatttattacgcaaatcactcaagtcatctagatggtttagttatttggtcttcacttgccccccatattcggccatttgtgcaccctgttgctgcagaagattattggaataaaaaccgtttacgtcgttatctttctcgtcgtatctttcgtgcagttttgatcccacgccacgcgaataaaacaaatgttagtgaaggaaatggtgaaacaacaactgcacctcagaaagtaaatgctcttacactgatgcaggctgttttagataaaggtgaatcgctaattatttttcctgaaggaacaagaggtaacggtgagtctattcaggattttaaagccggtctttggcatttgtcccgtaacaatccacaggctcaattagtccctatctatcttgaaaacttaaaccgcgtacttcctaaaggctctcggcttgtcgttcctatcatttgtagtgccacatttggcccgcctattgagccgacacatgaaaatgaagataagactgaatttctattaagagccaaaagtgcgttagaggagttacatcatggatag

SEQ ID NO: 300380 - DNA, 936 bp, Proteus mirabilis
atggatagtatcaacaatgaaattctctggatctttatcgggctattctcctttttaattattgccagtattattggtgcgatccttgcggcactcaaaggtcctacctcaaccattaccaatcttaattctcgaattaaagcttggtggatcatgtgtatcatttctgccgtcgctattagtattggaacaataggctcagttatcctcttcgccttaatttcatggcttgcattacgtgaattggttacattaaccccgactcatcgaggtgatcacgaagcacttttttggtgtttctttgtcgtgctacctatccaatatattctcgtcggtgtgcaatggtataatttgctagccatctttattccggtttatgccttcttattaattccaacacgtatggcgctttccggagatactcatcactttctcgagcgcatggcaaaagtgcaatggagtgtcatgatagctatctattgccttagctacgctccagcattattaatgttaccgatagaaggctttgaaggacgtaatattaacttattactgtttttgatgatcgtggtacaaacttctgatgttttacaatatgtgtttggtaaactatttggcaaacatcctatcgtaccgaaattaagtcctaataaaaccatcgaaggtttctttggcggcattatttcagccagccttatagggatgatgttatggtgggcaacacctttcacatggtgggctgcttttttactctctttagtcatcacactcgcaggctttgctggcggtttatgtatgtcagccataaaaagagacagtggcgtaaaagatttcggtactatgattgaaggccacggcggtatgatggatagaatggattctttgtgctttgccgcccctattttcttccacgttattcgctatttctacgtgtaa

SEQ ID NO: 300381 - DNA, 177 bp, Proteus mirabilis
atggcattgttattacggaaggggagtgtagagactccatatagcttgcctttagtctgtgcaactagtcagtttgtgaatgcgtcttatcaggatgaccctattgattgggccaagtgcaatacggggatacgttttcgggggaaaacagatttttgtgagcgaatggatacgtga

SEQ ID NO: 300382 - DNA, 405 bp, Proteus mirabilis
atgttgattgttattaatgattctaatctattttcaaactcagaaaaagcatcattattatataaatatcgtgaagaatgtcatgaatcattcattgacgaactagatatcactaatgaaacattaatatcattaattaaattatcaaataatgataatttttctattaacctaatagtacgattaataaataacaattataaggatagagaagaaatcgctaaccttgtagatcagcttcaagaaaaggaatttaataaaatatttaatcaaaaaactgcaactttaaatcttagcaataaccaagatgcagaattactattttctaccttagaggatgcaaagttaatcaagaaatggttattaaagggagaagggaagtattatattgagtgtatttattaa

SEQ ID NO: 300383 - DNA, 711 bp, Proteus mirabilis
atgaaaaaaatatcatttttattattaggattaatggttacatcaaactcctatgcagcaatttctttagatagaacaagagctatatacgaaggtgggtcaaatgcattagttattaatattactaatgataataaacaattaccttatttagcccaaacatggattgaaaatgataagaatgaaaaaattgagctagggccattaattgccacaccattagttcagcgattagagcctggtgataaagcgttaattaaagtatctgcgacaccagatattgaaaagttacctaacgatagagaaacattattttattttaatgttagagaagttccacctaaagctgaagacaataatgtattacaaattgccttacatacaaaaataaaattgttttatagaccgaaacaaatattgagagagccaaatgctatttggcaagatcaattagttttaaataagctatctgacggttatgaaatagagaatccaacaccttattacgtcactgtattcggtattggtggttcaaagaaagaagcggttgattctgagtttaatgcagtcatgattgcccctaaatcgtcacaaagggttaatagtaaagtgtactcaacgccatacttatcttatataaatgattatggtggaagaccgacaattaaatttcaatgtcaagctaatcgttgtgtagcagagaaaaaataa

SEQ ID NO: 300384 - DNA, 504 bp, Proteus mirabilis
gtgaagaatagaaaatttatttttatgttgatgctttacattaatggcctttttatttctcaaattggctttgcagaacctgttgctcgagataaatcattctttaatattaatagagcaaaaattgatttttataatcaaaatgaaaaaaatcaacatggttttatatatataaaaggctcatttttaaatgctccttgtgagcttatttcgaatgaaattagtttaaaagagctatacataaaagatattgatgtcgttattggtggttgtaatatttatagtgattttaaaaacagctcaaatagtaaacctgcgtttactagtgtgttaagtttcacaaataaaatcaacgacaatgtagaaaatattgatataagaatgaatagattaaagcattataaagataatgttattttgaattacctcttttcagatgaaataaagagaaatattcttgaccggaagttaaatatattaactcttaaattgcagtataattaa

SEQ ID NO: 300385 - DNA, 369 bp, Proteus mirabilis
atgcacgtccatttggtctttgtcacaaaatacaggcgaaaaatatttgatcaggatgccattgaaaaattgcgaggctactttgccagtgtttgtgctgactttgatgttgaactggttgatatggatggggaacgggatcacgttcatttactgattaattacccgccaaaactggcgatatctaatctggttaacagccttaaaggggtatcgagtcgattacttcgacgtgatcgtcctgatattgcccaacgtgattactacaagggggttctttggtcgccgagttatttcgcggggagttgtggtggcgcaccaatatccattatccgccagtacattgagcaacaggaaacaccgagttag

SEQ ID NO: 300386 - DNA, 1593 bp, Proteus mirabilis
atgtcacaatcattaactacagaagcattaagcttcaccaaaccttttggaatagctgaaaaagagatattaaatcatgatgttgagtcatttttgactgatttggtcagtcagttttcagaacgtcgtgacaccttattagcagaaagagaaatttggaaacaaaaagtggataatggaatgcttcctgattttatttcagaatcagattccattataaactcagaatggaaagtgaatccaattcctaaagacttgcaagatcgtcgggtcgaaattacaggccccgtagatcgtaaaatggtgatcaatgcattaaatgctaatgtaaaagtatttatggcagattttgaggattcacttgccccgacatgggataaggttattgatggccaaattaatttacgtgatgctgtcaaaggaacaatttcctataccaatgagcaaggcaagtgctatcaactaaaagcatcgcctgcggtgttaattgctcgagtcaggggattacacttgcctgagaagcatgtgctatggcagggaaaacctattcctgggtgcttgtttgattttgccttatatttttaccataactataaagcattacaggcaaagggcagcgggccttatttttacattcctaaattacaaacttggcaagaggcaaaatggtggagtgatgtttttcatttcactgaaaaacgcttcggtttagccagcggaactattaaagccacagtattaattgaaactttaccggcggtatttcaaatggaagagatcttattccatatgaaagagcatattgtgggccttaattgtggacgttgggattatatctttagctatatcaaaacgttgaagaattaccctgatcgcgtgttaccggatagacagggtattactatgactcaacctttcttaagtgcttattcccgactacttattcaaacttgtcataaacgtggtgcatttgcgatgggaggaatgtctgcttttatccccagtcgctctgcggagcaaaatggtgtcattttacaaaaggtatttgaggataaagagcttgaagcaactaatggccatgatggtacttggatagctcaccctggattagccgaaacagtgttatctgcgtttgatgcggtattaggagagcgagcaaaccaacttgatgtacaacgtaatgaaaagatcaccgcagaaatgttattggccccttgtgaaggtgaaagaaccgcaacaggaatgagagcgaatatccgcgttgctgtgcaatatattgaagcgtggatctcaggtaatggttgtgtgcctatttatgggctaatggaagatgccgccacggcagagatatctcgaacctctatttggcaatggatccgtcatcaaaaaccattatcagatggacagattgtaacaaaagcgctttttcgcaacatgttgaaagaagagctggaagttattcgccaagaagtgggtgatacccgctttgagcaaggtcgttttaaagaagcagcaaccttaatggataacattactacccaagatgaattagtcgattttctgactttaccgggttatcaacttttaaattaa

SEQ ID NO: 300387 - DNA, 177 bp, Proteus mirabilis
atgtatttggaaagttttacgataaaaaattatcgaaagtttggggaaaacaataatacagtatattttgtcaatgctaatgagatttgccattctcctgataacaatgatggagaaataaaacctttaatatctccatcaagtacattaattattggtaaaaataatgcaggataa

SEQ ID NO: 300388 - DNA, 3897 bp, Proteus mirabilis
gtggcactatcatctgcgatgctctacaaagagatagagcaactctcgttgcgggatcagcaacgattgagaaaacgcttacgtggcgttgataaaataagtaaagaaacgtcgaaacaggcggtattaagcgagattgagcaggatattattgttgcaaaacagcgtatattaaatcgacaagctcactgtcctaaaattgtttatccagaaaacttgcctgttagccagaaaaaagaggctatctacaatgcaatcaaagataaccaagtggttattattgcaggagaaacgggatcgggtaaaacaactcagatcccgaaaatttgtctcgaattagggcgaggcgtaaaagggtatattgggcatacgcagcctcgacgtttagctgcgcgctctgtcgcagagcgaattgctcatgaattaaacacaacattaggtgagtctgtcggttataaagttcgttttagtgatcatgttggtgataacacgctggttaagttaatgactgacgggattttattagctgaactacaacaagataagctgttattacaatatgatactattattatcgatgaagcccatgagcgtagcttaaatattgactttattcttggttatttaaagcagcttttgcccaaacgcccagatttaaaagtgattattacttctgccactatcgatcctgagcgtttttctaagcattttaatcaagctcctattattgaggtatctggccgaacttatccggtcgaagtgcgctatcgtcctattggtggtgacgctttggatagtgataaggatatgactgagggcattattgatgcgattgacgagttaagtcgagaaagtgcgggtgatattcttatttttatgagcggtgagcgtgagataagggataccgcagaggcattaaataaattacaactgcgtcataccgaagttttacccctatttgctcgtctttctaatagtgagcaaaaccggatatttcagcctcataccggaagacgcatcatattagcaaccaatgttgccgaaacctctcttacggtaccgggcattaaatatgtgattgatacgggttatgcacgtattagtcgatatagttatcgaaccaaagttcagcgcttacccatagagcctatctctcaagcttctgcggatcagagaaaagggcgttgcggtcgtgtttctgatggtatttgtattcgtctttattctgaagatgattttatttcccgtgcgcaatttaccgatcctgaaatactaagaaccaatcttgcttcggttattttacaaatgacctcgataggattaggggatattagcggatttccttttgtacaagcgcccgataaacgcaatatacaagatggtgtacgcttattagaagagctgggtgccttacaagagggtactgataataaaggtgcttatcgtttgacgccgatggggaaacaattagctcagcttcctatcgatccaagattagcgagaatggttcttgaagcgcgcaaatatggtgcagttagagaattaatggtgatcacatcggcgctttctattcaagatcctcgtgaaagaccgatggataagcaacaagcatcagatgaaaaacatcgtcgtttccaagataaagattcagattttctttcgttactcaatttatgggactatttaaaaactcagcagaaagagttgagtcactctcagtttcggaaacactgtcgccaagagtttttaaactttatgcgagttagggaatggcaagatgtctatacgcaactacgccaagttgtgaaggaattaggttttccaattaatagccaaccggccgattttaaaagtattcatgtggctttattaagtgggctattatcacatatcggacataaagatagcgataaacaagagtttactggcgcgagaaatgcgcgttttgctatttatcccggctctgggttatttaaaaaaccgcccaaatgggccatggtggcagaattagtcgaaacatcacggttatgggggcgtattgctgcacgtattgaagcggaatggattgaacctatcgcgacccacttagttaaatatcactatagtgagcctcattggtcaaaagtacagggtgcggtaatggctaatgaaaaagtcaccttatatggtttacctattgtggcctcacgattagtaaattatggcaaaattgatccactattatgtcgagagttatttattcgccatgcgttggtagaaggcgattggcaaactcgacatgcttttttccgtgaaaatttaaaattacgtaccgaggttgaagagttagagcataaatcacgtcgtcgcgatattttggtagatgatgaaacgctgtttacattctacgatcaacgaataccacaagatgttatctctacccgccattttgataaatggtggaaaatagcgcaaaagaattcacctgatttgctgagctttgaaaaaagcatgcttatcaaagaagatgctaaacgtgttagtgcattagattatccaaattattggcatcaagctaatttaaaattacgcttaacctatcagtttgagccaggtacagcagcagatggtgtcactgtccatattccattaccgattttaaatcaggttaaagatgaaggttttgattggcaaattccgggtattcgtcatgaattagtcgttgccttaataaaatcattacctaaacctatacgtcgtaattttgttcctgcgcctaactacgcttcagcttttttagaacgagtggttacccctgaaggtgaattactcgataaattagaaaaagagctacgtagaatgaccggcgttacggtcgaacgtgatagttggcaacttgagcaagtggccgatcacttaaaaatgacttttcgagttgttggtgacaacaataaaacccttgcggaaggaaaagatcttaatcagttaaaagcacgtttaaaggacaaagttcaagaaacattatcagcggtagcagatgatggtattgagcagcaagatttacatatttggagttttggtgacttgccacaacgctacgaacaaaagcgtggtagctattcagttaaagcctatccggcattagtggatgaaaagaatagtgttggtatcaagctatttgaaacagaaacagagcaacaagcggcaatgtggcaggggataagacggttattactacttaatattccttcccccattaaatacttgcatgaaaaattgcctaataaagcaaaattaggtctttattttaatccttatggcaaggtgctagatctgattgatgactgtatcgcttgtggggttgataaactcattgcttcttatgggggattaatatggcaagaagagcaatatcaaaaactccaagattatgtccgtgctgaattaaacgatgttgttgtcgaaattgctaaacaagttgaatctattttaactcaggtatttgcgattaataaacgcttaaaagggcgggttgatattagtgttgcttttgcattgtctgatattaaagcacaacttaatcaattagttttccccggatttgtcacatcccatggttggaaacgtcttgcggatattcctcgctatctcagtgctattgaaaaacgtatggagaaattagcgattgatcctaaccgtgatagagcacaaatgagccgagttgaaaatgtcattttgcagtggcaacagtggttagctaagttaaccgagaagcaaaaacagcaagaagaggtacaaaatattcgttggatgatagaggaattaagagtgagtttatttgctcaacagataggaacgccttatcccatctctgataaacgcatcttacaagctattgagtctatctcattaagttaa

SEQ ID NO: 300389 - DNA, 921 bp, Proteus mirabilis
atgttaagtaaaaacggcgaagccccaactgcggtaacagtcgaggcttctaatttgccagaaactaacgaggtaactagcatgacaagtatatcaactattaatgtaccattccacggagataatctttatttagtcaattatgaagggcaaccatttgttgcaatgcaccctttcattgaaggtatgggtttagattggtcatcacaatatacaaagataaaacaaagatttagaacctgcgttgtgaatatcacaatgcagcttccatgtgataaccagcgacgtagtgtagtgtgcttggcgctaaaaaaattaactggctggcttcacactatcaacatcaataaagttagacctgagatccgagataaagtacaagcataccaagatagaagcgacgatgtactttacgaatactggactactggtgaagttaagaaaaaacacaaatcaactgttcaagaacgcaacccattaaagaatgctgttaatctattggttagcaagaaaggcatcatgtacccagaagcctattctcttgttcaccagaaattcaatgttagtagcattgaagaattaacagtagatcagataccagatgcggttgagtatattcacaagtttgtacttgaaggtgaatacattcctaaacaggaagaaaatatactttttgaaccaaatcaaaactcaatcaccgtaaccataccaaaagaaggaagatggttagtttcttataaaaatggaaagcaacaagtagttagcgttgatggtcataacgttgtcagtgttgaatacattcaaaaattacaacgtgactctaatgcgcttattgagttactgcaaaacttccgtctacgcacccaagttatgcaaggtgagaaaagcggagatattttaaacactccgttaattgcataa

SEQ ID NO: 300390 - DNA, 897 bp, Proteus mirabilis
atgcttcaagaaaatgtagttaaagatatcattgtttggatcgagcaaaacttagattcacgtttatcattagatattattgctgaaaaatcaggctataccaagtggcacttccagcgcttatttaaagcatatacaggaatatctttaggcaaatatgtcctagcacgccgtttatcttgtggcgcttatgcgttgaggatcactcgtagtagccttttagatatttctttaaaataccattttgattcgcaacaaacgttttgtcgtgcgtttaaaaaacaatttaatatcactccttctgaatacaggaaaaagcaaggttgggatattagtgaacttatctttccagcattagaaactgttgaacttaaagcaaaatatgaagtaatgaccttgccttctaaagagttgataggtatggctcatcaatacaataaaaatatttcagcatggaattatgataagaaaaaatttagaaaagaattctggaagaagtttttaaaagaaatacataccatccctacagaaatgtatgccacacatcgtgcttctgcaggctcgctagatgatacgacttatatttatacaacagcagtaagtaaagaacaattaacaagctctgctaatatttccactatgtctaaagtagaattacccaatgggaaatatttagttattacttttgagatggataatattttagattccctcaccgggtatgatgatatcatttatactgtctataccaaagtattaccaaagatgaatttgctacgtcgatctggtccagatattgagcgctataccttaaaacaatcggttagctatgataagttaatcggccatagtgagcagcatctacaagaaattagttactatattcctgttctttag

SEQ ID NO: 300391 - DNA, 924 bp, Proteus mirabilis
atgaaatatcattccttattaaaaaatttattttatgcaacattttccatcatggtgttaaattttagtggcgtcactatggcaaaaaataccataaatgatatttatgttattaatttatcctcaaataaagcagtttgtggtgtaaaaattaatgaaatgttagtaatggataataataaatttcgtgaaggtcattattccgccggtcaaaatatctctagtgtgcttgaaaatgggaaaaataccttaggtataattatgtttaatggatcggtttttactggtgaagaaaaacttacccctgatatgtggtgtgaagtcgaacttaagaaattatctgcaaacggcgataacaccttaatatcgggacttagattaaacggaagtagcgatgggaaaatggtggtctctgataaatatcaaaataacagtgagcatatctattttggtggtcccagtcgaaaaagtgaatttgatgttttagaagcaaaaaaccaatttaatatacaaggcctcccccaatggcaatgggaaaaagcaactcccgttactgaagacgatattcctaaaattcgtgctttttatggcgaactacgacaagcatttatcgataaaaatctagataaattaaaaactatggggaaaatatcctgggaagaaatggcctatgccgataatggctctcctgatatcttttggaaatcgcttaattttcaagaacgattagaacaaggatataaacccaatactattaattgggatgaatatacttttgttacttataacgacaatcgagtctttcgctatgaggttggttttagccgattatcccctattgaattaatcaactctgaaggaagaaattatttttataatccttacctttctattattgatgggaaagtgactattgtccgataa

SEQ ID NO: 300392 - DNA, 294 bp, Proteus mirabilis; identical to SEQ ID NO: 300107

SEQ ID NO: 300393 - DNA, 993 bp, Proteus mirabilis; identical to SEQ ID NO: 300108

SEQ ID NO: 300394 - DNA, 1014 bp, Proteus mirabilis; identical to SEQ ID NO: 300109

SEQ ID NO: 300395 - DNA, 660 bp, Proteus mirabilis
atggaaagctcaacacaattaatcttgatcctagctcttgccacattggctccttttattattgctgcaggaacttgttatttaaagttttctatcgttttagtcatgactcgtaatgcattaggtgtacagcaagttccttctaatatggtacttaatgctatcgctttaatgatggcgctttttgttatgacaccaattactaaaaacatttgttactatattattgaaaataaagtggatatgtcatctccagatgcgattgagtcattttcaaatgaggcgttaggcgattataaaaaatacctttatcattactcagatcctgatttattagctttttttgaacaagcgcaagagaatagaccaaatagtgatggtgataaagaaaacatagaaaattcactcttatcattattaccggcatatgcacttagtgagataaaatctgcttttattataggtttctatctttatttgccttttattgttattgacttagttgtctcatgcattttattagcattaggtatgatgatgatgagccctattacattatctgtacctttaaaacttattttatttatcgccatggatggttggggactgttatctaaaggactcattaatcaatatcttgatttgatggcggtgaactag

SEQ ID NO: 300396 - DNA, 681 bp, Proteus mirabilis
atggttaatgaattcttatcggcaaaaaagagttcagtatttcctattttcgtagataaaaaaataaatcaacaacggtatattaagttagtagaaaaaataattaaaaaagaacccgttaataatgataatgttgatttagttagcagtgcaactaagcaggaaaaacaggctcaaattcatcagaaagagaataacagcgcatacaaaaatattgagtctagtatggcaatgccgctaaataacgtatcaaaagttgatacaaaagaagagccggaaatttatcaagaaaatatcactgaaactaataaagttgttcctttttcttcgcaagttacaccaataaaaacggtaattgcattaccaaaagtagccaaaatggtttcacagctacctgcttggcaagtaatagataaaaaaatatctatgttgactctaccacccagcattacttatacatttacaaaatggaagagtcgttatcatcaggctaaaattcattttattgataaacaagttcagttaattgcctcctcaggacgcgtttatcaaacagcattagagaatttgaagcaatataatgggggattatccatagatctaactaatagccataaaaataaatcgtggtatatcaactctattaatgctatttatgaaagagaggatgaaaatgaatga

SEQ ID NO: 300397 - DNA, 462 bp, Proteus mirabilis; identical to SEQ ID NO: 300316

SEQ ID NO: 300398 - DNA, 444 bp, Proteus mirabilis; identical to SEQ ID NO: 300258

SEQ ID NO: 300399 - DNA, 756 bp, Proteus mirabilis
atgttaataaatgatataaaaataagtggcgataaaaatattttatcagggaatttattattcatgtgcattcctttaaatgatgaatatccaataagaatatacgatgataaaacgactaaaattataaagggaaaggcttttatttataattcaaaaaatgaaaatgttatttttcaatcagaaaatcagtcatggcgtattgaaaagagatcattttttatttgtgccagattattggcatttattgattatgctagagatttttcaaaaatgacagcagttggcactaattttgatattaatcaacaaattttttatataaaagaggggagtggaacattagaacatctgattattaatgaggcactgaaagatgaaagccaattagaacctctttttgtgacaataagacacagtgaaagttactggcttatattacatctgattagttatttggatgagaaaaaaagcaatattgcacaaataggtgaacgatatggtgtatcagggacacattttagacgactgtgtaaacgttatttaggtaattgtggtaaaagtcaattacgttcatggcgtgcggcgtcttctattttgacaacgctatcaacagatgaatcattgactcaaattgcagtcgataatggttttagttcagcatctcatttttctaatgaaattaagacattatttggtattacaccaactgaatttcggcgaattggccaatatctttatgaacataaaaaataa

SEQ ID NO: 300400 - DNA, 1395 bp, Proteus mirabilis
atgaaacgcttacaaaatgaactaactgcactgattaatcgaggcgtagataggcatttacgcctcgctgttacagggttaagccgcagtggtaaaacagcctttattacctctttagtcaatcaactcaccaatgtacatagtggggcgcgtttacctttattttctgcggcacgcaaccaacagttattaggggttaaacgtataccgcaacataacttaagtattccacgctttacttatgatgaagctatggagtcactttaccatacgcctcctagctggcctgttcccactaagggtgtcagtgaaatacgtttgcaattacgctatcgctctcatgagtctttaacgcgttttataaaagagacttcatcgctctatttagaaattgttgattatcccggtgaatggttacttgatttacctatgcttgagcaagactattttgaatggtctgagcagatgaatagagttaatcaacaacgaacggcacctgtgcaacagtggcagtcgttaataaaaaaatgtgatccctttgcccctgctgatgaaacgctgttagccgagatcgccgcagcttatactgaatacttattagcttgtaaaaaacagggactacattttattcaaccgggacgctttgttttaccgggggaattatccggtgcacctgttttacaatttttcccttgggctgacttaacgcaatacgatagtgctaaattaaaaaatgctgataaaaaaacgaatattggtatgttaaaaaagcgctatgaatattatggtcaacatattgtaaaaggattttatcgcgaccattttcaagggtttgacagacaaattgtcttagtcgattgcctacaacccctaaatcaaggtgcggatgtttttaatgatatgagacaagcgctcacacaattaatgcgcagctttcattatggcaaacgaaccttattaagacgtttattctccccctgtattgataaactgctatttgcagccactaaggctgaccatatcacgccagatcagcatgaaaatttagtctctttgttacagcaacttattcaagatgcgaaacagaatgctatttttgaaggaataagcattgattgtatggggcttgcttctattgctgcgacagaaagtggcattgtcgatcatcatggtgaaaaaatcccagccgtaaaaggctaccgactaacggataatcagccgctcgtttattttccaggagaagttcctaagagattgcctgaaaaggcattttggcaaaagcaaggatttagttttgaatctttccggcctcaacaaatatcgagagacagtgccgttccccatattcgtatggatagtgccttggagtttttattaggggataaactaaaatga

SEQ ID NO: 300401 - DNA, 687 bp, Proteus mirabilis; identical to SEQ ID NO: 300333

SEQ ID NO: 300402 - DNA, 321 bp, Proteus mirabilis; identical to SEQ ID NO: 300106

SEQ ID NO: 300403 - DNA, 210 bp, Proteus mirabilis; identical to SEQ ID NO: 297185

SEQ ID NO: 300404 - DNA, 225 bp, Proteus mirabilis
atgagtaatcagaatatcaaagaaattaaagatagtgatggtaacgtgaaatttagaatagcgaaaattggagtatttgacacatcaccaacaccatcaatagaagatttagtgaaaagaattgagtcactggaaaaacagctcgctgatatgcaaaaggcaacgagctgtgatttagatatactaagcacgcgaattactgcagtcgaaagctttagccgttag

SEQ ID NO: 300405 - DNA, 504 bp, Proteus mirabilis
atgcgtaaggcttccaatgcacaagctatagcggaggctacaaccactggcgcagcaattacaaatgctatggctccggcagcagcgacaaccagtattgccacgatgggctctgccgccacatggggtatggctgcaatggcaacagctattcccgctatgattgcgcttgctggtgctcgtaaaaatggtgggcccgtaaatgctggctctatgtatcgagtgggtgagggtggtaagcctgagatattcaaggcatctaacggtagtcagtacatgataccgggtgataatggtcgagttattagtaatcgacaaatgggtaaaggtggtaatggtgtcagcatgggtgatatgcactttacattccaagttcaagcgcctaatggcatcactcaaaaggaagcacaacagatacagcaaatggtgagaggtacggtttatgacgtacttggtaacgaaatgcgtagcggtggtgctttggaaaaagtaagaagttggtaa

SEQ ID NO: 300406 - DNA, 228 bp, Proteus mirabilis; identical to SEQ ID NO: 298035

SEQ ID NO: 300407 - DNA, 402 bp, Proteus mirabilis
atggatgagatcctcacatcagttaaacatgttgaaagctcaatgactgaaattttatctgcatcagaagaacaaacgcgaggcatttctcaagtctccttagccgtcactgaaatggataaagcgacacaacaaaatgccgcaatggtggagcaatcttctgctgtagcgagtttactaaccgaagaggcgggtgatcttgagcaaattgttgagcaatttaaaacagcggaaagtctattttcgaagaagagcacattaacaaaacccgttgagaaatcagcaaatattgggttatcgcccataaaagaaaatcaacaagactcaagaataaaagagccaaaaaaccataaccaatcaacattcaaagaagatgaagatgatgattggacaagtttttaa

SEQ ID NO: 300408 - DNA, 159 bp, Proteus mirabilis
atgggtgatatgaactttacattccaagttcaagcacctaatggcatcactcaaaaggaagcgcaacaaatacagcaaatggtgagaggtacggtttatgacgtacttggtaacgaaatgcgtagcggtggtgctttggaaaaagtaagaagttggtaa

SEQ ID NO: 300409 - DNA, 687 bp, Proteus mirabilis; identical to SEQ ID NO: 298352

SEQ ID NO: 300410 - DNA, 264 bp, Proteus mirabilis
gtggtgacaccgtttgtcgtgaagaatggacaggtggttattcatgaagccttaatggataaagcgtggatacagaaactagtagtactcaattattttaaatcatcgggatttgataaagggaatggctttttattggatgcaaaaaacaatattttccgctttacgggtggtaatggggcattaaatatcaccaataatcaattggtcgtcaaagatgagaaaaaacgccttgtgatgaaaatcggttatctagggaattga

SEQ ID NO: 300411 - DNA, 645 bp, Proteus mirabilis; identical to SEQ ID NO: 298421

SEQ ID NO: 300412 - DNA, 747 bp, Proteus mirabilis; identical to SEQ ID NO: 300259

SEQ ID NO: 300413 - DNA, 174 bp, Proteus mirabilis
atgagacaaagaataaatcatgaatttaatggctatgatgagcataaaaacatcatggaaaataggttgttacaagaaataaccccactgggttgtcagcgtttaaaggaagcattgaaagacgcaaaattaaggaaagcacatcgggataagttattaggagagcgaaaatga

SEQ ID NO: 300414 - DNA, 390 bp, Proteus mirabilis; identical to SEQ ID NO: 300080

SEQ ID NO: 300415 - DNA, 270 bp, Proteus mirabilis
atgcgtatggaaaaattaaccaatgtaacctatggaaccgcaggattaacggccttttttgccagtctttcgttatatgaatggggatttgttattggaatggcgttcagcatgcttctgggtttagccacttattttatgactcgtcgagagcaacgaaaacgtactcaattatttgaagagcttgttcgacatgttgacccacaaaacccaactgaaaccctaaaaaggcttgctgaattaatggtgaaagcgccaaaggatatttaa

SEQ ID NO: 300416 - DNA, 1074 bp, Proteus mirabilis; identical to SEQ ID NO: 295788

SEQ ID NO: 300417 - DNA, 216 bp, Proteus mirabilis
atgtgtactgtctattttactgtatatataaccagtaaaatgattttttatcaagcacagatggaaaatttttgtgttactggaagggggatttttgtgttacacgtaaaaacaacagaaaagcaaatcgcaacacaagatattaatttattgatttacaatgcatttaatatgattgatacacatatcgcagttgatgcatttcttcgtaattag

SEQ ID NO: 300418 - DNA, 738 bp, Proteus mirabilis
atgaatacttttgttataaatctcaaagatgacctgctaaaaagagattttatgcgtaaccaattggacaatataggaatatcctaccaatttatagaagcaatcgatggtagaattatgtcagataatactattaaacaattggcttacgattatcctgattgttatctaaccaagggggaaataggttgtgccctcagccacatggctatttataaaaagatgattgaggataatatagaaatagccctaattttagaagatgatgctttattaccatcaaatatatatagcaaactaatagatattaaaaacattgataaaagctcaaaacctaatgtttatattctcacaaaaacagaaagttatataaaaaacaaacaattaaataataatatttattatgcttatagtgtaagtggtacttatggttatgtaataaataaagctgctgcaaaatctttattatcaaaactaactccaattaaatatgaagcggatatgtggagcacattcaaacgtcaagggttaataaacctatactgccacataccacatcttattgataataatgataaagatagtagtaaatcgtctattcatcaagaacgtctaataagaaaaaataaacgtgaacattatcgacatctgttaaaaaagaaagaacctaattatcaatttaatagaattaaagatgttatattgagaaagttcttttataaaatagagcaatactaa

SEQ ID NO: 300419 - DNA, 384 bp, Proteus mirabilis
atgaacaaatcaactttattcacatccgctcataaaatagctaaagaaacagtttctatcgttggcgactaccgcattgcattcatgttagctctacgtggcttatatgacacagcagagtcaatagaatctaaattaattaaattaggttgtgcggtttgggaaaactacggtaaacgtcgcgtctatattaacaacgaacaattggaatctgttttcggattgagagttaacgcatataacacaggcaatatcagcaatgcgtttatgaatggtgagaaaatttctaactctcgcgcatataaactgttatcagtaaaaccttattttgactgtgtaactaactcatgggttcatcacgaagatttatcaccaatcatttaa

SEQ ID NO: 300420 - DNA, 498 bp, Proteus mirabilis
atgaccgatagagaaaaattaattcaagccggtagattaattttcggcacccagtggcaaacgccaatgtcaaaactgatgaatatgagcgacagaactatcagacgcattgttgctggaacaactagagcgccatcaacagctcgtattgttgaggcgttaaacgagcaacttaatagaactaaaatggctatctataatgtagaaaataacattatgaaaactgacaaccctgaattagatgtattagttaacgctgtaaataacgccgaatcactcactgcgctatgtaactcattaaatgaattagctgattatattcgtaactccgatgatgattatattcaaaaaattgaggacataatcaaaattgatgatctaaaaacatttggtaacaatgagccgtccgacacaagcgaaatattctcatgggacgatgaaaattacctgatgtacgataacaattggtacactgtgagtcgcagtgatgacgaataa

SEQ ID NO: 300421 - DNA, 477 bp, Proteus mirabilis
atgacgaataaacgcatcaacaatcgcgaggagctagcagaatatctagctcacgataaaattgaatgcctggagtgcgggaaacgtttttcatttctcgctaatcacatcactaaaattcatcacatgaccctgagtgattatagggataaatttaatatcccagccactacacctctagctggtgttgcctaccgccagaaacacagagaaaaattacagcgaattattgatgagggtaaaattgattactcccatttatccacagcaacagaattagcagttggatcagagcgctcacaacgtagagatttcgatttagcagaacaatcaaaacgagcatctaatatcgagcacaatttactacccgatggagctaaacgcgctgatggtagagatgcaattaaatcccgcgagtatcagcgctcatatagagccatgaaaaaacgtattagagaaaaattaaataaactttag

SEQ ID NO: 300422 - DNA, 438 bp, Proteus mirabilis
atgaatctaggcgaaacaatagtgtccgtgggcgttattttgatgatgagcgtcggtatgacttggcaagggaataggatagataaactgaaagcctcaaatagtgaactaaccgctcagttatcagaacaagttaaaatcaacgaaaaataccaagctcgcattaccaaattaaacgagcttgatacaaaacacacgacggaactcacaaatgcaaaagctgaaattgataggttgcgcgttagtgctgagcgtaatcctgacagggtgtacatcaaagccgagtgtacttccaccgccagcatggatgatgcaaccatcgcccgacctactgacaccgctatccgaaattattggttactcagagagcgaattgcacactcagagcaaatgatattagggctacaagattacattaggcaggagtgcgtaaactaa

SEQ ID NO: 300423 - DNA, 405 bp, Proteus mirabilis
atgactagaccagcacgcggggaaagaaacaacaaccctggtaatattcgacacggttcaaaatggcaaggactatcagcacagcaaacagataaagacttctgccaatttgtatcacctgagtacggtatacgggccatctataaattactgcagacataccaaaagaaatacgaactcaatactgtcgagtcgattatcgatcgatatgctccgccaaatgaaaacaacactgccggctacatcaatcgagcagctaaagatatcggcgttagcgtaaacgcgcctattaacgtttcatctaaaccggttgctattgcattagctacggcgattgttggtgttgagttgggttatcaaccgtattcacaaaaagtctttgaagatgcttggttgttgttatga

SEQ ID NO: 300424 - DNA, 357 bp, Proteus mirabilis
atgaaacgtatgccagaaaaattcgaatgggagcagattttacgctggttacaatcggtcctcccactcttaggtggatttactattgctacaacaattgcatacatcagagaaagacaggctggttctcaatggaagcgttctttaggtgaggctgttatgtgtggattgcttagtgttggaactattcggtttattgattggtggctatcacgtagtggtgatgctagttcgtgggcattattggcggaattctgtggtgttgtaattggatttttagggacaaagaaactatacgcgctttttgagggtgcggtcaaaatagtaaaggctaagtttggagttaaagatgactag

SEQ ID NO: 300425 - DNA, 246 bp, Proteus mirabilis
atgacaccttgtataaaaaacaaaattattaatttagcgagtcaatcagagattgctagacgcttaaacaccaaacctcaaaccgtgcatctatggtttaaaaacggtgttcctgctccaaaagttttaagcctatgtgaatgtttagattggcaagtgacacctcatgaaattgcaccagatatttatccaaatcagtttgatggacttcctaaatcatcaacagtattacaggtatcaaattaa

SEQ ID NO: 300426 - DNA, 693 bp, Proteus mirabilis
atgaaaaagaatccgaatgaagtatcagctacacgtataagccaaatactaaccgagcgaaactggtcccagtcagaattagctcgtaggcttggtattagccctcaatctgtgcaattttgggtaagcgggaaaacagcacctagaggtaataatttaaccgcattatctaagatatctggatatccagaacattggttttttatgagtgatgtttctactgaagaaatggataaacctattgtacgtaaaaatgattcttatcttgtggagttacttgatatagaagccagtgccggccctggtatcattaataaaagtgaatttattgaaacaattagagctattgaatatacatctgatgaagcactccgtttatttggcaacagacccagcgctaatataaaaatgatcactgttgttggtgatagtatgcaaaatactattgaaccaggagaccaaattttcatagatattcatatagattattttgatggtgatggcatttacgttttcatttttggtcaaacattgcacattaaaagactacaaatgataaaaaataaattaaccgttatctctgataaccccaactatcgagattgggatattggtcccgaagacgaagaacagttcttcatttttggtaaagtcctcctaagccaatctagaacatacaagcgttacgcttaa

SEQ ID NO: 300427 - DNA, 381 bp, Proteus mirabilis
atgaaatttgaagaattaccagaaagtgtacaacttattgcaacgactgcgttggctgatattttaaaaaatagtcatccaacaaaagagtctgcgattgaatttgctaactcagttaagtctgcttttattgaattatataacaaaaatgatattagcattcaagttggcggtattaccgaaaattcaacagaaactatcgaagatgttctggcaagcttcccatctgatgagttaagcgtatttcacattgtgaaaatggttaatgaagtcaacctaaaaatacgcaatgaattagctccatataacaatgataaaaacgatataaatgctacagcaagaaccatattaaaaacagctcttgcatcattagatagctag

SEQ ID NO: 300428 - DNA, 171 bp, Proteus mirabilis
atgtatggtttattccttttggtatgtagttcgatgatttgtcagttcgaaccctatggctacatttatcctgatgaacaaaattgtttaattgataaggaattactcgcgaccaaagggaaaattgcagaatgctatccagtggagggaattattcgggtaaaaagttga

SEQ ID NO: 300429 - DNA, 276 bp, Proteus mirabilis
atgaaaacagacgtatgcgtagaacgcaaaacaaaaaaagaaacgacaaatatcccagataacgttaaaagcaaagagtatgaagatgatgatatgttaactcctgaagaagtatgtgctttgattggtggcataacaaccaaaacattatgtgactggaataataatcatcgtcataaagaaatactcgcacctataaaatttacaagtaaagtagttagatacgagtataaaaatgtaaaagcttttattgaaaaatgtaagagcacttattaa

SEQ ID NO: 300430 - DNA, 1401 bp, Proteus mirabilis
atgtcaaatatagcaacacaaaagcaaaaaacaccagataatgatgaatatacagacgctcttagtcgttgggagtcatgtaagccaccttacacaagtacacacataagaatctgtgttactgctgtcaaaaccattttaaagcatatcaataaaccacgtcgctctaaatatgaaaaagagcactacttgcgtattgattttagtaaggcgggtaaggttaccatatacgcggaatatcctaaacacatggatataaaaggccagaaattaggggaatggccagaactatcattaccgatagcaagagagaaagcgaaagcattagctgaagaagggctaagagctgaatctgttcatcaactattagatctttatgaaaaagatttagcagggaaagtcgaacgctcaaagttaagtgaaaatagtttttatacttaccgttgcagagtaaaacaactgaagctgacgttcggatcgcgtgaagtttttagtgatgtgaaatactcacgattaatagaaatattggataattggatacaaacaaaatcaaataatcatgcattagagttatttgctgaaatgcgccgattttggaaatatgcatcacccatttattctaatggaagaaatattgcatcgagcattcctgatgattatgtgtcatcacgggtgcagaaacccatgccaacaaaacgatatactgatattgagtccattgccactttatggatgaacgttgcttcaagcacctctgtgcatcaaaaaaatgcagttagatatatgatcctcaccggagttagacccatcaatgttgtcaatttaaagtgggaatatgttgatttagataacttagaaataacttatccagctggtttaattggtatgcgcggtgcaatgaaaacgcaaaaagagtttagagtgccaattacaaaggcaatgaaaagcttacttgaggaacaattagcttggaaaaattccactgttaattgcaataaagaatatgttttcctacaaccaagagatccacaattagcgttttctaaacgttcattggataaactagttaaaacatatagccctgaaggggcagtaaagggtgtagtgcatgagggaacggtgaagggaaagtccggagcatttaatactatgtgccgtaagttttttaaaagtaatataattgcacaaatgcgtcaaaaaggcttttcacgttctgatactaaagaaattagcatgctatgtttacatcactctgataaaagtgaagatccaatggctgaacattatgacttttctgatgagatactgcaggaagagatagcgctaaagcgtcaagcatttgaggctcatgaaaatagtatcttgactcaagtagcgctattacgtcgtaaacttagttaa

SEQ ID NO: 300431 - DNA, 309 bp, Proteus mirabilis
atgctaaataaaaatgatagagataagctaattaaaaataataaatataagaatataaagtttaatgtaaaatgtaatattcaagttattttatttattgcattgatttcattaatttttatcaacagcgaaaacttacctctaaaatataaaattgcacttagcggtgggatggtatcttttatctatatatttagcgcataccattcatttggtagtctatatctagcaaacaaaataacatatgtatttataaaaataaaaataaaaaaactaattagcgattatttttacttcagagctagttaa

SEQ ID NO: 300432 - DNA, 2838 bp, Proteus mirabilis
atgtctcgattttttattaatcggccaatactttcgtgggtgatggctattgttattatgattgcaggaggattgtcgttaataaaacttcctgtgagtcaatatcctgaaattgcagctccagcgataatgatcaccgcagtttatcccggtgcatcggctgaaacagtgcaagacacggttgttcaagttattgagcaagagcttagcggattagatggcttccgttatttaagttcaaatagtaatacggatggtagctttgaagttatcgccacctttgaacaaggtacggatagtgatattgcgttgatgcaggtacaaaataaactgcaattagcaactcctaagttaccccttgaagtacaacgacaagggatgagggtagtgaaattccagattaactttatgcaagtggttgcccttgtagatgaatctggaaaattagatgcctttgatttaggtaattaccttgcctcacatatgaaagatcctatttctcgtattgatggtatgggggatattctgttattgggatcaccacgcgctatgcgtatttggcttgatccggataaactgactaattatcacctgatgccgcaagatattgccgcggctattcaagatgagaatgtacaggtgtctgccgggcagttagcgggcttaccggcattaaaaggtgttgagttaaacgcaaccattaccagctcatcacgtatggtatcagtagatgaattcaaccatattctattaaaagtgaatcttgatggctcacaagttctgttacaagatgtagcgaaagtcgaagtaggggcagataatttctctatttcaagcttatacaatggtaaaccgtctgcgggtatggctatgcgcttagcgcccggagctaatctacttgatgtgtctaaaaaagtaaaagaggttgtggaagctcagtcgcagtttttccctcaaggtgtaaaagcccttttcccttatgacacaacgccttctgtaaaatcgtccattagctctgtggtaagaacgattgtcgaagcttccatcttagtgttcttggttatgttcctgttcctacaaaatattcgggcaaccttggtgccaacattggctataccggttgttttattaggaacttttggtgtattagccgcattaggtttaactatcaacgtattaacgatgtatgccatggtgctcgcaatcggcttgctggtggatgatgccatcgttgtggttgaaaacgttgaacggatcatgcatgaacaggcgatttcggtaaaagaagcgactattctctcgatgacgcaaattcaaggggcgttagtggggattggtcttgttttatcagcagtctttgtgccaatggcattttttggtggatcggctgggattatttatcgccagtttgcagcgactattgttgtcgcgatggcattatcagtgcttatcgcattaacatttacacccgcattatgcgcgtccatattgaaaaagccacaacctaaggtgaagaaacgtcgtggattcttctggctgttcaaccgtttctttgatagaggaactaactattacgagaagggggtacgcaatatcttgtaccgtcgaggccgttatatgtttattttcctcattattaccgttggaacagggtggttatttacgcaattacctaaagccttcttaccaaatgaagaccaaggggttgtgatgattgaagtccgtatgccagcaaatagtactgctgagcgtatggaacaaaccatggcagaatttagggattatttactgaccgaagaaaaacatctggttaaaacagtatttactgttaatggctttaactttgcaggtcgtggtcaaaatgcgggtatggcatttgttaacttggctgattggtcagagcgtaaaggaaaaggagaagatgttttctcattagtggcacgagcacagcaacactttaactctatccgtgatggtatggttattgcgttcccaccacctgctattatggagatggggaatgcgatgggatttgatttctacttacaagataatgcgggtttaggccatactgaattggttaaagctcgtgataaattcctcgaattagcagcacaaagtccagtattaactaatgttcgcccgaacggtaaaaacgatgaacctcaattacgtgttgtgattgataaagagcgtgcaagagcattacaactgcgtttatctgatattaacgatacattatctgccgcatggggctcgatgtatgtaaatgattttattgatgaaggtcgtgttaaacgtgtttatcttcaaggggaagcctcagcgcgtatgttgccaaccgatctggataaatggcatgttcgtaatcagcgcggtgaaatgatcccattcaatgcctttgcaacaacacaatggtatatggggccaccgaaattagaacgttttaatgggctatcagcgattgagatcttaggtgaaccagcgccaggttacagtacaggtgatgcgatgctggcaattgcagatattatgaaacaattgccatctgaaattagcctaagctacagcggtctgtcttatgaagaaattcaaacacaagaccaagcacctgcattatatgtgatgacaattctgtttgttttcttaagtttagcggcactttatgaaagttggtcagtacctttctctgtcgctttagtggtgccatttggtattttaggggctgttatcgcgacactgttacgaggtttatcctcagatgtctatttccaaataggtttgatgaccaccattggcctatcagcgaaaaatgccatcttaattgttgagttttaa

SEQ ID NO: 300433 - DNA, 429 bp, Proteus mirabilis
atgtctgaatggacaggcgaattatatggattttatacgaacaaaccaacggaaagtattttttctttttttttaaatgagatccttaaaataaattatctatacgaatataattcatacaacaacgaagaatctttattttttataaatgataaaaacatgttacttcatcatgaagatatttgctataacctcgatattgacaataaaggatatttttgcatagaagctaagatagttaatttacatggaatagctaaattatttgaatttaaatctgaatcaaattttggaccatatgatataaatatacagttagatgatattttctattatgttttagttttacctgacttcattgaaaactctcaattttgttcggatatacatagtctttttgtaaataatctcgaaagaatacgcttataa

SEQ ID NO: 300434 - DNA, 945 bp, Proteus mirabilis
atgggaggatttgaacgtttaagaataagctctcaaagtttgaaacgtcattggcggacatcagagttatttaatattgccctttctggtaatattggtattcgtactaaaaaatttggtttacagctttacgatgcattaattgaaggtggggtttctgaaaaaaatgccaaaaattgggttgggttaattatagaacaatatggaaaaataaagaaagattctattgaaacagaacaacttgttcatattagccatttagagaaatctttggcatttgatttaattaatttacttataaaagagcaaagagagccaacaaagcaagaattagagagtttaaaaacaataaatacctcagtagatattgcgttgtttggtagaatgttagcttcagcaccgaaatataatattgaagctgcttgccaagttgctcatgctattagtgttcatagtactgttattgaagatgattattttacggctgtcgatgatttaaataatggtgaaacagatactggctcagcacatattggtgaagcaggatttgctgctgctcttttttatagttatatctgtattaataaaacgcaattaattgagtctttagacggtaatgaagagctggcaaataaagcaatccaagcattaactgaagttgcgattaaagtttctccaacaggtaaacaaaatagctttgcttctcgtgcttatgctagctatgttttggcagaaaaaggaagttatcagccacgctctttatctgttgcatttctaaaaccaattgatgatgaagatatggaaaatgcggctattaatgcattaaagtttagaatggagaattttgacaaagtttatggtacttgtgcagagtctcgctatcaacttaatgcagtacaaggggaaggttccctttctggattattacaatttgttgcagagtaa

SEQ ID NO: 300435 - DNA, 1089 bp, Proteus mirabilis
atgagtcagaaacgttttagtacaattcgacgtctaaataggcaaaaaaattactttttaaaaaaagtaaaatttgccattgcaaaattttttattgatcctatttcacgtaagcctttcgctttgaaaaagcagcctaaagtcctttttttgcgtgatgatgacaagattggcgatatggttgtttcgacatcaatcttaagagaactaaagaatagtggatataatatagatatagtaactgggaaaagtaatttctgtgttattgaatactctgacttatacaatgatcactatacatatgaagagaaattattttctataataaaattagctttaacgttaagaaagaataactatgatcttataatagatatgggagaattaatatctataccatatttgatgtttataagattgattaatgctaggaatgttgtaggttttaataaaaataatattaaatcttataatttaaatattaattataatgagtatacatcgcatgttattgaaagatataaaaaaatgcttgatactcttaatgtgccttttggtgatcttaaatatgagattaacatacctgaaatagtagaaaatcgtatagtagattttattaataatttaccttataaaaaaaatgtagtaataaatcctttttctgcatcagaaaaaagagatatttcaaaagagcagttattgtttataatttcttttttaaaaaagtattctgtaaatattatatttattggacgtcaagatgatttagttaatcttcagatcgatagttttttaagtaatcctattggagattttattagtgcgtcagcaataataaaacatgctgatttaattataacaccagatacatctattgtgcatgttgctactgcttttgataaacctacgctcgctttatatggaaatgattatcatggtaagtatgtaaataattttatgtggtcacctaataataaaaaagcaattcagataacacagaagaaagtagatagtaaagtgagtgatatatcaatagacctaattaaatctaaattagattttcttgtggataaatatttatgtcaataa

SEQ ID NO: 300436 - DNA, 1077 bp, Proteus mirabilis
atgaagttaaagaaattaaaatgggtgcactattttctaaatctctataacccactctttggtaagatgaaaaaaacggcaacattttcatctgatatcaaatttaacagtattgttattttttcaaccacggcgctgggggattttatgtttaataccccagccatcagagcaattcgtgcacattatcctgatgcacatatcacactggtttctagtgtaaaaaataagctattagtggaaaactatgagcaaatagatagtgtggtgtattgggataataagatcagaaacttgttaccggtggctttacaagctaaaaagtataaacctgagttagcgattattttacattcccaccttccttatgacgtattatttgccgtgatggcaggttgccaatatattttacgtaatacatcagatattattcctaaatggtttcaaaaatggattattgctgatcataatccagctggaggtcatgttattcaaagtaaacttgatattattggttatttaggaattgatagtactgatactagaatggagctcccttgtaaaatagaatcattagctcaaagtaaaaatagcattgttggttttcagatgggagcatcaacacaagagcgtagatggcctgttgtatcttttgtggaattagcgaaaaaattaattgatagtgcgccatcattacaaataaagctaataggttcatcgagagagttggaattgccagaagagttttttgctttattacctgaaagatatcatcaaaatatagaaaatctggtaggaaaaacctcactacctgatctgttaagtcaaataaaaaccatggcggtattagttacgggagacaccggcccgctacatttggcaatagcattacaagtacctacggtaagtttatttgtaaccgcaaatccaaattggacaggaccttatcaagatctcgatattcatactattatccataagatcccgcaacaagatgaaaatagagcactttcgatggatttgattactgttgatgaggttctaactgcagtaaataacaccctaaaagataaataa

SEQ ID NO: 300437 - DNA, 1146 bp, Proteus mirabilis
atgaaatttttagtcgtaggctgtgggttaacaggggctgtaattagtcgccatctagctgatgctggtcattgcatcacgataatagaccaaagatcacatattgctggtaattgccatacagaacgagatagaaataccggtattatggaacatgtttatggtccacatatcttccacactagcgatgaagtggtatgggaatatatcaataaacatggtgaaatgatcccttatgtaaatagagtaaaaacaacttatcaaaatcaagtatattctttacctattaacctacatacaataaatcaattctaccaaaaagcgctaaatccagaacaagcaaaaacttttttaagtactatcacagataaatctattactgatcctaaaaactttgaggaacaagccctaaaatttattggaaaagatttatatgaagccttttttaaaggctatacagtaaaacaatggggttgcgaccctaaaaatctacctgcgagtattttaaaacgcctccctgtaagatttacttatgatgacaattattattctcataaataccaaggaatgcctaaacatggctataccgatatagttcgttctatccttgatcataaaaatatacaagtaataacaaataaaaagtatgaccatagcgaaagcaaagaatatgaccatattatatggactggaaaaatagatgaatggtttggctattgcgaaggtagattaaactatcgaacgctagattttataaaacatgaaactataggtgactatcaaggtacagctgttatgaattacggcgatatcgcggtaccttatactcgcatacatgaacataaacacttctcaccatgggaatctcatgacaaaacgatttatattgaagaacatagtcgggtatgcgaagagaatgatattccttactatcccattcatttagaagaagaaaataaaatattaaacaaatacttagaattggctcaaaaagaaaaatatatcacttttgcaggtaggctaggtacatatagatatatggatatggatgtatcaattaaagaagcacttatgcttgcagaaaacttagtatcagatttaataaatcaaaatgaacttaagtcgttctaccacaaacaccattaa

SEQ ID NO: 300438 - DNA, 759 bp, Proteus mirabilis
atgtcaaaatttttagcagtaattagatgtggagataattcacttcataaaaactgggttaatgataatgcccaatttgatgtaattcttagttattttggtgaaaatatcccttattctttagataatataaaatatgtacaccactttaaaggatcaaaatgggaaggattatacgatttattccataaccatccagagttatgggctgattatgattatatctggttgcctgatgatgacttagacagtaccgtagaaaatatcaacttattttttgaattaatgcaaaagtatcgattcgatctttgccaaccagcattaacgaataatagttactattcctataaagacttactacaagaaccggatttaatatatagagaaactaattttgtagaagtaatggcgccctgcttttcaaagaaaatcatttctaaagcatatcaaacatttaatgaaaataaatcagggtggggattagatttttattggcctattttatttaaagaagaaaatattaaagttggtgttatagactctacaccaatacatcatacacgaccagtagggatagcaggccatgggagtagtgataaaaccttatcgcctttaaatgaacttcatcaattattagacaagtattcacttgaaatacctacgtttgtagcaacttcacttctaacccaaaaagggaaaatgatacaaaaaggcagtttcagctattctttaagagagtttatgaaaaaaagaaaataa

SEQ ID NO: 300439 - DNA, 135 bp, Proteus mirabilis
atgcaaatttcagttactcctataggtgctgttattaataataatatacagattaatatttttcttataatttctatctttaaaaaagaacccggatatccttttatttgtaaagtatgggtgtttattgaatag

SEQ ID NO: 300440 - DNA, 696 bp, Proteus mirabilis
atgtatacatttcaggatacaattaattataacaaaagaatttatgactcatataatgaacaaggcaaaagccttccaaaatatttagataaatatgttccatactttaacaaagggaaaataagtatatgggcctatattaaggcatattataccggtgagcttagccgtaatagccaagcagaaatatttttaataattggctggctaatttttttccccggttttttatggctatttggctatctctctttctttacgcctcctgtatatcttactgctgataggcaaagaggaatactgtatagctatggcatgggaaaagtgcgtttaacccgctataaagaggcgcaatttggttatgcgggcaacatgttggcaattaaactatatggcattaatgaaaaaacaggccaactaaaaacgatcctctatcgccccaatgtgtcccactactccagtttcctaaccagtaccgacagtgaaaaccaccgttttatcactttccttaatgcctatatgcaacaaggccgagatgccgtttcgcctgttgattaccaagcccgtaagccctttttatcttttggcaaaaacccacttcctgccgattttgagcaacaggtcgaacagattctggcaaagcttgatcaggagaaaaaaaacatgcgtaaaattgataaggaaggtacggaatga

SEQ ID NO: 300441 - DNA, 732 bp, Proteus mirabilis
atgaaaaaagtattactcagtcttgctatgctgagtataatatcaacgccagtattggctaaaacgcctgctgctaacttaaaaatcaatggtgatattaagccaccaacttgtactattaatggtggcaatgttgatttagtctacaatctagggaatatttcaccgtccgtgatacctaacgatatgacctataatcaacttccatctatttcgaatacactgacagtgacatgtgacacatcaacttttttaacttttagagcaactgacggctatcctaatccctttatccaaactcccgatatgaatatcaattttagagcacacgcttttaatttagtggatagtgccgatacatctaaaaccgtaggtggaattacataccggtggaaagatgtaacagttgatggaaaagatgcttatctttcacgagctaatgatggtgataacggttatgataatggtaattggtcttatgagaacgaaatagtaaaaggtgctaccgttggatggacagcagaacagcaaaaatatgtcccgctcgataagcttaacttattgtctggaaagacttttaaagctacattctataatgaaaataaaataacatataatgttgcgcaaacttatttgcacccaaaaaaaatgttaacggaagatggcattgatcttacaatgggtcttgattatacaggccaagtgatcctcacttttaactttggtgtctaa

SEQ ID NO: 300442 - DNA, 1329 bp, Proteus mirabilis
ttggctcgtgaacaaggggatgctgataccctcaaaaatgccaatcagtataccgacaataaagtaacggcaagtaatagccgtacggacgatttaatcagtaaagagcagaaagcgcgtaccgatgcgctgaatgcagagaaattggctcgtgaacaaggggatgctgataccctcaaaaatgccaatcagtataccgacaataaagtaacggcaagtaatagccgtacggacgatttaatcagtaaagagcagaaagcgcgtaccgatgcgctgaatgcagagaaattggctcgtgaacaaggggatgctgataccctcaaaaatgccaatcagtataccgacaataaagtaacggcaagtaatagccgtacggacggtttaatcagtaaagagcagaaagcgcgtaccgatgcgctgaatgcagagaaattggctcgtgaacagggagataaagacacgctgaataatgctaataaatatacgaactttaaaattcaggaaaacaacgaattgttatcagcggatattgatcaagccagaaatgactttgataacaatttaaaaacaaccaaatcgacactcgaaaataatattttcgatgttaatcagtcattaacaaataatgttaatcggacgaaaaaagatctctctgataatcttgataaaacccgtagtgacctaagtgctaatattattgccagccaaaatgacagtaataaccgtactgataagttaatcaatcaagagcagaaagcgcgtaccgatgcgctgaatgcagagaaattggctcgtaaacaaggggatgctgataccctcaaaaatgccaatcagtataccgacaataaagtgacggcaagtaatagccgtacggacggtttgatcagccaagagcaacaggcgcgtaatgatgcgttggctactgaaaaaagtgcccgtgaacaaggggataaagatacactaaatagtgccaatcattacaccgatcaccgtataggctcattaggttcaaatgtttccaatgcgttaaatgattttcaacaaaaaactcagcaacaatttaatcaggttaataaacaaattaatacgttgaataaaaaagtagatcgtggtttagcttcaagctctgctattgctggattattccagccttacggtgttgggaaatttaattttacagcaggtattggtacatatgggggagaatctgcgatagctgttggtacaggttatcgtttcaatgagaatgtggcgataaaagcaggtgtttcgtcaccctctggtgatatgaaaattatgactaatacttctattaaccttgaatggtga

SEQ ID NO: 300443 - DNA, 621 bp, Proteus mirabilis
atgctcaaagccgccgttttaactgcgctattttctcaatgtgcgccgaatgttagcccgataacattacatgctttagtcggggttgaatcagcaggtaagccttatgttgtggcaaacgttacagataaaacaagtcattcttttgacaaaaaagaagatgcgattaatttcgtaaatagtcttgctgaaaagaataaaacgtatagtgcgggtttaatgcaaatttatagcaaaaactttgatgcttataatctgactaatgaaaccgtattcgatcactgtaccaatattaaagtgggtgcagatatttttagccaatgctatgaaagagcattaaaagaaaatcctagtgacaaacaaggcgcattaagaaaagcggctagttgttactattctggaaatatgacaagggggtttgaaaaagaaagttgggatgggaaaagttacgtccaacgtatcgagttaaaagcagaaaaaaattattcagttcctgaaattcaaattaatcaaaattattcacctgcggtaaaagaacaggaaaaatctgtaccgcaagaagccgttttaattcaacaaaaaacaaataaacatcaatgggatgttttcggagattattaa

SEQ ID NO: 300444 - DNA, 339 bp, Proteus mirabilis
atgaaaaatatttatttcatgggtcgtgtcattaataaagatactgttattaatttatttatatttgcttttattttctttgtttttgctttttctaatcctgcgttagcatcaggaggattaggtaatttaaacaaagctacagatgcgttacaaagtcttgcagactggttgtatatttttgttggtgtgggggctgttgtttatattatttatttagttgggatggcattgtttgaaaagaaacagtggagtgatgttggtatgggcttaggctactgtgccattgcgggcggtattgtgatgggtgctgactgggcgattgatttatttaaataa

SEQ ID NO: 300445 - DNA, 315 bp, Proteus mirabilis
atgagcgactatcaggaaaatgaagaactaaaagacgtttacttaacgtataacggacttaatcgtccagcgttagctatggggattccaattttattaatgctgacattagcgggtatagcattgttcaccgcattggttggtatgaatttttttggagtcgttgggttgattcctgcagggatctgttttttgattgggttacttgttcgtagtttgactgaaagcgatccaaatgctttaaaagttatttcttttaaatttaaaggtgttgctttaaaactaggtagtcctattttacgtgtgaaagggtaa

SEQ ID NO: 300446 - DNA, 2439 bp, Proteus mirabilis
atgaacgtaaaaacaatcgaagcagaaaaatttattccgaattatagttttcatgttgatgaaaatatgatttatcttgagtcgggtaaattaatagcccctttatttattgaggggtttccatttgaatctattagtgataatgaaattgttaacaaatttaataatttttctgactatcttatgggactaggtaagcagggaaatctattagtctggtcacatatcgttaaacgtaaaatgacagtagataatatttatcactatgaaaacagtccttttttacaagggttttctgataaatatattgaatctcttttacaaggagatttctttagaactgattatattttgacaatcggtatttctgtaaaacctgaccaaaacgcaatttatgacggcgtagaacgtttaaatgaaattattcaacaaacaaaagcggtcttgaaagggatgcaagttatcccttatggcgtaaaatccccctttatgagtgaaattgcaggggattatctttcttttcttgtcaatcatgaatctatgtcaattccactttccgactccaaaataaaaaacacgattactaatagtgatattttctttgggtttgatgttgctgaaattagaccgcgagaatcaaatgggagtatatattgtactaattacgtggttaaagattttcctcgaggtacgtcaattggacaatgggattttttacttaaattaccgtatgagtttattctgactcagtcttttattgccgaagctcccacaaaaagcattaaaaagattgatagtcaattaaaccaattaaattcagcaggggatgcaggggtaactcaacaagaagaactgattttagggcaggagggagtaacatcaggttcaacccttttcggttcttatcacgctgtgttaagcatctttggtcaatcagttaatgaagcaaaagaaaacggaattaaagtcacttccgaatttttgacgagtggtaaaggttttcgttttattaaatcgactaatgaagcacctttgacctatttttctcatttacctatgagcgaatatcgcccgttggcaacaaaaagaaccagtaacaatttggcgtgtttgttttctttacataattttagttatggaaaaaaaacggggaatccaattggtgatggtacagcaatcatgcccttgaaaagcatctctgatacattgtattttttcaatactcattttagcgatatcaataaagatgtgcggggtcaaaaaatcgctggtcatgcgttgatattaggtgctactggcgcaggtaaaacgacatttgaaggcgcggctgccgcttttttgcaacgttttgatcctgatttatttgttattgattataaccgttctacagaattgtttgtacgggcgtttgggggaagttatttttccttacaagaaggcgtttggtctggtcttaacccatttcaaattggggatgctgatgatgttgaacttgtatcatttttaaaacgttgggttaaacgtggtgcggtgaatagtgatggatcagtgtgttctgataatgaagccattatgatcgataacgcagttatggccgtgatggggctttcacgagaacttagacgttttggtgcattacttcaaagtattccagaccaggatttagcattgcgtttaaggaaatggacggaattaggggaatatggttgggcaactgacagcgaaactaatacgtttaatcctactgattaccgtaaagtcggttttgatactacagtgattttagaaagtgtgggaggtaatgatcaccctgcttgtgaaatgattttaagtgtcctgtttttctacaaaagccgtatgcaaaaaaatggcgggttaatgctaactatcgtagaagaattttggaaacctgctaactttccaatgacacaagaaatgattaaagatgttttaaaagcagggcgtatgaaaggggaaatgatgtggttaaccagtcaaagccccgaagatgcggttaactgtgctattttttcggcgattgttcagcaaaccagtacgaaaatctgtttgcctaaccctgatgctcaatggtcgggttatcaaagtataggtttaaccgccaaagaatttgatttgttggtgaagttagatcgtgaatcgcgcacgatgttaattaagcaatcgaatagctctgtttttgctaaattagacctgtacggttttgatgattatctgcctattatttcagggagcaaaagcggaataaaattgtgtgaaattatccgtcacgattatggtgataaccctaatgattggatacctgtttttatacaatgcgaacatattcgcaaaagtattattaaatcggggcgttcttctgagccgtcacctgatttaatttttcatgaatttaaacaaaatcatgaggtcgttttatga

SEQ ID NO: 300447 - DNA, 690 bp, Proteus mirabilis
atgaaaaaacattttattgctgtaacgctggctacctcttttattttctctcctgtgagttttgcaggggggattcccgttattgatggggcaagtattgctgaatctataaaaatggttcaagaagcccaaaagcaattaaaggaattgcaagatcaagttaaaacggcaaaaactcaactagaggactttagaaaagaagcagaagaaactaaaaaacgtttagaaggctacacaaactttgataatatttttgattcttcaacagagtttttaaaagaaacattgaaagactatgaaaaagaattatcaagaacagaaattgatgattatttaaaatcaaagggtattgatgtaaaagaagattcggaattaaaagcccaatacgaacgtaagattgaacaaatcaagagaaatgaaaggactcaagaacgtttaactgaacaatcaaaacggatggatagattgcaacgtgagtttgaaagagcaacaactccgcaaaaaagagaagaaattttaaacacgattcaacttgaaaacctgaaaatgcaaaatacgatgaaagccgttgagcttgaaatcagaaagcaagaacaggaaaatgaaattattgaaagcgaagcattaaaggcatctgttagtaaagaatttgaaaaacctaaaattactggttatttcaatattaattaa

SEQ ID NO: 300448 - DNA, 1005 bp, Proteus mirabilis
atggatatagctgagggtatatttaaatcaattgaaacggctataaatggaaaggttgtagaaaactttcaaattatttatggtatcatatttccaatttggactacgggagttattctttactatattgttcaagcatgggaaattatttacagtgataaacaactcattgttaatgagttcgtaaagcattttatggtattggcattagtcactgcttttttgggtgctaatagcgtatatattgataatgttgttcctgcggtaatgaatagcggtcaagaaatagcatctaaattagtttcagatggttctggtcagggaggaacttcaacgggtcaaatgattgaccaaatgatagaacaaattattgaaataggagaacgagaagaaaagatagcagaagatgcaagttggttcgataaggctggtgcaatgattctttttattgctaaaattcttatactagctattttttctggtgcatttgttctttatgcgactgcgtatttaattgttgctatggtgatggttggaattttgctttcattaggcggttttttcattgcttttgcggcttttcctgctactcggcaaatgtttaccgcttgggtgggaagttgtttcaactacatttttttaaatattggttatgcaattatgttttcaatattaattcaatatttaaaccaatttattgatgcaaactatacagaagaacaatcaggattgtgggtgattttgtcaatagcgttagttttttcaattggggtttttttaattcagcaagtcgctacgttaatgagtattttaacgggaggggttgggattaatggtttaactggagcaactaatacgtttatggggaaagcagctagtgcattagggataaaatcagcgggtagtgttttaggtcgaagtatgggcagtgctggccgtggtgttgcgaatgttgctaaatctggtttgaatgcggtaaaaggcggcgggcgaattaagccataa

SEQ ID NO: 300449 - DNA, 135 bp, Proteus mirabilis
atgaaaaaattattattggggttattttttgttttttctgtttcaggatgtacttcaactaatccgccagatgcaccagaagcaaaagggcaatggattgaaatgaccacaacattaacagatatgcaggggtaa

SEQ ID NO: 300450 - DNA, 759 bp, Proteus mirabilis
atgacggaaaaaacaaataattcaagctattttaatgattcaatcaaagaagtgacaaaaactcccgctgaaaaatcaagagagaaaaaacaaactcaacaagtttttgaagcggttaaaatgtttgaaacaaatattattgaaaataaaaaccaacgtattaaatggatgggacgtttagtcggttttttgggtgttgctgttgttgcattagcgattgcgattgcttgtttagccccgttaaaaagcgttgagccatttgttttacgtgttgatagtacaacgggttatgttgataaattagaaccatacaatgcggaaacagcgactgttgatgaatcagttattcgttatttcttagcgcgttttgttgaaaatcgagagggttatgattggtacactattcaatctatgtatgattttgtagaagccacatcagaccgtgcgatttttgaagcatataaaggctatatggtcaatgaagaattaagtccgttaaaacgattaacgaaccgtaataaaatccaagtgaaagttaatggaataacatttttaaatgatagtaccgctcaaattcgttttactaagatgatcagtgaattggacggtaaacctgccgtgggttataaaccgtcaaaatggattgccacagtgacctttgacttgagtaaaaaaatcaatactgagcaagaacgtttaataaatccattgggtttatcagtaacgtcttaccgtgtcgatgctgaggtgattaaataa

SEQ ID NO: 300451 - DNA, 795 bp, Proteus mirabilis
atgaaaatgaaaactgcattatctatcgttgttttattaggggtatcttcacaagcgttttcagcggcaatacctcgttctagcggagcagatccccgtgttcaagaaattctttataatccgaacaatgttacggtggttaaagtcaaagagggcgttgcaacgttaattcaacttgaagaagatgaatttatcgatggggatagttctgcaacagggatgggcttaggtgatccaatggcatggaatgtttcggtgcgggggaataatatttttttacgcccaatcgcagagcaacctgatacaaatattgcccttgtgactaataaacgcacttacgctatccagttagcaagtagtaataatagtgaacctacatatttattacgttatacctatccgaaaaaaccagaacccgttaaacaaacggttttcttaggaaaaccaaaaattgatattccttgctttgatggggggaaagtcaatgtaaattatcaaattcgtggcgatatgacattaaaaccatcaggtatttgggataacggcgaatttacgtgtttaaaatggaataacgcaacggatttaccggttgtttatcgtgtgttacctgatggtaaagagcatttggttaattatcacatggaaaaaaatgtgatggttgttcatgaagtttctccgcaatttgttttacgtttgggtcaaaatgtaatgaatgtaaaaaccaatcacactatccaacgaggttataactataacggtacaaccacaggcgaaaaattagtggagcgtaaataa

SEQ ID NO: 300452 - DNA, 1221 bp, Proteus mirabilis
atgggattatttaaccgcaataaaaatagaccaattgaaaaaaacgaaaaaccgttagaggaaaaagaagcgattttagatggtgatcgcggtctttataatgtacaaggaaaaaacaaaaaaggcacaaaaaagtttattcttctttttatcgtgattgcaattggtttattgattttacttggcgggggaatggcttttttaaaagtgaaaaaaccgcccgaagtaacgcaggtttcactttcagataaagagcaatattcaagggaaaatgttggtagtaatgctctcgctcaaacaaaaggaaaagttgaaaaatcattgaatcaaatgataaatgatatttcaacagaaaatgaagataagacagataaggcagatagtggatctgaaacaccacctcccaaaaccaatgctattgaaattgagcctgatgttaatgataatcgcggaaactcaagtcgtaaagataatgttttaacaccacaagaacgccgcctacaaggggacgtgttagttgctcaaaattttatttctaaaccagaaagaaaggaaagtgatttaaatcaacccgtcgataagcgtcatgtaaataaaagtgaaagcgattttttaaaaggagcgagcttcgcagatggaaatgtaggttttatacgagatcgggaatacttattgtcggcgggtacttcaatgccgtgtgttctgaaaaccaaaatagtgacctcttatcctgcggtggttatgtgtcaattaaccaaaaatgtgtattccgatgatggtaaaagtgttctattacgtgctggcgcattgttgcaaggtgaacaaacgcgagtattgcaacagggcattgcccgtgtattcgtaaactggtcaactgttaaagacggaaatatccgtgttcgtatcgatgcgttgggcgcggatggcttaggggcatcgggattaccggcttgggttgataaccacttttgggaacgtttcggtggtgcagttatgctgtcatttattgatgatgcgttggcagcagcagctagtcatgcgagtaaaggaaacagtagtgtgacggtcgataatactcgtgatacggcaggaaatatggctgagttagcattagaaaattcaattaatattcctcctactgcttatgttaatcagggtgaaatgttaactgttattgttcctcgtaatgttgatttttcatctgtttataaagtggaataa

SEQ ID NO: 300453 - DNA, 1032 bp, Proteus mirabilis
gtggtcaatagtaaacaaaaggattctacggtcattagttatcttcaaaaaacgggcattcagcagtatctcgataaaaaaggagtttcagaaattattattaaccaacctaatgaaattattttagagggtgaaaatggttgggaatattttgaagaagaaggagccacgttaactaatttaatgatgttagcaacggctttatcaacgtataataatgcgggcgttattgatagtaaaaatccaattaaatctttagtcttgccgaatggtgaacgatcacagattattattcctcctgcgtgtatggatggaatgttttcaatgacgattcgtaaaccatctttaactcgttttaaattaagtgattacgtcaaatcagggcgatttgctaaggctaaacaagctaaacgcgccacaggtgatttaagtcctgaacaagaagaattatgggcgttatatcaacaagcattagataatcctaatctgtatgaaaattttttccgtaaaggcgttgaggctagatgtaattttcttattgtcggtggtacagggtcgggtaaaacaacgatagctaaagcgattgcggatgaatttcccaaagatagacgtattattacgattgaggacgttcacgaaatgcctttgccctatcatagaaaccgtgttcatttattttataaagcaggtggggttcaacctcgttatttgattgaatcggctatgcgtatgaagccggatcatatctttcttgctgaacttcgcggagatgaggcatggagttatattgaggcgttaaatactgggcatgagggaagtatcacgactattcatgcaaataatacatatgcgtcttttgctcgtcttgcctcgatagtgaaacaatcaacagtcggtttaacgctggatatggatttaatccaaaaaactattaaatcgagtatcgatattattctttttttcaataaaacttatatgacagaagtctactttgatccgtatgaaaaaatgaaaattctcgcgcaaatgtaa

SEQ ID NO: 300454 - DNA, 2013 bp, Proteus mirabilis
atgataaataaaaaaaagatagcaatttttttgattctgctctttttgatttcggtaggtgctagtttttatacttcaagtatggcacttttaaaaatggttggaatgccaattaattttgaaaccgtaaaatggaatacctttattgatacttataaaatttatacaggtcagaaagcgtatcaaaaatacttattcgctggaatagcgggggggatagctccttttgtattgtacttaggatttattattttaattattattggtttaaaacctaaaaaaacattacatggggatgctcgatttgctacagatatggatttagctaaatctggttttttccccgcaaaaaacaaacccaataaaaaagcatccacggcaattttaattggtaaaatggataaagggcgttataaagggcagtatattcaatatatgggacaacagtttttaatgttgtatgcgccaacccgaagcggtaaaggagtcgggattgtcattcctaactgcctttattattttgagtcgcttgttgttttagatattaaattggaaaactttatttctactgctgggcatagaaaagataaattaaatcaagaggtgtttttattttgtcctgatgggtatcttgatagtgaagatatgaaagacaaaaaattacgtagtcatcgctataatccgcttttttatattcgacgtgatccgattaatcgctttggtgatttaacaaagatttcctctattttatttcccttaacaggcgataaaaatgatatgtggactgatttatctgccaacgtttttaacgcgcttgtattatttttactcgatacagaaagtgaaacagttatagaagatgttgaaattgaaaaagatgatactgtgcattatgaagaacggattaaaccaaaatataaagttaccatgtctcaggtttttgggttatctgttcctaaagatggcacaacgttaggggattggtttactaaagaaattgccacacgtaatacaaaagaaaataaagacgcttgggaagcatatattgctagtgaaaaaaacggggataaatcagtaagtcgccctaaactttgtttgttatcggatgatactgttacgttaatgcgacaattttcacaacaaaagctagaacaacaacaaaatattatgttgacgtttaatgccaatatgaagatgtttgctaaccctgtaactgccgccgcaacggacggaaacgattttgatttgcgtgatgtaaggcgtaagcgtatgacggtgtattttgggttagcccctgctgcattaagtcagtatgctcgtttaacgaatttgttttttagtcagctattaaatgaaaatgtgagaacattacctgaacatgactcttcattaaaataccaatgtttaatgatgttagatgaatttacgtcaatgggttgtttagacattattcagaaatcactcgcctttacagcaggctataacatgcgttttgtctttattttgcaaaaccaagaacagttatttgatgaaaagaaagggtacggtaaaaatggaggaaataccattttgaaaaactgtgctgttgaattgttttatccacctaaggaggttgacgaatctgttaaaaaaatgagtgaaacactaggatataaagatatgaaagttatcagtaccagtgtaagcaaagggaaatcagcgtctaaatcaacaagtatcagtattcaaaaacgtgcattgatgttaccgcaagaaattatcgaattacgtgatgtaaaacattcatcaggaatggcattacgtgaaattgtgaaaagtgaatttacacgcccttttattgctaacaaaattgtttattttgcagaaccttattttagtgaacgtaaaaaatatgcggaaacgcatattccagatattcccgttctcaatattgaacaggatgaattagcaaaagcgttacatgaagttatgttgcgtgatgctaattatattgttgaacctgattttgattaa

SEQ ID NO: 300455 - DNA, 549 bp, Proteus mirabilis
atgaaaatgaaaaaaacgatttttcctttatttattattgccagtagtttttcttttgctactgttgcgagtgatgaattaaaaggtgatgcaggactcgcttgtgaagcgattttgtgtctatctgccaatgataaaccgtctgaatgtgctgattctatcaaaaaattttttagtattcatgatagaaaaccatggaaaacgattaaaaaacgtaaagagtttttagctctatgccctatatctgatagtcaaggaatgcctgaatatcaagatttaattgctaacaatgcagataaatgtagccctgaacaactaaataaagagctattacaacgggattggcgaggtcgttgttatggtagtggcaatgagcgagaatgtgaaggaacaacgtattttcgcattagtgatcagctaccaagttattgtaatgcctatttcaatcatgaatataatcaggcaaaacctaaatatatcgggtcaagtgagtgggtagaacaatctttatggcggcaaaatcaatcgcaatatggacattggaaataa

SEQ ID NO: 300456 - DNA, 408 bp, Proteus mirabilis
atgaaaaaaaataaatttataattagcttgattgaaaatgaaaaaatcctagggttttttaattcaacaaataaagaattaaataatattcttcaatctctttttgttaatgataaaagattgattaattatcaacttttgactaatataagaaaggggaaaactttcgaaaacggtttatatataaattcaagccaaaaccatagctatgattttatttacggttataaatcctatttagtgccgttagatgattcaaggtttcaacatcttatgttgaattatatcaagtgtgataagaacaatgaattatattgcattgatcatttttataaaattcaagctgatttttggtatttatatgaaaactctgatatagaaaagatcatcctatcgataccagaataa

SEQ ID NO: 300457 - DNA, 2157 bp, Proteus mirabilis
atgagagtttggattgctgaaaagcccgatattgcaaaagacattgttaaagcattaggcggtaaagcagatagaaaagacggttattttgattgcggtagtgacattgtaacgtggtgttttggtcatattcttgaaagtgctgaacccgaagtttataaccctgcatataaacaatggaatgcgtcagatttaccattaaaattatttcctttaaaacttgttcctaaagagagtgcaacaaaacaagttaaaataattttagatcttttaaaacagtcggagagtgctgtccatgcaggcgatcctgatgatgaaggtcagcttctggtcgatgaagttttgatttatgcaaattatcaaaaacccgttaaacgcgttttgttaaatgataacactgatatggcggtgaaacgtgccgttaataatttgaaagataacaaacaatttaaaggactttattttaaagcccttgcccgcagtgtaggtgatgatatttacggaaagtctatgacacgcgcttatacattagcggctcaagccaagggatatcgaggtgtcctgtctgtgggtcgagttcaaacgccaattctaggcttaatttgtaaacggtatttagataatacacagcacgttaaaggattctatcaagtaatcaaaggtgaatttaaaacttcattagggttgtttggtgcaaattggaaagtaagtgacaatgcccctcaagatgataaaaaacgcctgaacgatgaaagttatgctgatcggctatcaaaacatttaacaggtaaatcttttgatgtggtttcagcagcagtatgtgataaaaaagaatttgcgcctttaccatttaatttgctcaaattacagcaagctatgagcaaaacaaagaaattttcggctaagaaaacgttaaaaataacgcaagacttacgggaaaagcacaaagcgatcacgtataatcgttcggactgtcaatatttgtcggacgaacagtttaaagaagctcctgaacttctaaatgcgctgaaaaatgggttaagtcaattttctcaatatccaacggatgaacgtcaaaaaagtagggcgtttaatacggataatgtgactgcacatacagcaattattccgacaattaacgtgcctaatctatcaaaattgacagatgatgaaaaagccgtttatctgatgatagcagaacgctatattgcccaatttctcccgccaaagctctttaaagaggctctcgcgatcttaaaatttgatttagatacatttagttgtcgtgctaccgaagtgcaggaaaaaggctatactgctttttatcagagtcaatctgatgatgatcaagtagaaaatgataattccgataatggtagtgattatgctttaatctctaaactcaggactggtgaaagtgtggcttgtgagaaatgctattatgaaaataaagaaaccacaccgccaccattatttacagaatcttcattattgtctgcgctttccagaattgcagattttgttaccgatcccaaaattaaagcctcgctcaaagcgaaagatgcaggaaaaaaaggagagtttgggggaattggtacgcccgctacacgagatagttttgtaccaatactgattaatcgtggttttattacaatcgaaaaacaaaaacttatcccaactcaagcagggctggatttttatcattcgttacctaaagatgtgacacaacctgatttgacggcgttatgggctgaaaaacagcaggaaattgaaaatggggatttggatattgatgtttttgttgatgaactctacacggatatcaaacgacttttaaatgaggatattagcaacagtttgaaagttgattcttcatcttctgccaatactttttctgttaaatgccctttgtgccaaagtgaattacaggaaaatcaaaaagcaattgccacttgtaaagcccgatgtgggtttgtggtttggcgtgaaatggcaagtaaaaaaatcactcataatcaagctgaaatattgattgaaaaaggtaaaacaggcattattaaaggctttaaaagtaaagcaggtaagacttttaatgctaaacttgttttagataaaacatcagggaaagttacttttgaatttgaaaataaaaagtaa

SEQ ID NO: 300458 - DNA, 504 bp, Proteus mirabilis
atgactgatttaacaaaaaatgatgagtatgacattacgcgcagggtcttagcgagtgttacctcgatgcgtagttgttttaaaaatacccctatcgatttaatcgacgatatcctcggtaaattaacagggataaaagaagaaaaagaagctgaatatagacagtttgaaaccgaagcggttgagcgtaacgataaacgcttacaagcagtgaccttgcttgaagaagcgggacttcctgtacctactgaactattgcaacctattactgctgagtttttagcaacaggacaaattacgacaactaaaaaaaacaaaggtatatctaaacctcgcaaagcaagtttagcttggcgtaaccctgaaaaaaacggagaatgggaaaagtacagcagtggacgtttggcaaattgggtcgctaaggcaaaaaatgagtatggagagtcagatgaaactctagctatttatgccgaagaatataataaagaaatgggatttgaataa

SEQ ID NO: 300459 - DNA, 261 bp, Proteus mirabilis
atggaatacgatatttttctttatatctggattatttgcttatttcttatactaaccctatgtgttatatctgtaattttgcagactaatagatcaattaaattaggactaaagaaaagtgaactctattctcaattaaaaactgttcgaattaccagagggctaaggcaggaagagaatgtgtatcatttaaaaggaatagttgatggaataaattatgatatagaagtaaatgaatctgaatatgaattctataaataa

SEQ ID NO: 300460 - DNA, 321 bp, Proteus mirabilis
atgttaagcacgatgtcacaaaccattattttagttgctttgtttataggaatggcagttggtttaattactttagttgtttatttgtttagtggggcgaatgcttcgattaaaaaagaatacgatgatgctcagactaaagggaaactttattctgaattgaaaattgactcaatcactcaagatttaaatcagaaagaggaagtatatcatttgaaaggcgtcgttaatggaattaattatgatattcaagttttaaagtctgaatatgaaaagaaaaaaagatattatgaaaatgcaaataacgatagtgaacattaa

SEQ ID NO: 300461 - DNA, 360 bp, Proteus mirabilis
ttgaaaaaaccaaaaaatacattgagtataaggctaccagaagcaacttttcagattgttgtcgattatacaacagttttttttactcgcgcagatattatacttgccgctctactcaattttgatcgcttgtgcattgatgagaaaacaaattatctaaagtatactttagaattacctaaacacattttaagcattagattgagtcaattgtacattgagttgattgacagttatgtaacccgtaacgtgggtcgtgcggaagttgtaaatgccgctatgttagcatttgatgctttggatattgatacacagcatcaatatctcgatgaagccaaggtgaagaataatgaaaattaa

SEQ ID NO: 300462 - DNA, 360 bp, Proteus mirabilis
atgtcagatgaaattaaagatatgaaaaataaatttagtaaacttggtttatcttggatggaacaatttgaagctaaattagaattagatatggtaacttctattttagaagaaccacaaattatacttaatgaattaaaaatagctcaatggcattatatggatttgataggaataacatcaagtggactatttgacaaagatattttatctaaggaacaaaaagaatatgcacatcttataaaaaaacaagatggaaaaccggtttttgaagatgatcaatgtgttatctttatgtcagaaaaacacaatcttcctatcgaactctgcgctatgtatgtttgttctcgtttatggtga

SEQ ID NO: 300463 - DNA, 582 bp, Proteus mirabilis
atgattttaaaaaaactatttttggtcggtgtcttttttattccactttcagtttccgctaaggttttaatcataggggatagtttggcttaccctattgcagaaagttttaaaaattttcttcctacggatggatattttttagaaaatacgggactaaatgaacaactctcatttaattgggctaaatatattcaaacattagacttaaaaaattataataatataataatttcactgggggctaatgatggaattactaaagaagaaattgataattatcagcaaaaagccgttaatgttattaaaatcattcagacgggtaatgatggggctttagtcacatgggtattacctccagtcttaaaagacagtaaaaaagaaaatgccgtatctaatgttcgggagtcgttaaatttagcgtgtaatgcatcaggaataacgtgttttgatccggctgtcgtgataggaactgagtttgtaatgagtattaatggggttcctgttcgcgctaaagacggaattcattataccccgcaaggagctgacctaattgttaatgagttaatgggggttaattga

SEQ ID NO: 300464 - DNA, 333 bp, Proteus mirabilis
atgaatacagttaatgacttacaaaacacattaaaaccggttatagaaataattctaactgcaaataactatgccctcattattgcgattatagcgatagtgtttttttataaaaaaaatgtaacttaccgtattgcattcgcgtattcggggatagggctagctctttacttttttggacatttttttgtctatgatgaagtattaattgatattaataatacgccgccatttgcacttaccatgatgaatattggaatgctcgctgttttggtttattggatttactgggcgggttcattgttcggtttgattaaagataataaagaataa

SEQ ID NO: 300465 - DNA, 813 bp, Proteus mirabilis
atggctgcacctaaaaaacccacaatagaagcttatactgaactccaacaagcttatgattacttcaatcaaaccttgttcgatggtgatttacccgacctcatgatcacatttcaacgcggtaaacacacgttaggctatttttcccccgagcgttttatcggtaaatctaagttatctgaactggcgatgaatcctgattattttggtacttattccttggttgaaacactctcaacactggttcatgaaatggttcacgtatggcaacattacatgcccgtaaagaaagcccgtagaggctaccatgatcgaatttggggcgaaaaaatggaacaggtcgggcttatgccgtcaaacactgcccgtgagggggggaagaaaacagggcaacaaatggatcattacattatcaggggaggtcgttttcaaacagcagtctatgaccttttgaaaaacgggttttcaatctcatggtatgacaaatggggcgtagagttatacgcacccagcaaaataaacaaagccgtttttgatgattggttgagagtcactgatccgaatgataacgaattaattagcaagcttacgaaaaccatccacaaaaaagataacattgaacgtgacacagtaacgtttaccattgaagatgaagataacgaacaggaagaaatgtcaattccaaaacccccaattaagggaacgggaacaagaacaaaattcacctgtgctcaatgtggtttaaacgtatgggcgaaaccgacagctaatattttttgtggggattgtgacgtaaaactagagacattttaa

SEQ ID NO: 300466 - DNA, 252 bp, Proteus mirabilis
atgggtaaaatcatgctcagaatgaatgaagtacaagacttacaaattgaagaactcaaggactacttgaataaaaaaacctcgtcaggggcaatattggaagccgcaacggactacaaagcagtatgcaaacaaaaagacgagttagaaaggcagttagctattgcatgttatgagattcgagaaatgaaagccgcaattagcaaatatcaacaatctcaattagccttatttgagttggtaaaagaataa

SEQ ID NO: 300467 - DNA, 291 bp, Proteus mirabilis
atgataaacttaaagttacttcctgttttattgatattaacgccaacattggcgatagcatctatcaatatcagaacaccaagcacgagcattaaactaaacgactgtcaattatccgtatcaactcaaaaagcaaaacaacgctgtaaaatagcaggcatgaccttagaaacagattctaatggcaatatcagtgtaagaactaagcaggttagagcaaagacagatataaaacaggataaactggatataaacacccaaatacttgacgggttaattgatgaacgataa

SEQ ID NO: 300468 - DNA, 516 bp, Proteus mirabilis
atgagaaaatacccaagccaaaatcaagataagtttacggtcagatttcctgatggaatgcgtcctgcattagctcaaagagcagagaataatgaacgctcgatgaattctgaaattgttaatatactggataatgcattaaattctaatgctgatctgacctcttatccatccgtggaaacattagctaatgcactggttaaggcggctgaaaagcctataaaggagcttattgataatttaaatctaggtaataagccagatgtagtaaagggggaattcacctctttaaatataaatactttacctaaaaccactaatttaagtgagtttgagttaggtataattcatgccgttgtcgttttgcaagaactacatgataaacctgaactttcagcaagtattctgaaagaatgtaatctttcagagattgattgcagtgagttagacgattatgaaaaaaagaacttaaaaataatcaataaagagtgtcttactgatttaaaaggcttgtag

SEQ ID NO: 300469 - DNA, 210 bp, Proteus mirabilis
atgaaaacaggcttagggattaacactattatttatgacgggaaaccaacccatatattagatttaccccctgaaattctttgtcaggaatggactaaattaaaaaaagaaaataatagaatttatgaatataataggaaactgtacactagctggaaaggatttattttacgtttattacgaatcagactaccaactaaggagtattaa

SEQ ID NO: 300470 - DNA, 294 bp, Proteus mirabilis
atgaatattagagaattaatagatgttttacaaaacgcgattgattatggtgttcctgaaaataccccaatcgcagtattaacagaagatatgaacataccagatgattgtcataatgggattattgaagcggatagagtaatattacactttactgaataccaaagtgataatgccccaaaaatgagtgtaagttttgaaaaaggcaatgtggtacttcttatggcggttggcgctaatattattgaatcaaataagattagcgaacctaacatattaaacgaacttgaataa

SEQ ID NO: 300471 - DNA, 192 bp, Proteus mirabilis
atggaaaataaaactgatttaatagatgtctttatattattaattatttatattatattttcatttattgtgagtgtgattttaaattatataaattacacttgtggttctgagttgtttaaaacattgctgattttaggtgttacttttactgtcggatatttaactataaattttaaagattataaatga

SEQ ID NO: 300472 - DNA, 3288 bp, Proteus mirabilis
gtgttaagtagaatcggcggcggtaacagtggaattgtttactaccttgaaacaggtcaaaaacaagggcgtgaactcggacgcgacgatttagactatcgcttatgtttggatggaaacatcgagcagttagatcatgttattgacagtattcctgataaagggcaagagcgctatttgcacatatccctttcttttcatgaaaagcacgttaatgaagaaacattaaaagctgtttgtgacgaatataaaacgcttttaatgaacgcatatgataaaaacgaatattgtttttatgcggaagcccatattcccaaagtaaaaaatgtagtcgatgaaaaaacggggttattaattgaaagaaaaccgcatattcatattgttatccctgaaaaaaatttattaacgggtaataaattaaatcctacaggaatggtagatcattatgtaaaaaacctagatgccattcaagaacacattaacaataaattcaatttagcaagccctaaagatggtgtacgagtaagtgaccagaaccatgcaaatgtgttatcccgcatgaaaggagatctattcagtgaagccaagtctgagtttaaaaaagctttaatttctgaccttgaaagtgaaaatatcaagtcagaaaaagattttttatctcatttgtcgcagtttggagaagtgaaaacttataaccaaggtaaggcgaatcaatattatggcgttaaactccctaatgaaaccaaattcacacgcttaaaaagccctctttttactaaacaatttattgaaactcggactattccgttaatcaaacccacacctaaacaaatagaaaaagatttaagtgagtggtgtaataaaaccagtcacgaaataaaacatattcaccccgcaggggaaaaattgcgtaaaacctacgctaaattaaatgacaatgataaagctaaaatgcttttaacattaaggaatcaatataatgagcgacacaaaattgaacgagaacccagagaaaacattcatggacaattacagcgcgggagaaattcgcagcgaagttttacacatcattccaaaagaactcaatcccgatccgcgccgcagcgattgtcatctttgcaagaacgcaacatggtttacgagttacgaggatacggacagcgaacaacccaacaacttaaccctattttgccatctaatgaacgtagtgctattaaaaacgaacaaagtggacaatatcatcgtgggggaatgcgacggacatcggattcaggaagaggaagaataacaaacgctattcagcaatcattaattaagtttgaaaacaaaccctctcaaaatgatttaacgttaatgcgagaaatcagacaaactataaatccagagcgttttttatcgtattgtgtgagcaaatataatattgaccctgaattacataaagtgacatttgctaaagataatagcccgcgttttggtgtagataaactcaatttaaacgcgagtgatttcctcacaaaacatttaggtttatcttgggaagatgctaagatagacctattaacgatcaatgaatctcaacagaaaaacgaaccctttctatctgtattatcacgaacacctttaaatcgtgaagaagcaaaagaaagaacactttcaagagaatcagcgaaaaaaaggttaaacattttttatcgtgatgaaaaaaaagccttagaaattgaatataaacaagaattaaaaattcttttttcaataaagaatattagaaaaagagaggtcgaacggggctttttaatgtttaatcatttgaaagaaattgaaacattaaacaaaatcatgcgggaaaaacggaatgttgttaatgctatccataatcattggaatccaaatgatgtagaacaaaaaaaactactcaataaaatgttaactgaacgaggaatttatatgactaataaaattatgaacgctgatactgattttagttttaagaaaacagttgcccgtaaaaaacaatttaatgaatttgaagaacaagttcaaaatagaaaaaaactcactgatttagttgctcataaaaaggataaagaagttgaatacattgatcaaaaaaccaaacaagtggtttttaaagatacgggttctcacattgaagctaaaaatttagtcagcaaaaatgaagcgactatgatgctggaatacgccgaaaagaaatacggtggtgcgttgcgtttatcggggagtgaagcttttaaagaaacaatagctcttgctgccgctgaaaaaggaatgaacatcattttaacgccagaaaaatatcatgaaatgatgttaaaagaagtggcgcgccttaaagaggttcaacaacaaactaaccaagatccaaaagagcaacaaattaacacgattaccgaaaatcaagacattaaactcgataatcaagcgaagccagaaaaagataatgtagttaaagaggttgaatttttaagggattggttagttaacgataatatttatcgtaatagcctgatgaatactaaacaaatagaaaaaattaattcagcaactgaccaaatgttatctggtcacatcaacaatgataagttcttaactatcaaagcagaggtcaatgctgaaataatcaaagaacgaactggtatagacgttcctattcaagatttaaaaaatgatttcaatgatcgtttaacccctgaaaaaacagaaacgcagcaaattagcaaggaaatagctgatatacagaatagtgaagctctaaatccacttccaaacaaccttacatcaaaacaagtacaagaaaaaatacaagatattccccacaccattgacggtaaagagtttaataaacttattgtggttccggtcaataaaaatgacggttttgagagtcatacagagtatagagtcgcttttaaacacgatgataaaatggtcactcaactaaaagatgtgactgaaagcgatttaaatcggatgggtatcgatactaaaaatattgatatgcgtaaggttgatccagtatcaattaacgttacaaagttggctaattctcaggtcgaatctccattaaaacatgcagagaaacagctcaatactcacattgaacacatgaaatcgaaagtatggtcacgtagcgagtttgaagagctaaaagagcaacgtggcaagctggaagcgaacgttgataaggcaaaagcccaacacgcaccagaacagacccaacagaacgaccacaaaaatgtccaagagcaaaataaagggcaatcaatgtaa

SEQ ID NO: 300473 - DNA, 357 bp, Proteus mirabilis
atgaaagaatcaaaaatagaaagaaaaaacatggtgtcgtttagattgaccgatgaggaatatgcaccatttaaagatatcattgaaaaaatggacatcagtaaaagtgagttttttcggatgatggtacttggtcaagttaatgcaataccaaaacttgaaatgcgaaaaccgccagagtatgaccgagtcctctttttggtaaacaaagctagcaataatttgaatcagatagccaaacaaattaatatcgcatttaaagaaaatactatcacagaaaagcagctaactgattggtatcgtaagttgagcattatcacagataacttaatgttggggatagaacgtgttaagtag

SEQ ID NO: 300474 - DNA, 534 bp, Proteus mirabilis
atgaaagaactagattcactatgtaaggctatacttgagaaaaaaataaaatctctccaaaaatgtattgatttacatcaggaagatttagtgacagcaaaagagctttatggatggcgtaaaattaccaactacattaatcaaaatgctggcaccaatttaaaagaaacatttttaacaaatatgttttatcgctcactaaaaagtaataaaactctcgctttaaaagcagtaaaaggaacatcaagagaaaatacaatcgtagaaaaaaaatcatcgacagaaccacttcaaaaaggtgataatgtcgaaagaaaaaattcgagttcgtttaaatcatttaaaaaccttaatcgaatttcgttaaacttaatcgacaaatacggcatcgatttagaaacattaaaatcgctgggcgtaatgactatacaagatagaaccataatggaagggaaaattaaaacgtattgccaatccattgacagtcaaaatcttaaaaatgaatattcacatatattgaaaaaggataactga

SEQ ID NO: 300475 - DNA, 720 bp, Proteus mirabilis
atgaaaatcatcgtaatgaataacagcggaaatgtgggtaaaacaaccatctgtcaaaatatgctcgttcctcgtttagatggaattgatgttatccgtgttgagacccttaacgacgatggggaaagtacaggtgaaaaattaggggctgatctgtttgatgaaattttcgagtccattttatcctctgaaaatgttttagttgatgttggcgcatctaacgttgaagtctttaactataagttggaaaatgaatttgttggatcacatacctttatcgattacttcattatccccgttacacctgatgaaaaacaacaacgtgacactatcgctacaattaaaacccttatcgatatcggcgtgagcattgataaaattaaagtggttttcaatcgccttaatgcaaaaaaagatttattaaaacaatttgaaactttgattacaagcgaagatttaaaagaatatggtttttcttttgactctgaaacccctctaattggcattaataatacaactctttttgaaacattgaaaaaagccaaccttgagtatagcttcattaaaaatgtagaacccgaaaaactgaaacaagaaatttccgaagcaaaggatgcgaaagaaaaatcaaaacttcaattattacagttttatcgcatgggctttgatagttatcaatctaatcttcaagacgtttttgatacgcttgaattaaaataa

SEQ ID NO: 300476 - DNA, 150 bp, Proteus mirabilis
atggaaattctaaattcagtattagatatactcattattattttagcaattttctctttcatagcatttataatttcgtcaacatgcctttttgtcgaattaaaaaaacgttatcagtttaaaaaagctaataaatcaaacaaggattaa

SEQ ID NO: 300477 - DNA, 579 bp, Proteus mirabilis
atgtcagaaattgaaatcaaagaaagcccgttaaagggcttggatgcaatgaaagcattagaagctttacaggataaccccgaattacgcgcattctttatgaatgggttattagagcagggctacgaattagaaaacctgcttagaaaacttcttgaaaaattacccgaaacggctaacgagcgaattaaacaagaaatcaaattttccgttgaagaactcgagaaaaaaatggcggcaattgatgaatctattggagatctaccacaaaatctcgatcaacaagtcgccttatttcgagatgtattaaccgaaacccgcgaacaagtgaatcaagaagttgacgcactacaaactaaagttgaaacgattagcagtatggcaatgaatgttattgcacaatctatgcgtgataatgttcatgtgtttgaaaaggaacttcgtgaggctaaagataaagtattttctgagggcgtagagacgattaaagaaaccaaccgtcaggctaattgggttttgatagttgggattgctgtgatagccataggagcgcaggtaatcggatattttttaaagtaa

SEQ ID NO: 300478 - DNA, 234 bp, Proteus mirabilis
atgaaaagtccattcgaaagaatagtagaaagagcaagtcaatttgtgaacctagatgataaaagctcacaggaaatgttgaaagctgcaattaatcattcctccattgatatggataaattactcagtttcgatgattttaattttaagcatgatattttagggttatataaaaattttgattttggcatcaataaatgtaaaaacaattttttaccaaaatcacatttctaa

SEQ ID NO: 300479 - DNA, 312 bp, Proteus mirabilis
atgaccacacgtaatcaagaaatcgctacaactattttatctcaaatgggcggtaatcgttttattgtcatgacaggagcaaaatattttgttgctattgaaaatggcttgcaattcaaacttccagccagatttgccataaacggaattaattgtgttcaggttattcttgacccatctgatacttacaccatgcgatttttaaaaattcatggtgtaaatagtaaggagattgaaaaagtcgaaggtcttttttttgatcagcttcaaataatatttactgaaaaaacagggttatatacccacttataa

SEQ ID NO: 300480 - DNA, 306 bp, Proteus mirabilis
atgaaaaatttaaaattgacatcatatattgcatggatattatacgtttcaagtgtaatctttgtattaattatcggctattttgcttttttagaggtgaaagatacatttaacaacccagaatatcttacagaatatcaaataagcaaaggggtgaatagaattaataacttcattgataagtgcagtgacgaatacaaaataacgatagctaataataattataaaatttcttgcgatgcaggttatatttttataaatcctttaattttagaagaatttaaaaagaataaaccccaaaattga

SEQ ID NO: 300481 - DNA, 228 bp, Proteus mirabilis
atgtcagaacttacaaaactacaattatttgatttgctagaatattttacagggttagcaaataatggctacattaagttgaataactcaataagtgatcctgattgtaatttatttgatagcgttgaggtattccgattaggaagctatgatctcattaatttctattttaaaaatggttttcctgttggatttagtaacgtattagtgatgaattattatttttag

SEQ ID NO: 300482 - DNA, 198 bp, Proteus mirabilis
atgtcaaaagaaatgttatcactgattgaatgtgttaagcaaggaaagcctgtaaagttacccgcaatgacaggaaaggattttaaagcatttatggatggtattaatgcccatcattctattgaatttgtttattctgctgtattgtctgccctactttttttattgtgtttatcaaacacgcttacttgtttttaa

SEQ ID NO: 300483 - DNA, 204 bp, Proteus mirabilis
atgaccactaaagtaatcatgactattccgtttaatcaacctaaaacgtttatccttacttacaaggggctaaatgttcacaatcaacctgttaaggttgagtctcagccacaaaaactattcagtttggaagagttagtaattaaaacggaacgtttagaagcaatgggatatttcgatattgttgcgaatgaagtgatttaa

SEQ ID NO: 300484 - DNA, 615 bp, Proteus mirabilis
atgttaaatgtaaaacaaagaaaatatactgctatattattgctttgcttaacggtaattttaattttaaatatttcacttaatttcggtgatgtagtaaaagtaatagcctttataattagcgggcttatcttaataagaggaattaaatttttactgttcaataatattgattcatctttcttgcaagcttatgcttttgggcttttatcggcatcagagatttacttttcagttgtggattatgggaaatatggattaactttatacacgttattggcgataactatctctatccttgcttttgttaatatgtgtttatcatattcaaatattaaaattaaaaaaaaaggaatgaaaatgaacttaattaaacttgaagaaataaccagttttattattgcaattgttattttctcagcgattgggatgcttttatcgggtaaacaattttcaattaacatgccagtcatattattgatatatgttattactgcgacaaacatcgtattacagacatttaatcgcgggggcaaagttaatcatataatatcactgttacttgctactatattagtggtaggttttggatttggtatattatcttgcctataa

SEQ ID NO: 300485 - DNA, 285 bp, Proteus mirabilis
atgaataagccttacgagattgtttttagaaaagtgaaaggaaatacatttagtgattgctttacggtattttataacggggaaaaatataagttagtattccaaaaatttaagcgggaacaggtatcaaaagtagataaacttaaaggtattaagccaaagcgtgaaaagctgttagaaactgagcattattttaccacgctggagaatattgaattctctctattgccctgcaaaaaactgacgaagttattttgtgaagaatttaaacttaattggaggtaa

SEQ ID NO: 300486 - DNA, 780 bp, Proteus mirabilis
atgaccgataaaaaagcaacatcgctagatcagctttcacgtattgacaaagaagcagtgagatcacgtaaaacgctcatgttagatattaacttgttagagttaccaagagaattaaatattcgttatgcgggacttggctatgatgaatattggcaacaaccacacgttaaagaatacgtttcaaaactggcaaaagattatgctgatggagatattttcccccctattgtcgtgaaatttgatgcggatacgcaaaaagcgattattattgatggtgcccatcgctataaagcaatcttagaagccaacgaagaacacggggctgaaattattcgtcatgccgtaacggattctaaaggtgatgaagcaaaaaatatcttattgatgctaaacacagggcaacgattagatgtgagtgcggttgaaattgccgaggggttagcgcgattagaggcatttggttttacagtagaagaaatcgccaaaaaggtcagtaaaacggttcaatacgtttactatatgaaaaaagtgaatgacctacctattgaaacgaaaaaattgatacgtcaaaagaaattaaccgttactaaagcgttagcaggcgataaacctaaaagatatgttcccccaaaaaaagcagtaaataaaattttagatattgttgcagaggcacaacctgaaattaacggtgattcagtgagtgtgtctatcccgctagagctgtataatctattatttgatccgaatatgaatatgagtgaagaaaatcaagaataa

SEQ ID NO: 300487 - DNA, 243 bp, Proteus mirabilis
ttgatcaatataaatgatgtttatcctaaagacttagtgactttacaaaaagagttagaattttcagattcaaaaatggctgaattgttagggattagcgtaaaaacgtgggtaaataagcgttctgcaacaatgaggacagttagaaaacaattgattagccctgcggaatgtgaatatttaatgttattggctggtattcatcctaaatatgatttaatttttaacccaaaaaatcaatag

SEQ ID NO: 300488 - DNA, 336 bp, Proteus mirabilis
atgacaagttctaaattattttttcgtaatggttcagtttccgttaatgatgttttcgtgtcgtcgtgggggtatgaacaaaccaacgtcaatttttatcaagtaatttcggtacacgggaaaaaaaccgtaacagtcagggaaattagagcagaaacattttttgatagttcgatgtctggtaaaaaacaacctattttaaatgactttattagtgatccattacgccgacaagttaaagaacatggctctgagccattgattaatattgaagattttgaggttgcgagattgacctctattgataaaaaacacgattttagctcttggtactaa

SEQ ID NO: 300489 - DNA, 315 bp, Proteus mirabilis
atgaataggtttgttattgcattatcagttttgctttctttatctttcgttgcttcgtctaacagtgattttaaaaatgttattggttggaataatgagggcaataagatttattgtgaagttgatgcaaaacgtaataaaagtcatgttagggctgcatcaataacgcccagcgattggattgttagcgatccatatatagttgatggatcacttataagttgtgaatttgataaaaaaattaagcaatggatattcactaatcatgatcaaaaggcggtatctatcccctatgtaatcccaaaagaaaagtag

SEQ ID NO: 300490 - DNA, 495 bp, Proteus mirabilis
atgcaaacagataatgaaaaggtttttaatgaaatatgttactttaagtttagacttaatgaaattatcgaaatggaaaagaatatatatagaaaagaaaaagcgggtaaaacgttttattttagtttttggagttggtatagaactatcccctattttcttcttgcatatataataaccatatttttctttattgctgctgcaacgagttcatacgaaattaacaagttgattaatattattatagcttctgcacttacagttcctattgtaggtatatttcttttagatctttttaaattattttattatgagcacaaaatattaagattaaaaacaaaaataaatgaattgttaactcaatattatccctatgatgaagttaatttttctgaattcttagagaaaataaaaaaaagtaaaagtactattgtttatagccattttttaaatcaatgggtatcattagaatttagatgtaaaccatgtaaatag

SEQ ID NO: 300491 - DNA, 201 bp, Proteus mirabilis
atgattatgtttggaagaaaaaataaaaatggtgatattaatcttcttgataaagatggatatccaataacgcggttagatgattcgtaccctattatttatcctgtgaattctaatttaagtgcgtattatgaacatcctaacggtattataattacagaagaagatgcaaagaaattagatttagatattgaagattaa

SEQ ID NO: 300492 - DNA, 381 bp, Proteus mirabilis
atgatgttatattacattaaattagcgtttttttctgttaaagatgaaatggataatttcgatccagatcatgaaaatattctttttacaaaagaatactttgaattaggagtaaatgaattagaaagtgatatttataataaatttcataaattttgtaatgcaggtattattcaatttcataagtatgaactattctttgatgttaaagaaattgaatttacattaaaattaatgaattttaatgatgaagtgttaaatgtaataaaatataaaaggaagatgaaaaacacaattgaattagttaaattcattaatagactaaagcataaaaaatgcgatgaaggtcaattttataaaatagaatatatttattgttaa

SEQ ID NO: 300493 - DNA, 1224 bp, Proteus mirabilis
atgactaagcaagaaatcgctatcgcagctttacaacgtgcagaaaataatgcatcagaagcaaattatgacgttatttttgatggctttattgatatggggatcgcaaaggaagatatcgaacctcgtgtgaatgtttttactttcaacgcatggaaagcaaaaggtcgttttgttaaaaaaggggaaaaaggcgttaaagtgattacttatattttggttgataaaaaagaaaaagattcagacgaaaccaaaaaagttaaagtgaagcgccaaacaacggtttttcatatctcacaaactagcccgctagatgaaccaaccgaacccgaagataaaaagctattaaccgaatcagagagcaccgaaaaaaacgtaaaagacgaacaggaacaaccaagggaaaaagagccgacagaaaaacggttaaactggtacgaagaaaagcaggctcgccgtaaagaacgttatcagatgttggctgataatgcagtgatgaaaagcaatgcgatttattcgcaagcctgcaatatggcagatatgatcccctttggacaacctattttattagggcatcacagcgaaaaaagagatagaaactttagaaataagatcacaaaaacatttgaaaaatcttttgagcaaagtaacaaagccgaatattacgaacgtaaagcaaaatcagtaggaaaagctggaatatcaagcgatgatcccgacgcaattttaaaattagaaaaaaaattgtcaggactagaaaaaagtcaagaaacgatgaagttagttaataagatagtgagaaataaagcaatacctcatgatgaaaaattgttaaagattatgggattagggttaaaagaagaaacggctaatgaattattaataggcgattttatggggcggttaggatttgcgccttatgcacttcaaagtaataatgctgaaattaatagaattaagaaaagaattgatagcttatcaaaacataaagaaaaaagtaatattatcgaaaaaagtgaaaattttacattcaaattagattatgaaataaaccgagtcatgtttatttttgagggaaaaccagaaagtaacgtaagagaaattctaaaaaagaatgcttttcattggagtaagtttaataaagcatgggttagaaaaataacacctaatgcgttatacgttgccaagttagtaaaagaaaatattaatgaggtactaaggtaa

SEQ ID NO: 300494 - DNA, 225 bp, Proteus mirabilis
atgcgtaaaaattctacaaaagcaattcgcttaaatgatgatgaactcaatttatttgaatcttatgcaaacgctaaaggcttaacatttagtgaattatgtaaaagtgcagtcattgaaaaaattgaagatgaaattgatttaaaacttgctgaggaatcttatcaagaatatttaagcgataatgaaacactgagtcataaagcgctttttgattctctttga

SEQ ID NO: 300495 - DNA, 276 bp, Proteus mirabilis
atgagtcaatatcgcattgagtacacaaaacgctttcaaaaagaaatcaagaaaatcgataaatatcaccagaaaattattcaaaattatattgaaaaacatatcgataatagcattaatccccgattaattgggaaaatattaaaaggagataaatcggaatttatacgatatcgtatcggtgattatcggttaatagcaaccattgaagatgataaattgctgattttggcgctttctatcgggcatcgaaaagatatctataaacacttttga

SEQ ID NO: 300496 - DNA, 174 bp, Proteus mirabilis
atgaaaacatctgattttattaaagaaattaaattaaagagagatgtagagggattgtcttatgaagctatatctttatggctggcagaaaaaaaacaatatgtagttagtgcaacagcagttagaaatgcctatttaagagatcagaaaaaaaatttagctaaaacaaaataa

SEQ ID NO: 300497 - DNA, 837 bp, Proteus mirabilis
atgtctgataacaaaaaagggcaaattgatgcttttcaaaaacatcaagagtttatttttaaaagtttaaataagtctaaaaatactaaatcagaaaataaaaatactgaatttgatattgatgttatttttacaactccagaatcatacacatcccctaactctgttttaagaagcgcattatttggattagttgaaaaaggaaagagaaaatatgaaaaaggagttgttaaagcagctttaaatggctataccataacttatacaggtgagcaattagatcaatctgatttcgatgtttggttagagttgttaaaaagattttcagaaggaaaaagtgaaaatattattttttcatttaattctttccttaatagtataaatagaaatactggaaaaaaagattatttatggttaaaaggtgtattaactagattgcaagcttgctccgttgagattaagtgtaaaaacataacttatcaggggactctagttactagaatgattagagatgagaaagatagtgatgtggttcaaggtgtagtcttgaataaagaattgtttgttttgttttctggtaaagattggacgttaatagataggaatgttaggctttccttaaaaggaaagcctttggctcaatggttatatagtttttattgtactcataaaaaacctataccttattctgttgaaatgattaaatcattatgtggtagtgagtcatctaacatttactcgtttaaacaaacattaaaaaagaatcttgatttaatgggaagcaatactaattggaaatgttatatcaataataataaagtttatgttgaaaaatga

SEQ ID NO: 300498 - DNA, 336 bp, Proteus mirabilis
atgaaaaagatgattgtagcggttttatttggagtcttggcattaacagggtgtaatgaaaaaggggataacggcgaactggcgggtgtttatttggattctagtaatgataaactgattttaaatgctaaaaatggacagtatgaagttggttatcagtatcaatggaaaggaaaatatggtgatactaaaattattggattcgcagaaaaaaacggagactatttagtatcatcagagcaaaaagataaaaaaatgtttgagattaaagatggtgagctagtttctgtttataccagctctaaccgaacttttaaaaaagtaacttcaaattaa

SEQ ID NO: 300499 - DNA, 294 bp, Proteus mirabilis
atgactgaacatgatcgtagctgtattatggcattatctcaactctttcctgagttgagtcctactgaacgtagagtcactattcaaaattcaattctagggcaaacaacgcaggagatcgcaaaggatagtggtgtcgatgttgaaaccataaaaacacactttaaacgctctagagagaaattaaagtgtgcttctttgcaagagcttcgcggtgttatcatgctccgaattctttcttataatttgttacctaataaaagtgaatttggcggacttattcgttcaaaataa

SEQ ID NO: 300500 - DNA, 324 bp, Proteus mirabilis
gtgaaaaatgagagtatgagacgtgtcaatgttgattttcctgtgagtttccatttgtggcttgaatcacgcgcaaaaatcaatgagcgatcaaaacgtggggaaattaaagttattacggcagaggtgatgaaacttgatcctgatttaacaggattagacgaaaaactctatcaaggtcatacaaaatcaacgaaatggaatggtgtagagctacctgccagttgccatctttggttagaagaacgagtaaaaaaaagtgaacgcacaaaagcagaagaattgaaattgttgtgcctttggttacaacaaaaagagagttag

SEQ ID NO: 300501 - DNA, 390 bp, Proteus mirabilis
atgtctaaatcggcaaaaggtacgacagaacggcctggacggaacgtaaaagctaaatctggtttaaaccgcgcaatactggagcagggctggtatgaaatgcgccgtcagcttgagtacaagcagctctggcgaggtggtcaggtactggcaataccccctgcctacaccagtcagaagtgcgcttactgtggtcatacagcaaaggaaaaccgacagtcacaaagtcaattcgagtgtcttgaatgtggatatacagcgaatgctgatatcaacggggcacgtaacattttagcggcaggacatgccgtgcttgcctgtggagggagggtgcagtcagaccgcccgtcgaagcaggaacccgccgaggtgattcagacatcagtctga

SEQ ID NO: 300502 - DNA, 303 bp, Proteus mirabilis
atgataaagattattgcagaagattttattaaatcaggatcaatagaaacggtcttaccactttaccaagaattggtgaaagctagccaacaagaagcactttgtattagctatgatttatttgttgatgagaaagatcccggtcactttatttttattgaatcatggccaaataaagaagcactagatattcattgtaatagtgaacattttcgtcgcatcattccgatgattaaacaatatacaaaagcagagtcaaaaatcactttagtcaatagtgtatttgataaaaatatagattaa

SEQ ID NO: 300503 - DNA, 639 bp, Proteus mirabilis
atgctaaagcgtcctttgtctattcaatatcatgattttgcgggttttatgttgatggagtgcctctttgtgatgacgataagtagtattttattagtttgtattggacgtgcttatccttatattatcaatgagttaacttcttcttatcaacaatatcgtttagaaatttatctaaagcagcgtttgcagttattggaaacgcaattaaggcgagcagggtactgcaatggtgattgcactgttaaaaaggcttctttacctgtaccacttaaaataggtcattatccttatcaccctcatggctcttgtgttttgtttgtttacgatatgaacaataacggctgttgggagagtccagaagaacaagaaagtgattactttggttttagattaaaaaacggtcagcttgaacaacgtcgtggtgtgcaaaattgtgattcaacaggatggcaacagatcttcgaaaaagaagaaattgaggtgacagaatttatcttaactccctatacacactattctccaataaaaaaacgtgcatttaactatctatcattatcattaaaattccaagcaaaacaaaatattaacctaaaagtacactatcaaacatcaatactattaaggaatatttcgtga

SEQ ID NO: 300504 - DNA, 714 bp, Proteus mirabilis
atgcgtaaagtcacacttactcttagtgcaattgcgttggcgttaagtttaaatggcgcagcaatggcaaaagttcatatgccagaagttgttagcccaggggttactgttactgaacttgcacatcagcaaccaattaaatgggtttctgttgcagaaattgaaaaaagcttagaaggccaagcaccaatggcggtaggttttgatattgatgacaccgttctgttctcaagcccaggcttttatcgtggtaaactggaatattctccaaacgatttcagttatctgaaaaacccagaattctgggaaaaaatgaacaatgaatgggataaattcagtatgcctaaacaagtcggtatcgatcttgttcagatgcacttaaaacgcggtgatactgtttatttcattaccggtcgtacacagactaaaacagagactgtgactaaatatgttcaagaaggtttaaatattcctgcagacaaaatgcaacctgttatttttgccggtgaccaacctggcgcaaataacaaagtaagctggatgcgcgatcacaaactgaaaatttactacggtgatgcagatgctgatatcgcagcagctgatgagctaaatatccgtgggatccgtatcttacgtgctgctaactcttcttaccagccgttacctaaagcgggacaatttggtgaagaagtggttatcaattcagagtactaa

SEQ ID NO: 300505 - DNA, 444 bp, Proteus mirabilis
gtggatccgtggggttggagttgtggtcctaaattaaaaactgaagcagattataaaaaggctattcaaaatttagaatcgcagcatggtgctttaaatgctcatggattaagaagacatggagcggggacaaccttagagcaacaacaatatagagccagaacaggtaactcacctgataatcattatacaatagttcttgatagaaaaacgttaggaagaagcgcaccttcatccacaagatttctgagttataaagatcaatatgacgctatttcgcaagtacttaaatatgctggctcgaataaagcaattgatatagatatgggacgtatagttgcagaaggatatcaaagtggtggaagaatatatggttcaacatcaaaaataagagcttattttgatgcaaatggaaaattaattacaatatttggaatcttataa

SEQ ID NO: 300506 - DNA, 810 bp, Proteus mirabilis
atggatgatttgataaaaaaaatattaagtaaagaaaccctactgttagcattgcttacaggtagtagttatttttttgcatatctatttgaatttggatattcacagtattttaattacccccatgaatttatctctataaatttagaaaatataatatatgcttttattgcttttttagtgataacatttttcaccgcgctatttttcatagtatcttcattcattacaattaaatttggtgatattgggttaatcgtaaatcaatcattaatgataacttatttccctattttctttactgtgttagctgcttttcatgaggatgaaaacctcaagtttttcatattaatagacttaattatatttgtggtaatggcatctatcccgttgtattttagagctaaaatgaaaaaggaaatagaaaaagccatagaatttaaaaagctaaatcctacatcagagcagataagagaaataatgagaatagtcactagtgatttattttcaataagaaatctattatcagaaataaaaggatttaacattcaatttaaaataatattttctataattacatttgcttgtataagctacatatttatatcaattggtaacatatatgcacagaatcaaagatatctatctataattgaagataaagataagaattatgcaatagttagacaatacaatgaaactattattgcaaaagaaataaaaaacaacctcatatttaacgaagaaaatcacatatttaaagtgaatgatttgaaagacaaaaaaatcaagaaattcattcaaaactaa

SEQ ID NO: 300507 - DNA, 456 bp, Proteus mirabilis
atgccgatatgggttgatgctgatgcctgtcctaaagttattaaagagatactttatcgggcagcagatagagaaaaagtggtgatcacttttgtggcaaatcagcgattaagtatacccgcatcgccttatttgcgcacattgcaggtttctgcaggttttgatgtggctgataatgaaattgtacaacgtgcaaaccaagatgatttggtgatcactgccgatattcctttagcggctgaagtgatcgaaaaaggggctatggcactcaatcctcgaggtgaacgttatacagagtcaacaatccgcgaacgattaaatattcgtgattttatggatacgatgagagcaagtggcattcaaacaggaggaccagcaagtttatcacagcgcgaccggcaactttttgctaatgagttggataaatggttactacagcaaaaacgtaaaaaataa

SEQ ID NO: 300508 - DNA, 873 bp, Proteus mirabilis
  misc_feature (821)..(850): n is a, c, g, or t
atgttttataaaaaattgccatcattaaatcttctagttatctctatttcatttgcttttatacataatagtgcagtagccaataacgttattgtagatgcaggaaaatctgcaaacacaacagtgagcaagaatggagatggttcagaaactatttctatcaacaaagcaaacgatatgaatttatcagttaactattttgaacaatttaatgttggaaaagaaggcgttaatattgataatagcgaggcaaaagcaaaagttattcttaacgaagtgacttcaaaaaaaacgagttcattagagggtaaaatctctgttttaggacaagatgcagaattgattatcgccaatccaaatggaattgattgctacggatgtcaattttcaggttcagataaggtgatgttaatttcagggaagttagatagtattacaggcaaaaaaatttacttatcagatggttatgttaatctaaagaatgttaataatttcaatgaaaaacaaacaatcaatgttttttctaatcgtattaatatattgggtaaaaataaaatcccagtttttaatgtgatcaatggctatgaaacggttagttttgttgattatgattggaaaggtgaccaaggaaaagagctatctaaagataaccaagaaggtctctctattttagaaaatagttcattaaaaacagattttttctctctacaaggtggcatttttaatcttgatggggatctaatcactaaaaaaatcaatatcattcgtaataaagaaattaatgctaatgaaaaatcagtattcggaattattaataaaannnnnnnnnnnnnnnnnnnnnnnnnnnnnnatttagagcatataatgaagtag

SEQ ID NO: 300509 - DNA, 258 bp, Proteus mirabilis
atgtctaaattaagaccgaatatttttggtaaggctatggccataaatggtgataaaacaacagcaggtgctacttgtattgctaccattcaaaatgtaagttatcatcaaaaaatggcgcttagagtaggagatcctaccactatttgtcctaaatgtgggcaagctggaaaaattgttacaggcgaaaacagaatcaataatcatgggaaagtccagactttcatacaacatgcatatttttcggcatcagattaa

SEQ ID NO: 300510 - DNA, 390 bp, Proteus mirabilis
atgaaaaaagcttgggttattctgtgggaagattatgaaaactatgatgattttgactttaaaaatcgaactgaatctatcgttttaatattaaaaggcaatagcgatttttcatatgtcagcgagctgcttcccgctctatatgttgcgcaatgcaaagatgtagatcaaaaatttaattacgcagtaagtaataacgtagaaaaaaacgagttgggattagaaacacagttctctttagttagaggagaacattgttctcgacggatgtgggtcgggcaagctccgtcgttagtggcgaaactggtagaaaattttgaaatgaaaggtgatccccttaacccaattgcctgttgggatgaaattcggccatcaagtctcggtgtttag

SEQ ID NO: 300511 - DNA, 714 bp, Proteus mirabilis
atgaaaaaagtattactcaatcttactatgctgactgtgatatcagcccctgctttagctgctaaaattcctgtggctaatttaaaaatcaatggtgatattaagccacctacttgtatggttaatggtgcgacacaaagcgatgtaatttttgacttaggtaaattaagcccttcattgatccctaaatcagcaaattacatataccctcatgactcaatcctaaataatgtcactattgaatgtgatgcagaaacttacctcacgtttagagccactgatacttatctgagtgctctgattgagcttaatggtaacaataaatctaaagaaagcgcggtatttcatctcgttagtaaagataaagtggagtcttctgttggtggggcattattcgtttggactaatgttactgtagatgaaaaacctgtatttattagtcgagcaaatgatgtagctgtaggattttcaggcgataaaaccgtcatggccaaagaagtgactaatggctggacgacaaaacaacaagaaagtgtagataaagctaatttggatttaatctcaggtaagattttttctgcagattttaagttaggggaaactaattctgcttttattttatccagagatgaattaagtaaaaaaggaatagatttatctaatggtttagattttatgggtgaagccgtcctcacttttaattttggtgtctaa

SEQ ID NO: 300512 - DNA, 165 bp, Proteus mirabilis
atgctacgccacatgggttggacagaagccgctgacttaatcattaaaggtatggaaggcgcgatcgaagcgaagaccgttacttatgatttcgaacgtctaatggacggcgctaagctgctgaaatgtagcgagtttggtgacgcgattatcaaacatatgtaa

SEQ ID NO: 300513 - DNA, 285 bp, Proteus mirabilis
atgaaaacatatttcattaacatcatattatcatatatgataattagtaattgttatgccaataataactatatcgaaaggtgcataagtgatgccatttatacgaatgagatgtgtaattgcttatatgaagaacaattaaaagatataaaaaaagaagatttattatacacaaaagaatacataagaggatcggatgaagctaataaatacatgaatagtttatttaaagctgttcaagaatgtaagataaaggtaagcaacgtactggtaagtaaaaaataa

SEQ ID NO: 300514 - DNA, 219 bp, Proteus mirabilis
atgaaatattctttattattactaacatcactattctccattggatgtcaagaacgggttatttattcagaactatccccgagcgaaaaaattcagtaccaaaatatacataatagaaatgcaaacacattgaaaaagtgtcatagaatttcaaataaatcagaacgtatcgattgttttttcgatagtaatgatgaagattttgatagaatttattga

SEQ ID NO: 300515 - DNA, 150 bp, Proteus mirabilis
ttgcttacgaatgagtggcgggtatttattcacaacagtatcgagcatgagatggaagaagtgctgaaagtggaagaggaacgcagacaaaaagaagaggagatgaagtctcaatttgggctgggtgagaatggaaggctgttatgttag

SEQ ID NO: 300516 - DNA, 249 bp, Proteus mirabilis
atgggattgaaattaagaatttattggttcaataagaaaacaaaggacttttctggtgaggaatattctaaagatctcggtgatgacgatttccttattgaggaaacaattagccctaaaaatgagaatattatcaataatggtgagtttgaactgaaaaaagaatggattaatactattcaaaaacatgtaactcacaaaattgaaccggataaatatacttatttcattgcatttgattaccagtga

SEQ ID NO: 300517 - DNA, 1002 bp, Proteus mirabilis
atgtatggtcttgaaatttttcctgttgaaggcggtaaaccttaccgtttaacgcgtgatacgcaaattctctgttatttaacctcttatcagatagggccagaagattggccccattatcgacaaccgaaaaaaacacggagcaaagtcatccatgaagccatggggtatgaggcgttcgccatcccgagagtggcttctgtgtatatggcggtgaatgattatgcgtattttcagggaataacgcatatccgaatggaagggcctgtattacgttatgagtatgtttatgacaatgttcaggttcaagacccacagatggccaaaagagccaatatggtggtcgatatttatggtatcccgttaccggatagtacaaaaccaacgtatggtgtggagtggtatggggcctttcagggatttcgaagtgcgattacacgtaatacacaaatgacttattgtgtgtttcgacaaaaaatccaccttgaaggcgggcgctattggtctttgccaacaacattaccgcatttagataagtgtgttatgttttatcatgccaccaaccctcaagcggaagtgagctatttagcgcataaaaagcaattatacagttcagcccaaacagacatttatgtgtgtgttttcgtttcaggaatggttttgaccccgaagagacgttggggtttatcactgtacagtgaagatggaacactggtctttaatacggactatttgccttttacccgaggaaaatcaatggaattgttattacgggaggggagtgtagagactccatatagcttgcctttagtctgtgcaacaagtcagtttgtgaatgcgtcttatcaggatgaccctattgattgggccaagcgtaatacggggatacgttttcggggaaaacagatttttgtgagtgaacggatacgtgatgctcatcggcaacatcatgtagagcaacgtattcccttttatgtcctcaatggctcactttatttttaa

SEQ ID NO: 300518 - DNA, 3030 bp, Proteus mirabilis
atgggtgggagtggtggattaatttcaaaagtcgtgggtgcgggcttaatgattgcggggctatttactggaggcgtcacctctgcgatgggcatggcgctgatggcagcaggcgtcgcggtgcaagtcgcaggttcgcttatctttaagcctaaactgccttccatgaattatcgagataccagtgaacgcaaacagatgttacgttcatcgtctgcccctgaaaccgtgatcgtcggaaaaacagtgatatcgggtttgcttttcttcgccgaagaagaggcgggtgaacaagatgaaaacgaaaaaatcacactggcattagcgttagcagggcaccccatagagaaaattgggaagatctggttaggggacgatttaattgagacttttggtgataaagcctcatgggaattacataacgatagggaagatgccgctccctttatgcttaaaaattgcccgtcatggaaagaggatatgattggtcgaggtctagcgtggttacgtgtgacactcacgtttgaccaagaaaaattcccctatggattacccaatgtgaaatgtgaagtttggggaaaacatctgtttgatcctcgcactgggcaaactgtgtggggtaacaatggggtcttagtgattttggattattaccgccattatttaaaagtacctgatacggatattgactttgacagctttaaacaggcggccgatttatgtgatgaaaaagtgagtctgccagaaggcggatttgagccgcgatatacccttaatggcgcctatgatttaaatgagagtccatccagtgtcttggaggcgatgcacaaatgtattaacgcggaaccaacattcaccgcaggaaaacacggtattcaaatcggcgcttattatgggccggcaataaaaaccattaccgaatcacaattgattggcaccgtcacgtgtacccctgaaacaggattaaaagacgcgaccaatgcggtgtatggcacgtttattgatgccgaacagttgtacacaaaaacggatttcacgcctgtgattgtagacgaatgggtgaaagaggatggcttagaaattcgagagaacatcgactatcgttttgtcaccagcccttatcaagcccaacgattagctcgccaatatcttcgcaaaaagaaagcgggaagacgggttcaactcacgatgaacttagacggctatgcttatcgtccgggggaagttgtgcttttagcattaccttctttggggattagtgggctggaattccgtattgccgaatggtctttccatgcattagacggtgtggctttaacgttggaagaggatggtgcctatttatatgaagatgtgattggtaaaccgtttgagcgtccaccgtttgtgaatttacccactggcggtgttgcttcccctattaatcttgcttttgttccacttgccgtcagtgacattgttcaaggtatgctttcttggcagaatgtggcgtctgatgtgcgctacaacacggttaatatacttcaaaacggtagagtgattcaatctattcaggtgccgggtgagcgcgttgatattaacggattagcacgaggaacttatcgtgttgaagttagagcgacgaatatggcgggggcaatgtcggcacccgctatcagtgattttgctatccaagcaccgccagctcccattaaggttgatgttacttcgggaatgttcagcctcaccgtctcgccaaaacaaggtgatagtgctgtcttgggttatacctttgagttttggtttagtgaggaaaaactcgctaatctttctgaaaatgaagtgatcaccaaaacaaacaaagttggccaagggaatttctggacgcaagagaatttaaaagcaggacatacgtattatttttatgttcgaacaatcaacagctatggcaaatcaccttttgtggaggcttctggtgtttgctcagctcaaaccgatttaattcttgaagaattagcggggcaaatcagccgagaccaactcgcacaagacttattgggtgagataaatagcaaagctgaccaatcagccgttgttgagttaaatacgcaagtgaaagcgaaccatgatgcgattttagcggagcaagttgcacgaggagcagtaattaaccaagagcaacaagctcgcgctgaagctgataaagcggaggctcaacaacgccaattcttagctacacaacttcgtggtgattatacaggcaatgatttatcgaaagtcaccgcaggacttatctccgctgagaagcaagcgcgagttacaggtgaccaagcagaagcgaaagcccgacaatcattggaaacacggatgaatgggaatgtttccgtgattaataaatcattaggaaccctcacctcgaaacagcaagcacaaacacaagagatttcaacgctcaattcaaatcttaaggggaaagctgatagtagtgcggttaatgcgttaaatacgcgggtgtcgaatatcgatggaaaaatgacggctaccgctcagcaagtcactcgcctagaaagccaagtgggttcaagttcagccaaaatcgagcagacctcaaaagtggtcactgatttaaatggcaaaatctccgcatcatggacaatgaaagtccagcaggatagcaaagggaataaagtcattaccggcattggcttagggtttaatgcacaaggaaatagccaatttctggtcaatgcccaaaactttgcggtgatatcgtcattaaacggcaaagtggtgacaccgtttgtcgtgaagaatggacaggtggttattcatgaagccttaatggataaagcgtggatacagaaactagtggtactcgattattttaaatcatcgggatttgataaagggaatggctttttattggatgcaaaaaacaatattttccgctttacgggtggtaatggggcattaaatatcaccaataatcaattggtcgtcaaagatgagaaaaaacgccttgtgatgaaaatcggttacctagggaattga

SEQ ID NO: 300519 - DNA, 996 bp, Proteus mirabilis
atgaaaaagatattaaataaaccagaaaattatgttgatgaaacattagctggcttatgccttgcacataatgatatttatcgtcaaccacaaccacgtttaattacgcgagctaacagctcagataaagctaaagtgggaattgttactggcggaggatcagggcaccttcccgttttcaccggatatgtaggtgaaggtttattagatgccgccgcagtcggtgatgtatttgcctcaccgtcagcagatctaatggctgatgcgatacgcgctgcggataatgggcagggggtattactgctctatggtaattatggtggcgatattatgaattttgatatggcttctgaaacggtagattttgaagataatattcgatgtacaacggtgttagcgacagatgatattgcttctgcaacaccagaagaagcgcataaacgtcgtggtgtggctggaatgatttatggttttaaaatggcaggggccaaagctcaagaaggggcaactcttgatgaggtgacccgcattgctcaaaaaaccatggaaaacacgcgaacaataggctgtgccttaacatcttgcaccttacccgctgttggacatcctacctttgaaatagctgacgatgaaatggaaatgggaatggggatccacggtgaaccaggaatttggcgcgataaattacgtagtgcagatgatattgctgaagaaatgtttcaacgtttacaagccgaattatcactaaaaaagggtgataaagtctcagtactagtcaactcgttaggtgcaacgcctttagaagaactctatattttatataataaagttgttcaacttattgataatacaggggcgactatcattcacccattagtcggccgttatgcaacatcaatggaaatgaccggtgctagcttaactttttgtaaacttgatgatgagcttgaagctttattgaatgcacctgcacactgtgcattttggagagtgtga

SEQ ID NO: 300520 - DNA, 189 bp, Proteus mirabilis
atgaataaatatataactttgggttgtctgtctgcacttttgtatacatcaaccgcttttgctgaatatcgtgccgatacaaccactagaacggtgagttataacaatccaatttatgtttcaagaaccgcgcctattttaacagagctggcaacgattgacttaggcactatgtatggctggacttga

SEQ ID NO: 300521 - DNA, 1014 bp, Proteus mirabilis
atgactcttaatgagcgtgttgaattggtaggaaaaatagcgcatacaatagctattatgatgtgtgagattaagttaaatcaatctatgaatgtatatgctctcaatattcatgctgaagattattactgtgatattttcaattttctttatgaaggaaaaaactttaagaatgccaatactgcaggttcaaaccaagagtatattgacttaatcgatgaaaattcaaaacatgtcattcaagtaacgacaacaacaagcaaaaaaaagataggtaatacattaaagttattttctgaaggatgtgaaaaatattctggatatacattcgatgtattctatttacttaataagcccaaaaacttaaagaagaaaaccatagaagaatacagcaaaaataatggtattgcagatataagagaacatttaaaggactttactgaccttattaatgatattaagtcattatctgatttacgtctaattgaggtttttaatcgtttttttaaacaactaagcgataagtatacagatataatatcgttgcagatagtatttgaattactagcaaagaataatcgctcaaaagagcgtgactatagtgtagatttccgcaataaagagctggatgaaaaaataaagctaaacaatttgaacttcagggtgtcgtgcgagttacataatggtagcgaggcatcactgccaatttatgaaaatataaacgatgaagtcttgacggagataaaggacttggtagttaattgtttctatgctgaagctctgaaaagtagcttgttatcttgtggcgcaaaacatagggatatagcaaagaaaagcattagtgagttacacgacttaacaataaaaaaatataaaatagattactccaaagtattaggagacttatgtcacaggatagaagacaaaacattcaaagctagctatcaagaaacatcaatggcttgggttgttatttcttacttttttgaagagtgcgatataggaattaaatag

SEQ ID NO: 300522 - DNA, 237 bp, Proteus mirabilis
gtgatattaccgacaaaattaattgctccagtcagctccttgtattgcatttcagcatatgtattagatgcaataaggtgcaatgaatgcgttggctttgatgaaatactcgatatcgttaataccacttaccctgaacctataaaggctgacaagctacaactttgtctggattttttatttataattggtcaattggatttcgatgatgaagcttttaaaattatattcaagtaa

SEQ ID NO: 300523 - DNA, 1731 bp, Proteus mirabilis
atgatgaagcttttaaaattatattcaagtaaccccaaatttaaaactattacctttaatagtggtatgaatattgttgtaggcctacaggctagcaagtcatctacagatagctccaatggtataggtaaaagtagctcattaaatttagtacatctaatgctcggtggaaaactagacaaaaaaaatgccagtgatattaaattaaagtcatttttatcagactatggtgatttctatttagacatgctagttggttctacagagtacactatcaaattaaattttgaagatggaatatattatcttaatgaggcaaaaataggaaaatcagaaacatttggtaaatatctttctgagaaggtttttattaacctgaatggggaagtgacttttagacaagtttttaattgttttgctagaagatttcttccagaaagaaattactataatggcaccttaatgcaacaagggcagccaattaacgatttttatcagagaatggttaacctttatttgttgggtatagatttatctctcccttacgcttacaaaaagacggctagcaaaatagatgatttaacaaaaaccagtaattctcttgaaaaagccaatgtgttagaagatgagtctgagttattggatttaaaggataagttagaactattattgaaagataaagataacttcatcatagcaagtaattacgatgcgttaaaattagaagctgacgagctaactgatgaaattaacaagatcagaaataaagtattttctcaattacgcgaactgagaaacaaaagaagaatattaaattcctctaaagatgttgtaaaagtggactttaaaaaggttgagcaaatttttaatgaagctaaatttcatttctctgacaagatacagaaacggttagaagatgccacggaattccatataaaaattcaggagagtagaagggataggatagaaaaaagtataaatgaaataaatttagagagcattcagttaaaagattctttgtgtaaactagaaaacaaaagagacaacttactcagcgggcttagctctatgggagctctggatgaatataattctattattgatagaattagagctctagagtcagagattgcagaaatatccagccataaacagactttagctaaagttagaaaaaataaagccatcttagaaaaacagagggctgaaattagtgttgatgcaatggaatacattgaagggaaacaagagcatcttgatagtattcagtctaaatttagagcattagttagacggttctacacacatcaggggggatcaattcgaataactaaaaatgagggtgttgcaaagtacctttacgatataactatacatattcagaaagattcatctcaaggtgtaggtgaagtcaaaatattttgttatgacatattgctatatcaattaaatatgaatttgctaggttttcttgctcatgatagtgctctattttctggaatagatattaggcagataaaaacaatgttcaaaatatctcttgaaatgtgtgaagaaagcgggcttcagtattttgtaaatcttaataaagatatctatgatgagataacatcaagcaagaaagacgatattttaagtgacaaagataaagatgaattaaagaaaggtacagtgctaaggttatttgatgacaaaccagagaacactttatttggagagtattttggttga

SEQ ID NO: 300524 - DNA, 588 bp, Proteus mirabilis
atgaaaggcttcggatgggttttgttgataattggtatcatagtggcatttgccgcttttaacatggatgtcagtgtggcaactagctatggaggtagggtaaataatttcgggctgatggcgcaaaggcagaattatattctaattagctgttttgttattttttgcgggctaatgatggtcatattgggtggtaggaaaaagaaagctgatgattatgttagttctacacgtgtcatgtatgttaaatgtccatattgcgctgaagaagtacaccctgaagcaataaaatgcaagcactgtggcagtgatatatctacaagaaccaaggatgaaagcaacaatagtagtacggttattagcgtcagtccgtcatctttagtgattaagttaaaggatgggtatatgattgatgaatctggtgtaaagagttttattaaagaaatatcaagaaaatacagcgacactcatgatttgcaactttctgccaaggatgagatagatagaatgatgaacgctatgcctaaagaggttcatgaatcttataaaagaaagataagacaacttattgctgaattagataagtaa

SEQ ID NO: 300525 - DNA, 2940 bp, Proteus mirabilis
atggcagatatagcaacaatatcattaaaggctgatacgtcagatctggagcgtggcacacaaaagttaaaggaattcggcgatacggcagaaaaggtaagcggttcttcgcgaaatttaaatgaccagtttaatagaggggttgatcatcaaaagagagcagccgacgcgataaagaggcaaaagaaagaacttgatgacttattaaattcaataaatccaaccaataaagcatttgatgcgcttgataaagccactcaaaaattaatagaggcaaataaaaaagggatattaccaaaggatcagtttgcagactataacgccatacttgagcagactagagataaattaacacgagttaatatgtctcttacggctgaagggcgggcgctattagctcaagaggcggcaacaaatagagccaagcaagctgctgatgattttttaaattcactgaaaaatcaaactgaaattataggcaaaacgaggacagagattttagagctaaaagctgctcaacttggtgtgtcgcaacaagctgcgccgatgatcaataagctaaaagagcaagaaaaagcctttatgaatggctcaattaccattggtcaatataaacaagcaatgcgtcaacttcccatgcaaatgacagatattgttacgtcattagcatcaggaatgccagtctggatggtgatgatacaacaaggggggcaaataaaggactcatttggtggtgtcggtaactcactaaaagcgttagcatcacttattacccctgcaagagttgccatgtttggttttgctggtgctgcggcagctgtggcgttagccgcgtataaagggtcgcaagaatttggcgagtataataagcagctaattcttactggtggttatgcgggaagaacagcggcacagctagatgctttggctagaagcttgtcggggaatgggatcgctcagtatggaatggctgatactatctcaaaagtagttggatctggttctttctcgggtcgagatgttgatatggtatctaaaactgctgctgctatggaaaagaccgttggtcaatcggttgatgagacaataaagcaatttcagagattgcaagaagatccagttaaagcggtcactgaattagataagtcattacattttttaactgctacccaattagaacaaataaccacacttcagacgcaaggaaaagagcaagaagcggctaaaatggctatggaatcatatgccaatgctatggatgagcgaaccaaacagataaaggaaaatctaggccaccttgagagagcgtgggaaggggttaaaaacatggctagtagcgcatgggatgcaatgctagacatcggcagagagaatactctagagcagcaaatcaaagagtatgaagaagctctgattgagtttcaaataaaccctgcctccaaggggctgtattataacaagactggattaatgccagatgaagttaaaagtaaactcgctctactaaaagaagaaaaatttcaacgtgacattaaaaacgcaagagaaaaagccgcaagagatgaggaagagcgtaaaaaagcgcagtttagagccgatcaagaattaaagcgacaatacgaaaccgcagaggaaaagcaccaaagactactcaaggagataataaataatgcggatgcatctcaagctgcaaaagatgaagccatccgccgagagaaagagcgttacgagaaagaaaaagccaaaggtaaaggtaaaaccccaacctaccgaccagattatggtactagagtagatgaatcagcaaatcaagccctattatccctacaagcacaattaaaggtgctaaaagagcataaaacagtcagtgatgtgattagctctgagcgtaaaaaactttgggatatggaagcgaaaatatcaatccttgaggaggctcagaaaacaagacagttaaccaaggacgaaaaggcgttgcttgctaaaaaggactacattcttgcttctcaagaagcattggccatagctggtgatgaggttaagcttcaggagttacataatcgtgagttagataagcaacttaaacgcgttgaagaaattaatgccagaagtcgcgccttagagttgggagctggtaagtctggccgcatgtatcaacgagacatcgcactagagaaagctaaatcaccagacgagagaaaagccttagaggagtattatgctaaggaagactctattcgtgctaactgggagttaggcgtcaagaaaggctttgctgaattccaagaacaggcaacaaacgtttacggtaacgtagctcaaattagtcaatcagcattccaaggcatgagtaacagtctctctgattttgtattgacgggcaaagctaattttgctgacttcactcgctcattcttagaaatgaccaccaagatgttaatgcagatggctatgctaaatgctatgaaagcggcatttggtggtaatgcggtaggtaatttctttgggtttgcaagtggtggttatacaggcggtggtggtaaatatgaccccgctggcgtagtgcataaaggcgagttcgtctttaccaaggaagcaacgcaacgattaggtgtagataatctctatcgactaatggatgcaggaaagagaggttatgcttcaggtggtcatgtcggtggttctgcgccaatgtcggttacacagccaacagcatttatcgctcgcaatcctcaaattgctggtggtggggtgaatgtgacaattgatatgagcggcgtcaagattgaaaccgaacagcaacaaagtgcaatgccaaatatagatgtgagagctgctgagcaatcgttaaagaataaagttaaaagcctttttattagtgaagggcgagaaggtggtgatttgtacaagatcattaaagcagtatcaggaaatagataa

SEQ ID NO: 300526 - DNA, 477 bp, Proteus mirabilis
atggaacagaaaataattgttatgggggcagatccttcaggttatgagcttaaaaatgccgtcaaatctcatctacaagcaaaaaattacacaataaaagatattaccgaatcagggcctattggttattgtgatgttggtgataaagtaggcgctattatttcagaacatcctgaatatattggttttgttttttgtggcacagggatgggagtaagtattagtgctaataaacataaaaatgtttattgcggggtttgtgagagtgttaccactgcgcgtttttgtaaagtgattaataattgcaatatgctagccatggggggtttactgattactccctttaaagccaatatgatggtagatgcttatttatctgcaacctttacacaagggttttctgaagcgaccccagatgatttacaatgtggcttacagaccatgaaagaagttgaaaagcgcatttatactgactaa

SEQ ID NO: 300527 - DNA, 621 bp, Proteus mirabilis; identical to SEQ ID NO: 294712

SEQ ID NO: 300528 - DNA, 2016 bp, Proteus mirabilis
atggaacctcttcagttactgatgtggtcaatcatcctgtatgttgttggtggcgttattgcactgtttttaaagaaacaggaaggattggcaatcctaatatcggggatcagcgcaatcatcggtggtgtattaggtgttttaagcgcattaccggttattttaaatggtgaaacaatcagttttgctatggctgggccatttgatttcgccgcttttgtggtgcgtatggatatgcttggcgcctttatggtgtttgtcatttctttactcgtcactgtttgtgcgttgtattcactctcttatgttcaagaatacaaaggtcgcggcgcatggagtatgggattttttatgaatctctttattgcttccatggtaggactgattgttatggataatgcgttttactttattatcctatttgaaatgatgtcgttagcatcttggttcttagtaatcgctgaccaagatgacgaatctatccacgccggtttactctacttctttatcgctcacgcaggctctgtgctaatcatgatagccttcttcttaatgtggcgtgaaagcggtagtcttgattttgattcattccgtcaactttctctttcccctgcaatggcttctgtggtgttcttactgggcttcttcggatttggtgccaaagccggtatgttgccattacacagttggttgccaaaagcgcaccccgcagcaccctctcacgcttcagcattaatgtctggagtgatggtgaaaattggtatttttggcatcatcaaagtaggcattgatttattaggtgcttcacaaatgtggtggggaattgtcgttctcgcattcggtgctgtctcttctgtattaggggttatgtacgcattagcagagcacgatttaaaacgtctacttgcatggcacaccgttgaaaatatcggcatcatcttgatgggcgtgggagttggcatggtaggtatggcaaccgatcatccagtgattgccgctctcggtctgcttggtgcgttataccacttattaaaccacgcggtatttaaaggattattgttcttaggtgccggagccattattaatcaaattcacactcgtgatatggataagatgggtggattagccaaactaatgccttacactgcaacggcattcttaattggttgtatggcaatttcagcattaccgccattaaatggttttgtgagtgagtggtatacttatcaatcactatttacgatgagttacgatggtaactttgtcatgcgcttaagtggtcctattgccattattatgttggcaattaccggggcattagcggcaatgtgtttcgtcaaagtttatggcgtcagtttttgcggtggcccacgtagtgagcaagcgactaaagctaaagaagtaccgttgccaatgaccattgctatggggttattagcacttttctgtgttgtattaggtgtgggtgcggcttttgttgcgccaattattgccaatattgcaatgtcacttagcgaaaccagtgcattaacagtgactcaaggtgcgatattagtccctgatagtgcatcacaagcgatgttctctcctgccttaacatttattttattaatcgccttaccactaattccattcttaatttatctcggcttaaaaggtggtcaacctgcatttcgccgtaaaggtaatccatgggcctgtggttatgtctgggaaaaagacatggcggtgtccgctgggggctttactcaagcactacgtagtatgtttgcaccactttatcgtatgcgtaaacagcttgatccatcaccttggctttcacgtggctttaataaaacacagcgcggtgctgaaaaggtcgaaccattctgggatgaaagcattatttatccattggttcgtggtatccaacgttttgctaaacgtatccaatgcctacaaggcggcgatttcagactctattgtctatacgtggtggcagcgctggtcatcttgcttttagttatcgcagcgtaa

SEQ ID NO: 300529 - DNA, 954 bp, Proteus mirabilis
atgatgactttccaagaaacaccttcgtttatgatgggaatattcgcggttattcaagcactctttctgctggcgataaccccattatgtacaggtatttctcgccaaattcgtgccaagatgcattcgcgtcaaggtcctggtatttggcaggattaccgagatatttttaaattacttaaacgtcaatccgttgcccctgagcaatctggcgtgatcttccaagtgatgccttatgtgttattaggcagcatgttattagtggcaatggcattgcctgtctttacggcaacctctttgtttggcggtgcggctgacttaattgcattaatttatctgtttgcgctatttcgtttctttttctctttatccggtttggattcaggtagtccatttgcaggtattggggccagccgtgaactgacattgggtgtattagttgagcctattttagtgctttcgttgattgtggtggcattgattgtgggttcaaccaatgtcggcactatcagtgcgacgctcgcccaaggttgggtatcacccacagctacacttttagccttattggcttgtgcttttgcggcatttattgaaatgggcaaaatgccttttgacgtcgcggaagcagagcaagaattacaagaaggaccactaaccgagtactctggctctggttttgccatggttaaactgggtattggtttaaaacaagtagtgattgctgagctgttccttgccgtatttattccttttggcaaagcgactgaatttacctttgtcgcgcttcttgtcgccttagtgttaatggccgtgaaattgctggtcgtgtttgtattagcgtcattagttgaaaacagtttagcgcgtggtcgcttcttactgactcagcatgtgacatggttagggttcggtgttgcggcactggcttttgttttctatttaactggtctataa

SEQ ID NO: 300530 - DNA, 1440 bp, Proteus mirabilis
atggaaaatatagctcttgcgaccttactcatcccatttgcaggggcgttaattacgtccatactgccaaatcggatggcgaagtggttatgtacactgttcgctttattagccacattaggtactgttgttttaggttggcagttcctcgctgaaggtaaagtcgataccacaattacgctagtacaatatggtgatgttgcgctatttggttttaccattgatcgcgtcagtaccttaattgcttttgccgttgtgttcttaggattactcgttagtttttattcaacgggttatctcactaacggtaaccgtgagcatccccatgatgggactcgtcgttattatgctttcctgttgatctttattggtgctatggcaggtttagtactgtcatctaccattttagggcaactgctgtttttcgaaattaccggtggttgttcttgggcattaattggttattaccaatcagagaagtcattgcgttcggcaatgaaggcattgttaattactcatgttgcgtcaatcggtctgtatcttgcagcagcaaccttgtttgtaagtacgggttcgtttgaactaactgcgatagcaacattagatgagccaacaaaactgattgtctttggcggtattctgtttgctgcttggggtaaatcagcacagcttcctttacaagcttggttacctgacgcaatggaagcaccaacacctgtaagtgcttacttacacgctgcgtcaatggttaaagtgggtgtgtatatctttgctcgtgccattatttcagccggtgatgtccctcatatcattggttgggtggggatcgccatggcggttatcactctgatttatggctttatgatgtatctgccacaaaaagatatgaaacgtctgttagcatggtcaaccattacacagctttcttatatcttcctcgcgttatctatctcaatctttggacctcgtgaagcctttaatggtggtgtggcttatatctttaaccacgcttttgctaaaagtttgttcttcttagtcgcaggtgcgctaagttatagctgtggtactcgtatgttaccgcgcttaaaagggttaattaataaatatccattgctgggtgtgggcttttgtgttgctgcgttagcgattgcaggtgtacctccactcaatggtttctttagtaaattccctatctttgcagcaggctttgaattatcgagtgtgttctgggtaatgacacctattatggttctggtgctgattgaatctgttgcaagtttcacttggtttatctactggtttggccgtgtggtgccaggagaaccaagtaaagaagttgcgcaaggacaaccggttcctatggcaatgcaaattgtgattggaatactgattattatgtctttcgcatccagtgttattgctgtgacttggctaggataa

SEQ ID NO: 300531 - DNA, 555 bp, Proteus mirabilis
atgttaaaattgtttaaaaccattatcaaaacaggcgatgcaacaacaaaatatccttttaaaccattagaactccctgatggttttagaggaaaacctgagtactcacctgagcaatgtattgtttgtggggcttgtacttctgcatgtcctgcgaatgcactgaccatggaaaccaacctcgaaacgggtgaacgtcactggcagttatttattggtcgttgtatttattgcggccgctgtgaagaagtctgcccaactcgggcaattgtattatcagatatgtttgaaacggcagtcacacaaaaatcagatctttatattaaaggtacatttaaattattaagctgccgtgagtgtcatcaaccctttacacctagaaaatctgttgattacgctatggcactgctggtgcaatcgggttgggatgcacaaactgttgaggcaatgcgtccacaatttgaaacttgcccagagtgtaaacgtaaacataacctactctctgatggtcaagaaaatattagtatgggcaatgtcgggagtgtgaaaaaatga

SEQ ID NO: 300532 - DNA, 123 bp, Proteus mirabilis
atgctatccccttttagtgaaattaatataggaaaaaatcattttggtacagctaaagtaggctggagctatataaatgattttggtaatgaagttaatatcaacataaaaaatagcgaatag

SEQ ID NO: 300533 - DNA, 711 bp, Proteus mirabilis
atgatcacaaaaaaattaagagaatcgatatttgaacatgtaaaagccgaatatcccaaagaagcttgcggagttatctgtcagaaaagtcgagttaaaaaatactttccttgtagcaatctttcagataacccaacagagcattttgagctttctccagaagattacgctcttgctgaggactggggtgagccaatagcaattgtgcacagccattgtggtgatggtgtaacgactcaacctagcgaaatagataaattacagtgtgatgcaactggattgccttgggtgatcgcatcatgtccagagggtgatattcgaattatttaccctcgaggtgagcgtgaattagaaggacgtccttttgtgctgggttatgctgattgctggtcgttaattatggactattatcaccaaaaacacggtattgagttacataactacagcgttgatcggcattggtgggaagaaggcgaaaacctgtatacggataactacgagaaagcgggttttgttgatatcgctggtgaaccaaaagaaggtgacatgattatcatgcaagtgcaagccgatgtacctaatcacgctggtgtgattatgaatggcatgttacttcatcatctttatggtcaactcagcaggttggtcccctacagcgattattggcgagataggactgtaaaaattgttcggaggaaagagtttgtatga

SEQ ID NO: 300534 - DNA, 813 bp, Proteus mirabilis
atgcatgattatcaaatgcctttggttctattcaccgtaatgagtcaatgggggatcggtgccgtacttgccttatctctttatcaatggcaaacacaaaactccgccatgttaagccccaaagcgttacgtacaacgattgcccttatttggttaattgaagtaattggttcttctatgtcaatgggacacctaggcgatcctctcggcgcttatcgctcagtacttggtgttgctcactcatggttaagtcgtgaagctattgcctttgttatgttaaacggtttaatttccctctgggcattagcaagttggctacaaccaaataaaatacgccgtaatagcctactaggtctgttctgtggccttattggcttacccgttattttaataacagcacaaatttattatcaaatgcaaacacatgcgttatggcatacccccgcaacacaaataagttttattggtacggccctattattgggttttggctctgttattccttggttacagttgcaaggtaaaaaaaccattcatacattgcatttcggtgcttttatcggcttactgttagtattgatgggattagtaatacgagttcaaatttcaggtgctaacgtagcgagcttattgttatggtggcaagtcatcgccagtttaataataggatgtgttattatcacactatctcgtagctctttgtttacaaaggctttaatatcaattattactatttttatcctttttagcggtgaaatcgccggcagaatgctattttatggcaatgtgatgtcccaatcaccttggttttaa

SEQ ID NO: 300535 - DNA, 2247 bp, Proteus mirabilis
atgctgacacgtttgcgggaaattgtagaaaaagtggctatggcagcgagtctgccagaagcacttgaactattagtgaaagaaacgtgtcaagccatgcacacggatgtgtgttctatttatcttgccgatattcctcatcgctgtttctatttaatggccacaaaaggattgaaaaagccgaaagggcgtgccgtcagcctctcatttgatgaaggggtggtgggtgaagtaggacgtctttctgagctgattaatctggctgatattcgtgaacatcctaattttacctatctgccacaagtaaaagaggatgatctgcgcgcttttctcggcgtgcccattgtctatcgtcgtcagttacttggggtgctggtggttcagcaaaaagagcgacgcttatttaatgaaagcgaagaatcttttatggtgacactagccacccaattaggggcgatattgtcgcaagtgcaaacgaaaggattatttggacaatatcgtcaaagccgtattaaagccctatccgtttctacgggggtagtgatggcatatggttggcaagagatgtctcagccaaccttagatcatgtttttaaagccagcgcactggatataaaaagtgaattaaaccgattaacggtcgccttagaagatgcgacatcagagtgtcgccgttttagtaagcgctttatggcgaattcacaaaaagagagtgcggctattttcgatctctattcgcatttacttaacgatccccaattaagacaaaaaatgactggggttatacaacaaggctatgttgctgagtgggcagtaaaagtggtgatagagaagttttctgcacagttctcaagtcttaaagatagttatatgcgagaacgagcttcagatttaaaagcattaggtcagcgcttactatttcatttagatgatgatctcagtacgacaaatacatggccagatcgctttattcttgtggcggatgagcttagtgccaatctattggctgagttgccagaacaacaactggcaggggtgatagttcgtgatggtgcgactcattcacactcagcgattttagtgcgagcaatggggatccctgccattatgggggcagatattcaaccggagctacttcacaaccggatgctaattcttgatggttatcgtggtgagatttttattgagccagaaccctttatcatgcaggaatatcggcaaatcattgatgaagaaagagtattgagtcaacttgctgaagagcagcttgaacagcaagcggtattaaaaaatggtgaatccatcagtgtgcaattaaatgcagggctaagcattaaatatgaacaacgtattagcgttggcatagatggtgtcggtctttatcgcacagaaatcccttttatgttacaaagcggttttccttccgaagatgaacaaaaaaaccgttatcgtgaaatcttatcattttttcccaataaatccgtcgtactacgtgctttagatataggtgcagataaacagcttccttatatgccgataaatgaggagaacccttgtttagggtggcgggggatcagaatattacttgatcagccagaaatatttctgatccaactacgagcgatgttaaaagctaatcttgaatttaaaaatttgaaaatattgttgccgatggtgacaagtattgatgaaattgaagaagcgaaagcattgttactaagagcatgtgctgaagttagccgagaaatgaaatgcgaatgcattctaccacctgtggggatcatgcttgaagtcccctcattggtctttatgttaccgcaattagcacatcgggtagattttatctcgattggtaccaatgatttaacgcaatatttacttgcagtcgatcgtaataatacccatgtagcactgctctatgataatttgcatcctgcattactgcgttcgcttaatattattgctttagaatgccaacgttatcagttaccagtcagtgtttgtggtgaaatggcgggtacgccgatgggggcattgctactaatagggctaggttttcgtcagttaagcatgagtggccgtagtttacctagggtaaaatacttattgcgccatctagatcctgctatcttacagccttttatgcaacaggtgttgaaagctgaaacggcaatagagataaaaaaattgtctgctgattttatggaaagacaaggattaggtggattaattcgcggaggtatctga

SEQ ID NO: 300536 - DNA, 2304 bp, Proteus mirabilis
atgacaattcacacagagcaaggctttattcttacccgccattggagtgataccccacaaggtatcgctgtctcctattggttggcgacagaaaatggaccgcgtaaagtcacggttgcaaagcagtatgctattggttttgttgcccaacaaaatgaaagtatattacgctcagtggttggtcataatcgcgatattgatattcgtcctctggcgttaaaagactttgaaagacaacctgttttgggggtttattgtaaacaataccgccaacttacccagcttgaacagcaattaaaacagtataatattcgcctatatgaagccgatatccgcccacatgaacgctatatgatggagcgttttatcaccgcgcctgtatggtttcgttatcaaaatagtcatactgtcacgctaaaacctgccagtgattatcgtcctacattacgtaccgtctctttagatattgaaaccagtgagtttggtgagctttattctattggattggccggttgcggtgataacgttgtttttatgcttagcgacaccctcccagaagttcaagaaagccaacaacctgaaggctatcgtctgtgctatgtaagtagtcgattacaactccttgaaaaactaaatgcttggatacaagagtacgatcctgatgcgattattggttggaatcttattcaatttgatttgcgtatcttgcatacccatgctcagcgttacgggatcaatttattattaggacgacaaaataccccattagagtggcgtgaacatggttttaaagcggggcacttttttgcctcagcacaagggcgtttaattattgatggtattgatgctttaaaaatggcgacatggaattttccctcttttagcctagagtcagttgctcaaacactgttaggggaagggaaagcgattgatacaccttatgccagaatggacgaaatcaatcgccgttttaaagaggataagcccgccttagcgtattataactggcaagattgtgtcttggttaatcgtatctttgataccacacacttaatggaattcttattagaaagagccagtgtaacaggactggcagcagatagaagtggtggctctgtcgcagcatttactcacctctatttaccctcaatgcatcgtcttggttatgttgcccccaatcaaggtgaaaaacccgaagagcatagccctggtggttttgtcatggactcaacaccgggtctctatgactcagtggtggtactggactataaaagcctatatccctctattattcgcacctttttaatcgatccggtgggaatgattgaaggtatgcatcaccctgatagcacacatgccgttcccggttttcgtcaagcgtggttttcacgagaaaaacactgtttacccaccattgtttcacaaatctggcatgaacgagataatgctaaacgtcataacaacgccccgctctctcaagcattgaaaattattatgaatgctttttatggtgtattaggctcggtaggctgtcgtttttttgatcctcgattggcttcatcaattactttacgtggtcatgaaataatgaaaaagacccgtgaattaattgagtcaaaaggctatcaagtgatttatggtgatactgattctacttttgtttggcttaaagccgctcataacgaagtacaagcagagcagatcggtcgtcaattagcgcaagatgttaatcaatggtggaaaagctatctgactgaaacttaccagcttgatagccaattagagcttgagtacgaaatccattatcgccgattcttgatgcccactattcgaggtatggaaaccggaagtaaaaaacgttatgcaggactaagtcataataaaatggtgtttaaaggattggaaacagtcagaacagactggacaccactggcgcaagcgtttcaaaaagagctttatacacgcatctttaatcagcaaccttatcaacagtttattcgtgattatgttgctgatacgctattaggaaaatatgatgatagactggtttatcgaaaaagattgcgacgaaaattatcagactaccagcaccatatcccccctcacgtcaaagcagctcgattagtggatgactataatcagttacaaaataggccgcaacaatatcagcaaggcggttggattagttatataattactcacttggggccagagccgttagagcatatcacttcgacacctgactatgaacactacattaataagcaattaatgccgatagcagatgctattttgcccatttaa

SEQ ID NO: 300537 - DNA, 1239 bp, Proteus mirabilis
atggggttgaaaaatttatttgaaaaagtagagcaccattttgagcccggtggtaaatacgccaagtggtatgtactctatgaagcggtcacaacggttttttatacgccgggtacggtgacacgtaatggttcgcatgtacgcgataccatcgatctaaaacgtatgatgatccttgtttggttatctgttttcccagcgatgttctggggaatgtataacgttggtcaacaagcgatccctgctcttaatcagttgtatagtggtgctgagttacagcaagtgattgcttctgattggcactatgcacttgcacagtatttaggtgcatcattgacaccagatgctgggtggggaagtaaaatgctccttggggcaacttactttttacctatctatcttgttgtatttgcggtaggtggtttctgggaagtgttattttcccttattcgcggacatgaaattaacgaaggtttctttgttacttctattctgtttgcgttaattgtgccgcccacattaccattatggcaggctgctttaggtatcacctttggtgtcgtaattgcaaaagagatttttggtggaacaggacgtaacttcttaaaccccgcattagcagggcgtgctttcctcttctttgcttatccggcacaaatttcaggtgatcttgtttggactgccgctgatggtttctctggtgcaacccctctctctcaatggtctgtttctggtcaaagtgcattgttaaataatgtcactcagcagcctatttcttggatggatgcattccttggaaatatccctggttctattggtgaagtctcaacactgatgatcctaattggcggcgcaatcattttatttgctcgtatcgcatcatggcgcattgttgccggtgtgatggtagggatgattgcaatgtcatatctgtttaacttgattggttctgactctaatccattattctcaatgccttggcactggcacctcgtattaggtggctttgcatttggtatgatgtttatggcaaccgatccggtatcagcttcattcactgataaaggcaaatgggcttacggtattttaattggcgtaatggctgtgctaatccgtgtcgtcaatccggcttacccagaaggaatgatgctagcaatcttattcgccaacttatttgcaccgctgtttgactatgtggttgttcaggcgaatattaagcggagaaaagctcgtggctaa

SEQ ID NO: 300538 - DNA, 264 bp, Proteus mirabilis
gtggttatcaccgatgacaatccacgtagtgaagagcctcaagccattattcaagatatcctttctgggttaatggatcctggtcgtgcattagcgattgaaggtcgagcagaagccgtgactaatgtagtaatgcaagcctctcccgctgatatgatcttagtggcaggaaaagggcacgaagattatcaaatcgttggcactcgccgtcttgattattctgaccgattaactgttgcacggttattgggggtgatcgcatga

SEQ ID NO: 300539 - DNA, 1383 bp, Proteus mirabilis; identical to SEQ ID NO: 294069

SEQ ID NO: 300540 - DNA, 1083 bp, Proteus mirabilis
atgttagtttggctagccgaatatttggttaaatatcatacattttttaatgtgttttcttatctgacattcagagcgattgttggtttattgacggcattaattattgcgttatggatgggaccccatttaattgcatggttacaaaaaatgcaaatcgggcaagtggtgcgtaacgaaggccctgagtcacactttagcaaacgtggtacgccgaccatgggtgggatcatgatcctattttctatcgctgtatcaaccttattgtgggcgcgattagataatccttatgtatggtgtgtactcttggtgctgattggttatggcatcatcggttttatcgatgattatcgcaaagtagtgcgtaaagatactcgaggcttaatagcgcgttggaaatatttctggcaatcggtattagctttagcggttgcatttagtatgtacgcgattggtaaagataccccagcaacgcaacttgttgtgcctttctttaaagatgtcatgccacaacttggcatgttgtatatcttactggcttattttgtcattgttggcaccagtaacgcggtaaatttaaccgatggtttagatggcttagccattatgcctacggtgtttgtagcggctggatttgcattagttgcatgggctacaggtaatgtcaattttgccagctacctaaaaattccttatttaatgcatgcaggcgaattggtgattgtttgtaccgccattgtcggcgcgggattaggcttcctttggtttaatacttatcctgcccaagtctttatgggtgatgttggctctttagcattaggtggtgcattaggtactatcgccgtgttattacgccaagaatttttattagtgattatggggggcgtgttcgttgttgaaacgctctcggttattttacaagtaggttcatttaaactgcgcggccaacgtattttccgtatggcgccaatccatcatcactatgaattaaaaggttggccagagcctcgtgtgattgtccgcttttggatcatctctcttatgttagtccttattggtttagcgacattaaaggtacgttaa

SEQ ID NO: 300541 - DNA, 1311 bp, Proteus mirabilis
atggcaaattatcaggggaaaaaagttgttatcgtgggactaggcattaccggtctatcctgcgttgacttttttatccgccaaggtgtaacacctaaagtgatagatactcgccagcatcccgcgggtttagataagctacctgctgatgttgagtatcatacggggagttttcatcaagtatggcttaatgacgctgatttaattgtctcaagtccaggtattgcgttatcaacgcctgagttagttgaagcgcgagatcatggagtggaaattgtcggtgatattgagctattttgccgtgaggcaaaagcacctattgttgcgataacaggctctaatggcaaaagtaccgtaacgacgttggtgggggaaatggctaaagctgacgggatccctgtcggtgtcggtggcaatattggtgtacctgctttaacgttattaacacagccttatgacttatatgtcttagagctatcgagctttcaattagagacaacctatagcttaacagcggctgctgccacggtattaaatattagcgaagatcatatgaatcgctatccgttaggattagaacaataccgtgaagctaaattacgcatttatgataatgctaaaacctgtgtctataatgcagatgatgttctgacattgcctttagccggcaaagatgcacgttgtgtgagttttggtatcggacaaggggattatcaactggataataccaatcgttacttgaacgtaaatggtgaaaatattcttgccacttcacagatgttcctttctggtcaacacaattacaccaatgcattagccgcattagcgttagctgatgcggtgggaatttctcgtaaagcatcactggctgttttaaacacctatcatggccttgctcatcgtttccaattagtttactcccataatggggtacgttggatcaatgattctaaagcgactaatgtaggtagcacagaagcagctttaagagggcttgaagtagaagggactttgcacctgttgttaggtggggacggtaagtctgctgattttagcgcgctattaccttatctcagtggcgataatattcgcttatattgcttcggacaagatggtcaagcattggcaaatttacgaccacaagtctcacaattaaccgcgactatggaagaggcgatgcgattacttgcaccaacagtgcaaactggcgatatggtgctactttcacccgcttgtgcaagtctagatcagtttaaaagtttcgaacaacgtggtgatgagtttgcccgtttagcgcaggagcttggctga

SEQ ID NO: 300542 - DNA, 1194 bp, Proteus mirabilis
atgagtgtatacgcaatgcgaagattaaaacagtggctggtgggaagttatcaaacagataacagcgcgttcgtgccttatgatcgcactttgctctggtttacattcggattagcggttgtcgggtttgtgatggtaacctcggcgtcaatgcctgttggacaacgtttagcagaagatccttttctatttgctaaacgtgacggcatttatatgattgttgccctttgccttgcattagtgacaatgcgagtgccaatggcggtatggcaacgctacagtagcttaatgctgtttggttctatcttgctattactcgtggtattggcagtgggtagctcagtaaatggcgcatcacgttggattgcatttgggcctttacgtattcagccggcagaactttctaaattggcactgttttgttatctctccagttatttggtgagaaaagtagaagaagtgagaaacaatttttggggattctgtaaacctatgggggtgatgttaatattagccgtattactgctattacaacccgacttaggtacggtggtcgtgctgtttgtgaccacattagcgttgctttttttagccggtgcaaaaatttggcaattcctcgccattattggtacaggtattgccgctgttgtgatgttaattattgttgagccttaccgtgtacgacgtatcacttcgttcttagaaccttgggaagatccttttggtagtggttatcagttaacacaatccttgatggcttttggacgcggtgatctactggggcaagggttaggaaattcagtacaaaagttagagtatctacctgaagctcatactgactttattttctccattttagcagaagaacttggttatatcggtgtggttttagtgcttttaatggtattcttcatcgcttttcgtgcgatgcaaattggacgccgtgctttgctgctcgatcaacgtttttcaggttttttagcctgttcgattgggatctggtttaccttccagactttggtcaacgtcggtgcggcagcgggtatgttgccaacgaaagggttaacgttacctcttattagttacggtggttcgagtttgattattatgtcaacggctatcgtgatgttgttacgaattgattatgaatcacgcctagcacaggctcaggcgtttgtaaggagtcctaaatga

SEQ ID NO: 300543 - DNA, 1083 bp, Proteus mirabilis
atgagcgaacgtaaacgccgattaatggtgatggccggcggaacaggggggcatgtctttcctggattagcagttgctcattatctgcaatcccaaggttgggatattcgttggttaggaactgcggatagaatggaagcacaattagtgcctaaacatggcattgaaatcgagtatatccgtatttcgggtctgcgaggtaaaggggtaaaagcgttaattgcggcacctattcgtattataaaagcgatttttcaagcccgtcggattatgaagcgctatcagcctgatgcagtattaggcatggggggctatgtttctgggcccggcggtgttgcagcatggagctgtggcattcccgttgttttacatgaacaaaatggtattgcaggcttaactaatcgttggttgtcaaaaatagccaaacgtgtgttacaagcattccccggtgcgtttgctaatgcgcctgttgttggtaatccggttcgtgacgatgtcttagcacttgaagcgccagcagagagattaaaaggcagagaaggtgctgtccgagtgctggttattggtggtagccaaggtgcgcgtatcttaaatcatacaatgccagtggtggctggattattaggagagcgagttacaatttggcatcaggccggcaaagggagcgaaagtgataccaaattacgctatcaaaatgaactttctaaaaattcagttaaatctgagtataaagttactgaatttattgatgatatagcgcaagcttatcaatgggctgatgttgttgtatgtcgttcaggtgcattaacagttagcgagattgccgctgcggggttacccgctatttttgttccttttcaacataaagatagacagcaatattggaatgcattgccattagaaaatgccggtgcggcgcgtattattgaacaaaatgatttaacgccagaagcgatagctgacaccctagaaaattgggatagacatcagctaatgctaatggcagaaaaagcacaaagtgttgcgattacggatgctactgagcgagtcgctaatgtaattatcgaagtggctaaaaaataa

SEQ ID NO: 300544 - DNA, 1464 bp, Proteus mirabilis
gtgaatacacaacagctggcgaaattaagatcttttgtgcctgagatgagaaaagttaggcatatccactttgttggcattggtggtgctggcatgggcgggatcgctgaagtgttggctaatgaaggttatgcaatcagtggttctgatttagcgcctaacgtagtcacacaacaactcgttgcattaggggcgacaatctattttaatcatcgccctgaaaatattcgtgatgctagtgttgtggtggtttctaccgcaattagtgcagataatccagaaattattgcagcaagagaagcgcgtattcctgtgatacgtcgtgcagaaatgttagcggagttaatgcgttatcgtcacggggttgcgattgcaggaacccacggtaaaacaacaacaacggcgatgatttcgaacatttatgcacaagcaggattagatccaacttttgttaatggcggtttagtgaaatcagccggtacccatgctcgtttaggttgtagccgctatttaattgcagaagcggatgagagtgatgcttctttcttacatcttcaacctatggttgcggtggtaacgaatattgaagctgaccatatggacacttatcacggtaattttgataatttaaaagagacttttattacttttttacacaacttaccgttttatggtcgcgcagtgatgtgtattgatgacgatgttattcggtcaattattcctaaagtagggcgttatattactacctatggttttagtgaagatgctgatgtacgcattactcattacgaacaaaaaggtgcgcaaggatttttcactatttctcgtgaagatatgcctgatttagatgtggtattaaatgcgccgggacgtcataacgccttaaatgcaaccgcagctgtggctgttgctacagaagaagggattgcggatgagcatattttagccgcactacttaatttccaaggcactgggcgtcgtttcgatttcttgggaaatttcagtcttgagcatgtgaatggccaagaaggggaagtcatgctggtggatgactatggacatcacccaacagaagttgatgcaacgataaaagcggcacgagcaggttggcctgataaacgtttagtgatgttatttcaaccacatcgttatacacgtactcgtgatttatatgaagattttgcaacggtgcttaatcaagttgatattttattattaaccgatgtttatgcagcaggagaggcgcctattcccggtgcagatagtcgttcactgtgtcgtactattcgtcaacgtggcaaactagatccgatttgggtttctgatgttgagaacatctcctcaatattagcgggtgtattaacagataatgatcttgttttagttcaaggtgctggaaatattggtaaaatagcgcgtcgcttagcagaaacaaaattacaaccatctttaagcgaggattaa

SEQ ID NO: 300545 - DNA, 348 bp, Proteus mirabilis; identical to SEQ ID NO: 294075

SEQ ID NO: 300546 - DNA, 804 bp, Proteus mirabilis
gtgaatgaatttactatgtcacaagcagcgctaaataataaagagataaaagagaaacgtcattctgatagaccaagtaatggtagctatttatcaggattaatcttcttcttatgtgtgattgccaccattatttggggcggaatacaagttgtgaattggatgaaagatgctaatcgtctgccgatatcaaagcttgtacttactggtgagcggcattacacaacgaatgatgatgtgcgtcaggccattttatctttaggccaaccaggcacttttatgacacaggatgtcaatatcattcagcaacaaattgaacgtatgccatggatcaggcaagtgaccgtacgtaaacaatggccagacgaattaaaaatccatctggtggagtatgtgccatttacccgttggaatgacacacattttcttgatagagaaggccgaattttcagtctgccaacgcgattggaaacacaaggaaattacccactattatatgggccgcaaggaagtgagaaaatggtattagcaggttatttagcaatgagagatcagcttcttgccagtaatctgaaattaaaagcagcatcaatgtcagctcgtcaaggatggcaattagtcttagacaatgatgtccgattggagttagggcgtaaggataccgaaaaacggattgctcgctttattgagctgtatcctatcttgcaacaacagactgacaaacgggttgattatgtcgatttacgttatgacagtggtggtgcagttggatgggctcctttattacttgatgtgaatgaataa

SEQ ID NO: 300547 - DNA, 663 bp, Proteus mirabilis
atgaatcactcaataaaattaacgtcgtttaataaaaaccataaggttattgatattggggatcatctctgcagggttcctaataacaggataaatccaatcgttctcataaagctcattgcttttaagagtatcaaaaaagctgtctacggcatggttatagttgttgcattgtcttgtggtcaagtgagggcgcaaggctctgaagtcatcacgagtgatgcggggcatgtctcttttcccgtctttacaatcgtcgaggaatttatcaagaagcaagaacaacggatctgcaatggcattgaattcctttcttttgtctcttctgcgagcgagggaatgaccaagccaagttcccaagaaaaaggaaaaaatagcccaaaagaaagtaataagactgaggctggttttgagaaacgagaccaagtgacccaagaagatatcgagcatgttaagtcatcccttatcggtatgttatttgcgtccttagtgatgatcccactagggataatgtttagcgagtgtattagcccacgaatattagcaaaacgtaagcgctggatgaagcttcatgagctaaaagccaaacggttttaccggaacaacccagggaagtattacgtgatgccacgcaagactttttgccaatggctgtggttttaa

SEQ ID NO: 300548 - DNA, 459 bp, Proteus mirabilis
atgagtaaccaatcaataaaacaagtagtgaaagaaatgtgtgaggcaacagctggtgggcgtgaagcgatggctggtgcgcttggcctgtctttaacatcattcaataacaagctgtatgaaaaaaacggctgtcgttcatttgatttaaacgaactgttagccatgcaagatatttctaaaactgttctgtttgctgaattcattgctcgtgagtctggaatgttgctggtggaacgtattaaacccgacgagatagatgaacctgagttatttcgtctacacaacaaagttggttcaaaacaaggcgaactggcaatttttttagaaaaaagtttagaggatggcgttgttgatagtgaagaagagaaacaacttaacgtaatgctagatcgcgtaatagcaagtggtcgtgcatttgttaatgcatttatctcattacatcggaagaaaaaataa

SEQ ID NO: 300549 - DNA, 1422 bp, Proteus mirabilis
atgccggtatttattggtttctcggcggcgaaaatatttaattgtaaccaatatttagctgcaatggtctgtttagcgatggttagccctgaatggacaagcttagttaaagccggtgagcctgtcgaatttatgcatattcctgtcgctttggttaaatattcatctcaactgatccctgctttaattactgtttggatgatgtcttatatagaacgctttattgttcgtattgtgccagaaatggttaaagtatttatggtgcctttattggtgattttagtttcgacacctattgcgttgattgcggtcggtcctgtcacttcatggttcgctcaattaattgctgatggggtgatcttaatccaagagcacaccggttttattgctattccattattagtggctatttatccatggttagtatctattggtatgcataaagcacttagtcctgtcagtattatgttagtggagcaaaaaggttttgacccgattattcgtgttatggcgctatgctccaacatgtctcaggctgctgcttctttagctgtttctgtgcgtactaaaaacaaaaccttaaaacaattagctttttctgccagtattaccgccttttttggtggtataactgaacccgctatgtatggggttaacctcaaactgaaaaaaccaatgtacgcttgtatgattggtggtgctattgcaggattatttgctggtattgttaagttaaaagcgtttgtctatgtcactccggggttattaagtttaccaatgtggatatctgatacagataaccaagtagtaaatgcaataatcaccttattgattgccagtgtagccacttttattgcaacgcttattattggttttgatgatcctactgacgatccaatccgtgacgaagaagaaaataataaacaagctgcatcaaccaacaaaaaaccacaaatagcgaatagtaaattacctgttgggttaatttcacctctgcaaggtaaaacggttgcactttcagaggttaatgatgaaacatttgcctctggcattatgggacctggcatggcaattatccccacaacaggaaaagtgattgcacctgcagatggcgttgttgatattaccttttcttctggtcatgcgattggcttaacactggttaacaatattgaaatgctgatccatgtggggattgataccgttaacttagcgggacagcacttcacatgctgtgtcgttaaaggtgagaaggtgacaaaaggtgatacgctaattgaatttgatttagatgcgataatagccgcaggctatgatccaacaacgatgatcatcattactaatgatgatcataagctagacgttgttcagaccgataaaaaacatgtcgaccaaaatacagttttactaaccgtgggttaa

SEQ ID NO: 300550 - DNA, 261 bp, Proteus mirabilis
atgaattataaagaatttgcaaaacaaattctcgctattgttggtggcgaggataatataaagtcattagtacactgctccactcgattacgttttacattacataatgaagataaaattgatccttcaaaagccaaagcaaatagtaaaatattatctgatgtgatgaagggaggacaatatcaactggttatcggtaatgatgttgataaagtatttaatgaactaacaaaaatgataaaaacaaataatactccttaa

SEQ ID NO: 300551 - DNA, 858 bp, Proteus mirabilis
atgatgaaacttaaacttcgtcatcgtcggcttaggaagtttcgtaagataaaaagtttacgtagacaacactcacgttgtcgttattttcatttaacccataaaacggaacatgaaatgaatttacccaaagtagtggtgctaaccggggcgggcatttcggctgaatcaggtataaaaacctttcgatcagaagatggattgtgggaagagcatcgcgttgaagatgtggcaacgccagagggatatcaccgcaaccctaaactggttcagcagttttacaatgagcgccgtcgtcaattacaacaaccctcaattcaacctaatgaagcacattatgcattagcaaaacttgagcaatatctaggaaaggacaatttcctgctggtcacgcagaatattgataacttacatgaaaaagcagggagtaaacatattctccatatgcatggtgagttactgaaagtccgctgtccgcaatcaggtcaagtttttgaatggaaaggggatttatcaacgacagattattgccattgttgccaatttccctctcctctacgtccacatattgtttggtttggcgaaatgccaatcggcatggatgaaatttatcacgctttagcacaggcagatctctttatcgctattggcacttcggggaatgtctatcctgctgctgggtttgtccatgaagcacggttaacaggggctcacacggttgagcttaaccttgaacctagcttagtggagagtgagtttgaagaaaaacattatggccccgcaagccaagtggttgatgcatatgtccataaattgtttgatttaattaatgatcctaaagctgatttgacgcaataa

SEQ ID NO: 300552 - DNA, 669 bp, Proteus mirabilis
atggtgcgagaattagcagaaaataataatcaactcaacgagacttttgggcaaataagtgcattagaaaaacaaaaattagaatatgagcaaagaatattgcaacgtaatgccaatttccaccaactagctcgaacagagctaaataaaatacaattacaaatcagtgaaacagaaaaacaacttattatagaaacagataaattagctaaaatggcaattatcgcaccgatatcgggtactgtaatggatctttctgtttttacccaaggtggctttgtaaaaacaggtcagacattgatggacatagtgcctgaagatcatcaacttgttattgaagcgcgtcttgctccgcatcttattgataaggtaactcctggccttcccgttgatttgatctttagtgcctttaatcaaaataccacgccaaaaattcctggtgaagtaacgattatttctgccgatagattaattgatgaacgaacaactgagccatattatcaagttcttattaacataaaagattatacattattagcagataataaaaataaattgaaagcaggtatgcccgttgatgtatttattaaaactggcgatcgctcattattaaattatcttttcaaaccagtattggataggctccatacttcattaacggaagaataa

SEQ ID NO: 300553 - DNA, 300 bp, Proteus mirabilis
gtgaagagaaaccggccatacggcgatttacagcttaatccctcgaatcatcaagtcactttaaatggtgaactattgttattatcaggtaaagagtaccagttattatatgagctgatgcgcaatacagataatgtagtacgtaaatctgatttagaacaacgcttatttggcttagatgacaaaattgaaagtaactcacttgaagttcatatgcacaacttacgccgtaaaataggcaaagagcgtattattacggttcgcggtatcggttatctcttaaaaaaagaagtgaactaa

SEQ ID NO: 300554 - DNA, 357 bp, Proteus mirabilis
atgaatattttattagttgaagacgatctgcaattgggaaaggcgctctgtcgtggtctagaaattgccggttttcagccctgctgggtaagattgcttacggatgcacgtgttcaattaaaccaaaaagcctttgatttaatgttgcttgatctaggtcttcctgatggtgatggtcaagatgaacttatcgcactaagaaaaagtggtgaaaaaatacccattattattttgacggctcgtactcaaatagataacttagtacaaacattagattcaggtgccgacgatttcttaccaaaaccttttgctatgcctgaattaatttctcgtgtaaaagccgtaagtcgccaatag

SEQ ID NO: 300555 - DNA, 618 bp, Proteus mirabilis
atgaagcaatatggtttttattttgactccactaaatgcactggctgtaaaacctgtcaagtcagttgcaaggacgaaaaagatttagatttaggccctaaattccgtcgtgtttatgaatatggcggtggtagctgggcaaaacaagacggtatctggacacaaaatatttatagttattatttatcaatttcttgtaaccactgctctaaccctacttgcgtggcaggttgccctactggcgcgatgcataaacgtgaagaagacggtttagtggttgttaatcaagatgtttgtgttggatgccgttattgtgaattacgctgcccttatggcgcaccacagtttgatgaaaagaaaaaattgatgtcaaaatgtgatggttgctatgaacgtgtcgcccaaggtatgaaaccggtctgtgttgaatcttgtccacaacgtgcactggattttgatgatattgaagtgatcagagcgaaacatggtacagagtgtggtatcgccccaatgccagatccaagcttaactaacccaaatatcgtgataaaagcacataaagatgcaaaaccttctggtgataaaaccggctcagttcaaaatgcggcggaggtataa

SEQ ID NO: 300556 - DNA, 705 bp, Proteus mirabilis
atgttaaacgaacaaaatcgtgctgagtttctgcaaactattgctcaaaaattaggacgtgaggtgacgcatacgccaaaaccacaagatccccctattaataatttagctaaaacacgcttaacaaatttaacccaagatgaattatgcaaagaatttactgattttgcacaaacccagcaagtaagatgcgttatcactaaaccagaacaagtgataaatagcttaatagcgctttgtgaaagctatgattgtcaaggctcagtgataataagtggagatgagcgcttaaatgcacttggtgtaacacaagctattagtgaaaaatatgaaacttatatttgggatcctaaactcggtcatgaaaatattattcatgctgagcgctctcaaatagggattgtctttgcagaagcgggattaacagaatctggcgggattgtgctgttttcttctccggaaaaagggcgttctgtcagcctgttacctgaaacctcgattgttattttacgcaaaagtgacattttaccgcgagtggctcaacttgcagagcgtttacacaaaatggcacaagatgggatcagaatgccttcatgtatcaatttaattggtggtgcaagctcaacggctgatattgaattaatcaaagtatggggagttcatggccctgttcatgccgcttatcttattattgaagattgttag

SEQ ID NO: 300557 - DNA, 1134 bp, Proteus mirabilis
  misc_feature (9)..(18): n is a, c, g, or t
atgccgacnnnnnnnnnncacagttgtcgtcaacgtcatgtctcattagcgattgcctataatgtgtggctatattggctaaatactcatgatcaccaatttatggaacagtatggacttgaactactcaatgacattaccttgttctggttagaccaatgtcagtgggatgaaggcgatcaacgttttcatattaatggagttatggggccggatgaatttcatgagaaatacgcagactcacttgaaggtggcttaaaagataacgcatacactaatttaatggtggtttggttgtttaatcaaatagagatgttcataaacaatgatcgtttttctaaaaaattacaacagctaaacagccaatctagcgttttcaataaaatacaagaagttaaaaatcgtattgctatcaatattgatgctcatgaaattattgaacagttctcaggttattttcaattaaaagatctggattgggaaagctatcgaaaaaaatacggcaatatctatcgtatggatagaattttgcgtaaagaaaataaatctgccgatgattacaaagtagctaaacaagcagataccctgatgttatttaataacttagataagcaaaccgtacattccctaattacctctcttggttattcagtttctaagcactttgctgaaaaaaatctacattactatttagaaagaacctctcatggttccacactgtcacgcattgtccatgcttatctcgcagaacaaatacagttacatgatttgtcatggcaactttatcaagatgctctttattcagattataatgatattcaaggtggaacaactgccgaaggtattcatactggtgtcatggcggcaacattaaataccaccatcatggcttatgccggtgttgatattcgtcaggatatgttgaccatcaccccttcactccctcaacaatggcaaaaactaagctttaaattattgcatcgctctactttatatcaaattaatctcactcataaagaaattagtattttaagtgataagcccagtactattttaattaaccatcaaacgcataagctaaccgccaatacgttattagtattaaatttaaatggagacacgcaaaatgactaa

SEQ ID NO: 300558 - DNA, 546 bp, Proteus mirabilis; identical to SEQ ID NO: 296552

SEQ ID NO: 300559 - DNA, 1938 bp, Proteus mirabilis
atgccaaacatttcccctagaactgatgaagttattgcttatttagatagctttgaaaatattgtttgtagtggaaatagtgatgatatattgatgggaagtgataatgataattatattgatgcagcttatggtaaagattatgtcttaggattaaaagggaatgatacgattaagctatctgaaggtttcgctaatggtggtgaggggcatgatacttatattatttcacgactaaatgctttttataaagggaaagcagaagtatctattatcatcaatgaagtaactggagatgaaaagctagaaaataatcaaaatacttctgagcaaaatattgttaaactagaacataacttaaaagatataaaatcaataaaacgtattggttcagatattgtttttttattagataatggctttattatcaatgaagataagacacaaacgccgcttcctgcaacatcgatacgtttaaaaaacatatttaaaaatgagaacagttttgatgtactaactaattattgtattattacaaatgatgggtttattttaaataataatagcgatgctaattgtaatagtgatccgttatttaactttagctatatggagaattattcaaatcttgatgataaatatgaatatatatacataaatagcaataatcatgagtttaatcttcgttcacgctcctgttctgttaaatataatatactgcctgaattaaaatacagcggacttgctaatggtaactcgatagaattatctattgaaggtgatagtggcaataatacttatttagccattgatcataatgcgcgaataacattaaccgcaggtgttgatgtttatcagctaaaaacgtttatagctcaaaacagcaatgagcgtattgagatatttcctagtaaaacagttgatgatgaaagtgttgataatctatctacctttattttaccggatgttagtgggtatgatcttaagtttgaaaatggtgttatctctcatcgctataatccagctgctcatcgctttatagatataaacatgactgaaaaaagtttaaataaaattttaaattcaggtattcaaatcagatttattgataaagataataagatgtttattttgccaaatagtgatagcgctgaacagttgttaatacctgttgttaaagaaaaattatctatcagttattttgatgattatgttattattcctgaatcccttatcttaaataagataatgatggaaaatagtaatgtttatttatctccgccattacaacaacacgcattcttatctaatttgcttaaacatcattcaattcaaaatattgaattattacctattatcgatttgctaacaggtgatgatatgttgataaataaaaatcaaggttgctctgtaattgccggaggtaaaggaaacgatactctaattgttgagggcggacagcatattttatttgccaatgaaggggatgataagctctatggtggtaaagggaatgatgttcttatttcagagagtggtaatgattatctggaaggtggagagggggatgatatctacctaattaacaaacatcatggtgagatcacgattaacgatcatgtagggaaaaatgttatttttattactgggttggataaagatgaagtgatgttatcttcccgtgataatgatgatgaagttcttctttctcaggataaaagttttactgtgagaataaaaaataaatataaagaggagctgcagagcacttatcagattgaacaaagggaggaggtgctgagtgatgaagcattagtctctattgtgcatgaaatggctcagtttaatcaaactcagttgtcttctatgcaaggaacctttttgcctgaagctaaagaatggactttaatgccaaccatcactaagcatttaggttaa

SEQ ID NO: 300560 - DNA, 336 bp, Proteus mirabilis
gtgattcactattcagataaaatagatgacgataaaattattattttaattaacgaagttaaagcaaaagaacttaattgtccttttcctctttttcatatagaaaatcctaatgatgaattgctctctttaggctttaacttaataagtattgaagatgataataaaacccattattggattgagcgtgatgatgaatctaaattagcgccattaggttacaaagcggaacgttcagaaagttacttttatagaaaattctctgatctgatcacattaaatctttttgtaaccatttttcaaaaactatttttgttaaatatggttttttcttag

SEQ ID NO: 300561 - DNA, 138 bp, Proteus mirabilis
atgctaattactatttcaccagctaaaacactggatttcgaatcgcctttagcaacaacgcagttcacccagcctgaattgctaaaatattcccaacaacttattacaaactgtcgtccagtgatatcgcaagcttaa

SEQ ID NO: 300562 - DNA, 810 bp, Proteus mirabilis
atgtttattgctgcattaatttttgttttaacgatcaccttggttatctggcagccgaaagggttgggtattggttggagtgcaacagccggcgctatattggcactcctttttggtgtgatcagttttcaagatattccgattgtttggaacattgtgtggaatgccacagcgacatttgttgcagtaattattattagcctacttttagatgaaagtggcttttttgaatgggcggcattacatgttgccaagtggggtggtgggaaaggaagattactattcagttatatcgtgctacttggtgcaatggttgctgctttatttgctaatgatggtgcagcattgatactaacacctattgtgattgcgatgttacttgcacttggtttcaacaaaggtacgacattagcctttgttatggcagctgggtttatcgcagacacagcgagcttgccgctgattgtttcgaacctcgtgaatatcgtttctgcggacttctttaatattggatttactgaatatgcatcaattatggtgccagtcgatattgcgggaattgttgcaacgcttgtgatgctacattggtttttccgtaaagatattcctaaccaatatgatgttaaaaagctgagtgagccagctttagctattaaggatatgactacgtttaaagcaggttggcttgtattgttgttattgctcattggtttttttattttagagccattaggcattcctgttagtgcaatagcggcaattggcgctttaattctttgggtaattgccaaatttaattctgcttattaa

SEQ ID NO: 300563 - DNA, 729 bp, Proteus mirabilis
atgggacaagttctatttgttgtttggcgagaaagttttgaagctctgctggtggtagggatcatttatgcatggataaaacgctctcctacccctaaacaaggtatgaaatatctctggggaggagtaatagtaggaatactactctctattcttttagctcttagcatttatggggtatttagctccttagaagatatctggcaatctctgtttatggttatgatggaaatcattgcctgcctattaattgttcagatggtctattggatgaacaaacaaggtaaatcactaaaagccaatatcgaaaacgaattgacacaaaaaacgcaacaacaaagtgtctgggtgattgaagtattcattggcctattgatagcgggactaactctatggttatttttgctaacatcaaaaatgatttcttggcgtaaattctttgttattaccggatttttactgcttttcctcgccgtttccttgctattaaaagcagtagaagagatagctaatctacttattgaaatggatattgaattacctgactttttgatttatccactatgggatcttagccatattctggatgattcaagcatttttggtaatttcttagtttcattctttgcttatcgctcacaacccatcggtttaagtgttgttacttttattgtgttttggttggtggtcgcactgttatttaaacaaggggatcgtcatgccaaatag

SEQ ID NO: 300564 - DNA, 885 bp, Proteus mirabilis
atgtcttatatatcaagagaaaagatagattacttgtccattggtcatcgactgcgtgcttatcgtattgcctcctcattaaaagctgaagatgtagctgaaagtttagggatctcccgtgccgctgtctatcgattagaaaagggtgaaatcgttaaaattgagacattagataatcttgctcgattacttaacacctcattaagtagcttattaggtattaatacggagtattactctagcgctaatggtttttttgaacgaatgcgccaacttgaaacgcaatcttcccatatttatacccatttcgaacccttttcttatttattaacctctgattgttatgataaaacgcttgtcgaaatgttaacagaagcctctcctgaaaatgcgctaacaaagaagcaacaagaagttttatctattttaaaagagcgtaaaaagcatcaatcattacactcaccgcatatttataatctaattagccagcagcaaatcgaaaaatttctttatgttggtatgctaggctctgttaatgtaagtaaagccattcaacaagaaagaaaacaacgcgcaaaacaagaaatcagccatttaattgaaaagttagagcaaaaaaatagtcatcttaatattgcgattatttcagatacgatgccatctttaacctttcaattgttttatcaaaacaaagcacctctctctttagcggttagtccatttcgtttaggtgaatttcctaatgtaagtacgggtattgcgacagtatcttcatcaacagaagcaatattccaatatcaatctctgtttgatacgttatgggcaaaagcaataaaaaatgatgatgccattacacgcctaaaagagattatcagtcattattga

SEQ ID NO: 300565 - DNA, 1098 bp, Proteus mirabilis
atgaaagaggcaggccttgaagtctatcgtgacggtattggcacactctacgctcgcttaccggggcaagatagaacattacccgccgtaggaacaggctctcaccttgataccgttccccaagggggcgcttatgatggcgccttaggagttattgctggtttttatgctttgatgcaatacaaaccacaacaactgaaacgtgatctagagttaattgtattccgagcagaagaatcgagccgatttgggttttcatgtatcggaagtaaagtgctaacaggaaaaattgaccgtactcgatgggaacaaaatagagatgatgaaggtaataatttctttgatgttttaaaatcccttggttatcagcatgaaaacttagatcaatgtttacttaaatcagaccgttatagtgcatttgttgaattacatattgaacaaggtaaacgtctagaaaacgatcaaaaaacaattggaattgtcaatggtatcgctgcgccaacacgcttttcagtcaccgtaaatggccatgcagaccactctggtgcaacgccaatgtatcaacgtcaagatgcattagtggcgagtgcgggtattattactgatatcaatcatgctgcctgtacggaagcggtatacggcaccgtaggtaccattggtaaacttaatgtcataccaaactcgatgaacgttattccaggacaagtaaaattctccgtggatattcgtggtattgatacggacagtattcaacgtgttgtacagcgtttaacaaacagtgttgagaaagcagaaaaagattttggtgtaaaaataatagtgcaacctatttcggctgaatcaccagtaaaactggatgactcaatttgccaagttattgaaaatatttgtcaaaaacacgatatcaattatatgactatgttaagtggtgccggtcatgactcaatgaatatggcatctttatacccgacagcgatgatttttaccccctctgttgcggggattagtcatcacccagatgaatttacggagtttagtgatattgcaatagctgcagatatcttagcggaaacattaggtgttctagctaatcaataa

SEQ ID NO: 300566 - DNA, 1599 bp, Proteus mirabilis
atgaatattattaatcaaccttggttgccttttcgttttcgtgatggcgagattaaaacacttccaatatcagctatttcacatcctgatattattgatttctcattaaatagagccgattttaaaggtgctgcttatcaatttgcaatagggttattacaaacgatatttgcaccagaggatgaagatgaatgggaagaatattttgaaacaccaccttcaagtaaaaaattacaatctgcatttgataaagttgcacatgcttttaatataatgggtgatggccctttatttatgcaggatttttcaactttagaagagcaaaaaaatattcctatagctcagttgctaatagatgctcctggtgaaaatggaataaagcaaaatacagaccattttattaaacaaggtattgctgatgtaatgtcattagagatggctgtgttagctttatttaccttacaaataaatgcccctagtggtggcaaaggtcatctagtcagtctaagaggaggtggacctttaacaacattagtttatcccgcagaagaaaattcaacattatggcaaaaattatggcttaatgtaattaatagagaattttgggaatatgatgaaccaaattttgatgatggtagtgtttttccttggttaataccactaaatttaaaagaaggaaaaggtgaaaaagtttcacctgatgatgtacatcccctttatatgtactgggcaatgcctcgtagaataagattaaaagtagaaaataaatctgtcacttgtcaaattagtgatatgaaaagtaatttttcagttaaatattatgttactaaaaattatggattagactatcaagaaggttggttacatccattaacgccatattattgggatcctaaaaagccagaaatgtttcctaattctattaaaggaagacaaggaggtattcactataatttgtgggatcgattatttttatcaagtaatgaaaatggacaaaaaagcgctactgttgtcagtcattacttaaagctatatcaattattagaattcacaagaaagcctagattacttatttttggttatgatatggataatatgaagccacgtggatggtataatttagaaatgcctattttccatgtaaaagatgagtataataataaaattattaatgaaataaaaattatccaaaaattaactatagattgcttaaaaagtgtaaaagaacaggtgaaaaaagcgtggtttagtagtcctaaggatatgaagggcgatattagttttattgatttaactttttggcaaagaagtgaaaatatattctttgaagtggtacaaaacattatcgttcaaatacaaaaaaatgattttctaacccatgaacaagccaaaaaatggttaaactctattagaaaaataagtatttctatttttgatgaatatgctttatcagcattaggaacacaaaaatcagttagtgggtgtattaaagcaagaaatggtttaattaaagatctttatagtaataaaagaataaagaagtttgctgaagactttaaaattactaaggaaaatggagaacaatatgggatcttataa

SEQ ID NO: 300567 - DNA, 1104 bp, Proteus mirabilis
atggcaaatcacaaagaaacctgtctgagtgctgcagagcgtgtgtttgatacccgaaccgtggataccctaacatgttatcatcgagagatggtaaagatgttgatggatagtgagtccttttattctagtccaaataactcacagataaatactaatgagagattagagaacaaaataaaaagcaataccattgaaaataaagctgtgaagggatcttatggtgatattttaaataatttaaaccagcagctaatgaataataaacctgagattgagccttatttctcacattacaactctcccgtcatgcgattggcgaaattaggctacctttctgcactggcctataatgctgataatgtttttaacaaacattcacccatacaaaaacagcaagagcaaaaaataactcatgatttgtgtaaactaatcggttttgaaccagataaagcatttgggcatattaccaccagtcatgtttttgcttgttatgaaattttgtgggctttgagaaatttaaaaacactgccgatggcgattgcacgtcatccaaaatcaagagatctggttgcagataaaaaagcatttgagttatttaatatgtctatcactgatattttatccatcagtgaacagctatatgagcgagatatttttgatgatgtcagccatttaacttgtcgtggtacaggcatgacaagaacgatgcatttaggtaaattactagtaccgatataccgcttcgaattttggaagaaggcgatggatatcttggggttaggttatgataatctcattgccttaccaatagatgaagagtttaaaacagatatagctaaaacgcgtcatattgtgcttcgtctaatcgagcagggagagccgatactcggtattattggtgtgttaggctcatcgacatacggtagcattgacaaacttaagcctcttttcgaattacgtgaagagtgtgaaaaacaacataacaactcattctatattcacattgatgcatcccaattaggttatatgaaaagcctgtttcttgacgaaaataatagcatcatcccttataacatattgtgcgataaacttaagcaataa

SEQ ID NO: 300568 - DNA, 1167 bp, Proteus mirabilis
  misc_feature (1108)..(1117): n is a, c, g, or t
atgagtaaaataaaaacccgttttgcaccaagtcctacaggctatctacatgttggtggtgctcgtactgcactgtattcctggttatttagccgtcacaacaagggtgagtttgtactgcgtattgaagacaccgatttagaacgttctactcaacctgccattgatgcaattatggacggtatgaattggttaaatctaaactgggatgaaggtccttactatcaaaccaaacgctttgatcgttataatcaagttatcgatcaaatgttagcagctggtactgcttatcgttgttattgttctaaagaacgtttagagaaactacgtgaagatcaaatggcgaaaggtgagaaacctcgctacgatggttgttgccgtcacggtgatcacaaccataccccagatgaacctcatgtagttcgttttttaaatcctcaagaaggatctgtgatttttgatgacaaaattcgtggcccgattgagtttagtaaccaagagcttgatgacttaattatccgtcgtactgatggttcacctacctataatttctgtgtagtgattgatgactgggatatggaaattacacacgttattcgtggtgaagatcatatcaacaataccccacgtcagatcaatatattaaaagcacttggtgctccagtacctgaatatgcacacgtatccatgatcttaggtgatgatggtaaaaaattatctaaacgctataacgcagtaagtgtaatgcaatatcgtgatgacggttatttaccagaagcgttattaaactacttagtacgtttaggttggtctcatggcgaccaagagatctttagcatcgatgaaatgattaaagatttcactttagaagctattagtaaatcagcaagtgcgtttaatactgacaaattactttggttaaaccatcactatattaataccttacctgctgaacaagtagccgtacacctagattggcatatcaaacaacaaaatattgatactagtaatggcccatcactggttgaattgattaaattactcggcgagcgttgcaaaacattaaaagagatggcggaaagttgtcactacttttatgtcgactttnnnnnnnnnnaaaaaacacttacgtcctgtcgctcgtcaaccattagaagtagttcgtga

SEQ ID NO: 300569 - DNA, 147 bp, Proteus mirabilis
atgatttattctatggcggtgatggcaatgatttattttatggtggctctggaaacgatgttatatacggagaaatgggaaatgatgtgctctatggtgatgatggagatgatatgcttattgattattatggtgctaatatgttga

SEQ ID NO: 300570 - DNA, 468 bp, Proteus mirabilis
atgatatggcttaacaccccacatgaactttctttatttggcttaacgctctcttggccctcttttgaatttttagccggtattattgggcttaccttttactctgtaccttttattgcccaagagctaagagcaggaatacagggagtcagacaaggccaaaaatatgcagctttagcgttaggattaacccactggcaatccatgcgttatgtcattttaccgcaagcttttcgtatcgcccttccgccattgttgggtcaatatatgaatattatcaaaaactcctctctcactatggccataggtgtcgcagagctttcttatgcttcaaggcaagttgaaactgaatcattacgtacttttgaagcgttcggcgtcgccaccatactgtatatcgctgccattgcattaatggaagcttgggggcaatggcatcagcaacgaaaattagcgcaaggatattga

SEQ ID NO: 300571 - DNA, 840 bp, Proteus mirabilis
  misc_feature (816)..(825): n is a, c, g, or t
atgcagcagcaactgcttacatggatacgtcagtttaatgaagagtacgctcaaatcacttctctgttacttgttttattgatcatttttgttgttgctcttgttctccactttattttgcacaaacttgtgctccctaagctttcaaaagctatcagtaaatacgatcaaaagtggcaactctcttttgaaattaataagttattcagtcgatttgcctttcttatccaaggtgtagtcattaatatccaagccttattatggatgggacccggtaaaacacaggagatattaaccaccacagctcaagcatggtgtttacttttcggtttattgatgattttctcaattatggatctctgtttgcagatcatgagaaattccccttcttttggccgattaccccttagaggtattttccaaagtttaaaattagtcgccagcgtgctgattggtatcatgattgtttcattactgatcggtaaatcaccgcttattttattaagtggtttaggtgccatgactgcggtgttgatgttggtatttaaagatccaattatgggacttgttgccggtattcaactctccgccaataatatgattagcttgggtgattggttagaaatgcctaaatatggtgctgatggtgccgtagtggatattagcctcaccacagtaaaagtacgtaattgggataataccgttacgaccattcctacttattctttaatttctgattcgtttaaaaactggcaagcgatgacacaatcaggtgggcgtcgaattaagcgcagtttatctcttgatatcaatagnnnnnnnnnngtatttactttttag

SEQ ID NO: 300572 - DNA, 759 bp, Proteus mirabilis
atgttattagcatctaaaaatgattatttggtttctattataatgccttgctttaattcagctaattttatacaagaatcaattgattctgttttgtcacaaacttatcataattttgaattgataattatagatgatgcttctaatgatgatagtctagatattataaaatcttttagtgataatagaattaaaataattgaattaaaaaaaaatcaaggtgcaggtgtttctagaaataaaggaatcgagatggctcaaggaaggtttatcgcttttttagatagtgatgatatatggcataaagataaattatcattacaaataaaatttatgctaaataataaatatcacctaacatataccaattatcaatgctttgataaatcaggaatcaaaaacacaaaacacccaccaaaatcaacaaattatgataatttgttgtattgtaatgttatcggttgtctaacagctatttatgatagccaccttattggtaaacaatatatgccactaattagaaaaaggcaggatatgggactatggttaaatattatgaaaaaatatggtcctgcttattgtttacccaaaactctagcttattatcgaattgattctgggatgacccaaaataaaattaatgcagctatttaccagtggatattttatagaaaagaattaaaatttaatatatttaagtcaacaaaatattttataggctatgcttataatggattaataaaaaataaggtaaaatag

SEQ ID NO: 300573 - DNA, 948 bp, Proteus mirabilis
atgataacaatcatcggtggctcaggctttattggcactcgcttatcagatcaattaactaaagaaaatattgagtttaaaattgtggatattgctaaaagcgataaataccctgagaaatgggtttttggcgatgtcactaagccagaatctttactcgaaccattaaaaggctctaatgtaattatcaatttagcagcacaacataaagataatgtttatcctattagcttatattatgaagttaatgtcgatggtgctaaaaatgtttgtgatattgccgaacaattaaatattaaacatattgtatttacttcatctgttgctgtatatggttttgtcgaaaaagaaacaggtgaagatggtgaattccatccatttaacgattatggaaaatcaaaacttgaagctgaacataagtatgaagcttggtataaaaaagataatacaaatacattaattgtaatcagaccaacagttgtatttggtgaaggcaatagaggaaatgtatacaacctattccgccaaatagcttcaggtaaatttttaatggtaggttcaggtaataataaaaaatctatggcttatgtagaaaatattgcagctttcttaaaatttgctactaaaatagaatctggtcatcatatatttaattatatagataagcctgattttactatgaatgagttaaccgatattatctatactgctctcgacaaacgccatagtcatattaaagtaccttatgctattgggcttcttggtgggtattgttttgatattctggctaaagttacaggtaaagagtttcctgtaagtagtattcgaattaaaaaattctgtgcacgtactcaatttaaatcaaatagtattgctaacactcattttaaagcgccagtctctcttgaacaaggtattgcgaatacagttaaaaatgaatttatgtaa

SEQ ID NO: 300574 - DNA, 858 bp, Proteus mirabilis
atgaacatcaaacaccttgcgatagcgacttgtatcggcattgccgtgccgacaattgctcacgccaatacaaatgaattatcgatagaacaacgtttagctcgactagaagagagaacgttagccgctgaaaaaagagctgagttagcagagcaacgtgccgctaagttagaaaatgcgttaaaacaaaatcaggcgcttaataacaatctatcacaaactagcgaaactataactgcgccaccgtcatcgctgatagaaacaaataccggttatggaaaactcaagttatatggtgatgttgaatttaatacagatattgcaagtaaaaaaggccagctaacctccattaatatgcgctcaggtaaagaaaaagactatggcgattatgataaatgggggatcaatgggcgtatattaattggcttagacggagagcgcctattagataataaaaattatgcaggcttcactgttcaaccactggcaaatattgatggtaaggtatctctcgacgatgccgctttttattttggtaaaaaagagcgttggcaatttaagttaggtcgttatgaagcttatgacatgttcccgcttaatcaggatacttttgttgaatattcaggcaacactgcaaatgatacttatagtgatggttttggttatatctacatgatgaaagaaggtcgagggagaagcaatagcggtggtagcatgatgtttaatagccaatataataattggtattttgaaactaatttattaattgaagatggaacgtctatttttgctaacaaggaatatcacggaaataaactatataataataaaatggaataccgcttatttagacgctaa

SEQ ID NO: 300575 - DNA, 1347 bp, Proteus mirabilis
  misc_feature (623)..(632): n is a, c, g, or t
  misc_feature (1101)..(1137): n is a, c, g, or t
atggggaaatatagaaaaaactcaagtgatgaacgcatacatactccttttattaccggttttgaaggtggcattaattatttaaatcataattttctagggggtatggaaatatcatcaaaatataagtccattgtaggtagcgtaaatagcgtttttggtgaacatcgtcctttatctactggctttggtattaaatatgcatcttcttctaataaaggtgatggcttccaagcaaatgctaatttaagtttacctgtatcagtattctcactaggcttatcaacaatatatcgttcacgtaactattcgacactctatgaatctctacaaatagataatatagaaaacccattagatgataatcttgctaataatcagacaaaaacatcaagctcattatctctaagcttaggaaatcaacgttatggatcactgagttatagccttagctatagccaatattatggtgataaaaaagacaattattcaaataccatttcttatggaaaaagatttccatttatgtcttttaatattagctatcaaaaaagtagtaattttgaagatcgtacatttgtaaacttcaactacagcatgatttgccgcttgtacagtaccannnnnnnnnnagacagtaaagataagaatattagcggtaatatcaatgcaacaaccgcttacagccaaattagtgcgacaggctcctttagtaatagtaatcaaaaatcggcgatgctgacagcatctggtgctattgcttatagtgatggattatttgctacttctcctgtggagttaggagatactttcggtattttacgtgttccaggacaatctggtattttagttaactctatgggtggtggtacgacaataactaatcactttggtaccgccgttattcctaacttacctgtaaataaaaaaacaactgttctattaaatactaaaaatttaccactcaatgttatgttaggcacaacatcctttgatattgcattggcaaaaggtactgttttttctcgtgagatccctgtcaatacaatgaagcaagttttattagaaataaaaaaaccagatggtaaacctgttaatacnnnnnnnnnnnnnnnnnnnnnnnnnnnnnnnnnnnnngttaatacagcaaatagtgtgattgatgataagggaaatctaataggtgttattatgggggacggtaatgttataataagtaatgagcaaatcggtaagccactaaaagtaaaatcagataatggtgacatctgttctgttgattattcagttccagaagaatttaatccagactttttatatgaaaaagttgatgcaatttgtaagtaa

SEQ ID NO: 300576 - DNA, 486 bp, Proteus mirabilis; identical to SEQ ID NO: 298414

SEQ ID NO: 300577 - DNA, 966 bp, Proteus mirabilis
atgaaatactttgaaatggaaaataaagcgaatgtattattcggtgaatataatggagtgacacttcccaaacgttatactaatgaacatgaggcttatttctcggtaagaaatagcatattaatgacagacttttctcattatggcatggtgaaaatttctggtgaagatgcttggcggttactcaattatcttatttctgcagacatttcatctattcgtgatgaacaactactttatacattgttgctagataaagaagggaaaataataagtgatgcctatgtactatgtgataatgaacactattttttaatttcagagtggatgaatagtgatgccatatgccagcagataaaaaaagtattagataagcaagatgaacggggtgaatgctaccaaattgatgctatcgcttctcttactccagattggcgtatgatctgtctagaaggcccctatgcttgggaaattttatctgaaatcgtcggtatggatattattggattaccttttcatgagtttatgtatgttgatgaagatgtcattactatgcgtgttggtaaacacggtgaatattgttatcacattatgggagatgaagagaagttaatgtctatttggcgacatttatgcactttatctgagaaatttgatttaaagattggcggggttgatgatttaaaaaatatacgactagaaaacccttgttgggagcctcaagtgattaatccttttagtcgctgtcctattgagttacaaatgcaatgggcgattagttacgataaagatgtatttattggtcaagatgcaataaaacaacgtgctgataatggggtagatcagaaaatagtgggcgcaagaataattaatatgcctcagaatgctgcaattttacaaggcgatgcaatctattaccaaaatgaacaaataggcgtagttattcaagtgggatactcgttgtga

SEQ ID NO: 300578 - DNA, 951 bp, Proteus mirabilis
atgagtaatccatttacgatatctaacgttcctgaacaactagagacctcccctttaatagatgaaagccatcactatgatgaccctttaccgccaaaagatctcgtatttttacaaagtatcaacaaccaagaatgtaagattaaatcatcacaagtcaatggtcgattcacgaatactgtcccgatgtttttggtattactagtaatgatgttttataccctatttaattttattgaaggacatattattacaaaatatactttagaaaataatattaaagaaattgaaaattatagtacctattatacagggaacgatcgcgttgtacttagggatataaataaatataaacctttctttggaaaggaaaagataagttggtgggaatatatcaaagcatataattcaggtgaattttttgtaggtagtgaagatgacaaatattttgtcctcgcatggttagttttatttcccagtggattatatatcttaagctcccttgctttctttgtgccaatgacctatttggtggctgatagaaaacgacagatcttatattcttatgtagatggcattgtgatggcaacccgttatgaagatgctcaattcggttatgccggtaaaatgttagcatttaaattattctatatacatcctgaaactggtgagctaggaatacatatatatcgtcccaatgtctctcactacacaggttttttattaagtagtgatactgaagatcaccgctttattacttttcttaatgcctatatgcaacaagggcgtgatgcagtctgcacaagtgactattatgcacgagcaccactattctgctttgcgaaaaacccacttcctgctgattttgagcaacaggtcgaacagattctggcaaagcttgatcaggagaaagaacacatgcgtaaaattgataaggaaggtacggaatga

SEQ ID NO: 300579 - DNA, 912 bp, Proteus mirabilis
atgatcactggtgctgcgcaaatggacggcgctattctggtagtagcagcaactgatggtccaatgccacaaactcgtgagcacatcctgttaggtcgtcaggttggtgttccttacatcatcgtattcctgaacaaatgtgacatggtagatgatgaagagctgttagaattagttgaaatggaagttcgtgaacttctgtctcaatacgatttcccaggtgatgacactccagtaatccgtggttcagcgctgaaagcactggaaggcgaagcagagtgggaagcaaaaattgttgaattagcagaagcactggattcttatatcccagagccagagcgtgcaattgacaaaccattcctgttaccaatcgaagatgtattctcaatctcaggccgtggtacagtagttactggtcgtgtagagcgtggtatcatcaaagtaggtgatgaagttgagattgttggtatcaaagaaaccgcaaaaacaacttgtactggcgttgaaatgttccgtaaattacttgacgaaggtcgtgcaggtgagaacgtaggtgttctactgcgtggtacaaaacgtgaagaaatcgaacgtggacaagtactggcgaaaccaggctcaatcaacccacacaacaaatttgaatcagaagtttatattctgagcaaagatgaaggtggtcgtcacactccattcttcaaaggctaccgtccacagttctacttccgtacaactgacgtaactggtactatcgaattaccagaaggcgtagaaatggtaatgccaggcgacaacgtgaacatgatcgttgaactgatccacccaatcgcaatggacgaaggtttacgcttcgcaatccgtgaaggtggccgtacagtaggtgcgggtgttgttgctaaagtattaggttaa

SEQ ID NO: 300580 - DNA, 942 bp, Proteus mirabilis
ttggcttggcgaaaaaaatgtgcagatttaggtgattttatttgcttaaaagaattagctataatttatcgagacggtaaagagggggttagaaagaacattgcgaaagcatctgaatatgaacgacgtattagcatcaattcgtctcactttgagctggaatcagaaaaatatgaaatagatagaagatggaaggaaaaaagagataatacacttgattatttactaaaccaaaaagagagtagtaaacaacaactagaattagcaagattttatagtattgaagatagtggaagaagtttaatttatgccaaaaaagcatatgatttaggaaataaagaagcggctgagttaatttattggtactatatgcaaaatatctgtgaagataaagataatatcaataaagcagactactatcttaaagaatggctaacaacaggagaagaacctagtaaatacagctcttctaatgaatacaaatattctagtattagtatcattgctgattattatttagagtcaccgtgtttagttgaacgaaaccttgataaggctattgagtggtatcaattatcgttagattatccatatgaaataaatgattttttgtattctgaattaaataatatgtatactaatgcaccaaaatacataagtaaggatcctttcgtgaatgtgtatttatctacactaaaaaatcataacgattatattttagatatgaatattcgattaggaaaaatgaattttgcaatatcttcttttgacaaactttatgaagcacttctactcaaaggtgatgtgaaagaagcatattattatggtttactattaaattatgatgtgaataatgtcgctatgttttattctttatctgacattgagcgtaaaaatattgaatatcgtgttgctgattatttaaaagaaatacaaaaataa

SEQ ID NO: 300581 - DNA, 801 bp, Proteus mirabilis
gtgaatgtgccctttagcgtatttgataatactttttattataattttaatgcgaatagtaacaataatagttcaagtacaggaagtgtatcggcatctcagttaaataatcgactaaattggagtgtgcaacaagcatttaccaatcaagatcaaggatcttctggaaatatcaatgcatcctacaaaggccaactaggtgatattacgggggggtacagttatagcaaagataatcataatctttactatggtgtgagcggtagcgtcgttgctcattctcagggagttgtttttggacagcaactgggagaaaccgcggcaatcgtagatattcctaatgcgggtgatattacgatattaaatcaagcgggagttaggactaataactcagggtatgcattagttccttatgtcacaccatatcgtaaaaatactgtcgagatcgatacattaagattgccagagaatgctgaaatggaacttaccagtcagacggttttaccgagtcgaggggctttagtaaaagcgaatttttcagcaaatgtaggctatcgtgtattaatgacgataaatttggaaaacaaaaagccagtaccatttggcgctcaagctatttttaaagacaatagtcagttaaatagtattgtaggtaatgatggagaagtttatttatcagggctaaaacagaaaggaaactttactattaaatacaacaatgaaagctgtcaggtaaattatgatctatctgatattccagattatttagggctctataaaactactgtaacttgctattaa

SEQ ID NO: 300582 - DNA, 747 bp, Proteus mirabilis
atggatattcctcgtattttcactattagcgaaagtgagcatcgtattcataaccctttcacaccagagaaatatgccaccttaggtcgagtattacgaatgaaagaaaactggcaaattcttgatctcggaagtggctctggtgaaatgctatgtacttgggctcacgattacaatattacaggtattggcatcgatataagcccgctgtttactctacaagcaaaatctagagcagaagagttaggcgtcagccatcgagtacattttatccatcatgatgcctcagattatattagtgataaaaaatgtgatatagcagcatgcataggagcaacttggattgctggtggtgtaattgaaactatcgagctactagcaaaaagtattaaaacaggtgggcttattcttatcggagaaccatattggcgacaaattccaacaacacaagagatagcacaagcttgtagtgcttcatccatatcagattttttaactttatctgagcttgttgtctctttcgacaatcaaggatacgatctagtcgaaatggtactggcagatcaagagggttgggatagatatgaagctgctaaatggatgactatgcgccgttggcttgacaaaaatagtgccgataattttgctcaagaaattcgaacagaattgactatagcccctaaacgtcatgttagttttacacgagaatacttaggctggggggtatttgtattaattgctcgataa

SEQ ID NO: 300583 - DNA, 240 bp, Proteus mirabilis
atgttgtgtgaaattggttctaatgttagattaccttttgctgggaaaaggcctgggctaacatcgaatttatattcaacagtagtttcacttgcttcgccattgatggtacaagttggtggttggatatccccacttacttttaatttagcggttggtgtcgcagcgaaagcgatactacttgataaagtaagtaaagaaatagctaataagctttttttgaacatatatcctccatga

SEQ ID NO: 300584 - DNA, 549 bp, Proteus mirabilis; identical to SEQ ID NO: 297464

SEQ ID NO: 300585 - DNA, 429 bp, Proteus mirabilis
atgttatcggaacaacaaaaagccgctagagcactctctgatacattaattaatgaattaaaagcacatgatattattgtgatcacggcgcctatgtataatttctccatcccttctcaattaaaacactatatcgattttattgcgcgtgcaggcgaaacttttaaatatactgaaacagggtcagtcggattacttgaagataagcaagttattgtattaacgagtcgtggcggtatccataaaggacaaccctctgatttaattattccatatctaacacaatttttatcatttattggtattaataatgtacagtttattctcaccgagggtactgcgctaggcgaagaatatgcccagcagtcacatgctcaagcacaaaaagaaatagatttaataattaataaagaaataatgataaaataa

SEQ ID NO: 300586 - DNA, 540 bp, Proteus mirabilis
atgattatagcaattagtgctacaacaattgtaaaactgtttttatctcctcaacaagaaataaaaaaagtaatattagtactattaataataatactagctgtagcttatataatattatttaatgatacactattaaacataatagttaaaagattgaataatatcaatagtgccagtgggagatttgaattatggtccttagcatttaaggcctttcatgaaaggcctattttcggacatgggatatttacaacaaaatatatttttgaacaaatattagggaaacctgcatatactcataatacatttattgaacttcttcttgaaggagggtcttatcttatcttttcgtttgctgcatttttattttatttattaacccaaatatttaataaaattaaagataatacttggttgttttgtatttttttatttattataattcaatttatgactctttctttatctttcaatgagttcatatactttctcttttcatttatccttatttattcttctcgaaaaaatttaaggtaa

SEQ ID NO: 300587 - DNA, 249 bp, Proteus mirabilis
atgcctatacgagtacttattttccctgcatattctaacttattagaacgatgttttaacatccctttcgcaacagcaatttcaatgatttcagaaattccattatatgccatttcagaccacattattgctaaatttcttactatctctttgcgttcatgtggttttaaatttccattttcaagtgattcaatcatatttaaagttgaaactatagtttgccaaactccaaaaccaatatttacataa

SEQ ID NO: 300588 - DNA, 555 bp, Proteus mirabilis
atgttggtacaggtttggtccgatattggtgatattcactcttcaccagatacgaacagaacaccacttattatattaccacctatctttaaaatggctcctggtgagttgagctcacttcgtttagtgcttagttctcgtgataatttacccaccgatagagaaagtgtattttggcttaacctttatcagataccaccagaaaacctcgcaacacaagatgtgtcacgaaaattaattttaccactacgtttgcgattaaaagtttttattcgccccgcaggattaaaagtaccgacagaaaaggatgaacagcgtctacattttagtgctacctcacatggtgtgatgataacaaaccccacaccgtggtatatgagtctagtgatcatgactagcattgataagcgtagacagcataatattatgctggcgccctatgaaaaaaactatcttgatttaccacaatccgttgttgaaggaactaagatagattatgccgtgatcaatgattcaggaaattggcgagtgtattcaacaactttaacaaactga

SEQ ID NO: 300589 - DNA, 273 bp, Proteus mirabilis
gtggcagataagatttggactggatcgtccgcaactatttttaaagataccttaacagcgttaactagtgaacctcaagcccaggttgataaaaacaatttaaaacttatagctggaaaagtgtttaatgcaaaaatacaaataggagcttataacgaaagtaggtatgcgtatattttatcaagaaaaaaattggcacaaaacaatatcgatttaactgatggaattgattatataggtgaagctgtttttacttttaactttggtgtctaa

SEQ ID NO: 300590 - DNA, 213 bp, Proteus mirabilis
atgtctaattcaatgactggtacagtaaaatggtttaacgatgataaaggttttggtttcatcactcctaaagatggaagtaaagatgtatttgtacattactctgcaattcagagtgatgacttcaaatctctgatggaaggccaacaagtttcatttaccatggaaaatggtatgaaaggcccagcagcaggcaacgtggtggctctctaa

SEQ ID NO: 300591 - DNA, 351 bp, Proteus mirabilis
atgaaaaaaaacatatacatatatataaaaaaagcatcatgtctacttataacatctaaactagaatgtctccctacttcaataattgaagcaaaatatttatctactcctactattgccttttccgttccttcaggtatacctgaaatgattacaaacaatgtagatggatttttgataaaagataattctatatacgaatatgcagaaaaaatgttatctttagataatccaagtattctttactcgatgaaaaaaaatgctactttaagttattctaagtatagtgaaaaattatcttatgatttttatttaaatcttttaacctctttagaagaaagaaatatataa

SEQ ID NO: 300592 - DNA, 390 bp, Proteus mirabilis
atgtctaaatcggcaaaaggtacgacagaacggcatggacggaacgtaaaagctaaatctggtttaaaccgctcaatactggagcagggctggtatgaaatgcgccgtcagcttgagtacaagcagctctggcgaggaggtcaggtactggcaataccaccagcctacaccagtcagaagtgcgcttgctgtggtcatacagcaaaggaaaaccgccagtcacaaagtcaattcgagtgccttgaatgtggatatacagcgaatgctgatatcaatgcggcacgtaacattttagcggcaggacatgccgtgcttgcctgtggagggagggtgcagtcagaccgcccgtcgaagcaggaacccgccgagttgattcagacatcagtctga

SEQ ID NO: 300593 - DNA, 204 bp, Proteus mirabilis
atgaaaaatagtattggagaaatgaatattaataagcaattagatgaaaataataacattgagcaagatgagtattttttaattgcatcaagaattgatgaaaataaacgggtagaattggcaataaaatcatttattatttataaactgttgggaggaaaaagaaaacttttaatttgtggtgatggtgatttatcccaatag

SEQ ID NO: 300594 - DNA, 234 bp, Proteus mirabilis
atgaaaataagtaaggtatgtattagcctcattttatacttaggctatgcagctttattatatgcagaaaataataatttagatgatatctattttgatccagattttttagagctgccaaataaagatattattgatttatcttcttttgagaataaccaacagctagcaggtgactattatgttgatatttatgttaacactaatttaattttaactaaaaatattagataa

SEQ ID NO: 300595 - DNA, 198 bp, Proteus mirabilis
atgaaaaatactgatgctaaattattcaaccataaaatcttacctatttctcactatttatctaaagatgatttatgcaggcattttcgcattagccgcacaacactgaatcgatggataagacttagtaaaattccactaccaacaaattggggtctgttacgattggttggtcaccagagaaaattaaaaatatga

SEQ ID NO: 300596 - DNA, 1989 bp, Proteus mirabilis; identical to SEQ ID NO: 293500

SEQ ID NO: 300597 - DNA, 240 bp, Proteus mirabilis
gtgttaaaagatacttatacatcaagagttgagaaccaacgtttccaatctaatagcgcatcaatggcaatgaaagaggattgttgggcaagtggtagttcttcggctcaccaagggaatgcaacgttaattaccgttgtcaccatcgcgagtaaaacctatgagtttaaacaacatgttaattgggatggagatggtgctccatcacaaaataatataacgaaaattagccaacgttaa

SEQ ID NO: 300598 - DNA, 1227 bp, Proteus mirabilis
atgcaagaattattaaaacatcgtcaattggttattacgttgtgtttgctttatctagcacaaggcattccgatgggaattgcaatggatgctttacccacattattacgccaagaaggttcagctttaagtgcaatcgcatttattccattagtcggattaccgtggatattaaaatttttatgggcacctatagttgataattattggtttacatcattaggtcgtcgccgtagctggattattcccatgcagattattgtgacgctctgcttattactcttagcattgataggaatttcagttgagatggctaaatggggtgtcgctttattagctatcgcttcgttagcgagtgcaacacaagatatcgcaacggatggaatggcggctgagcatgcgagtggtactctattatctaaaatcaatgcaattcaaattgcaggcgtgatggggggatttttcttaggaggggctggaatgatgatgctaagtggcacattaggacagcaaaatacattgttattttttgctttgatccctgctattagcttgatatcgattacgctatttcaacaaaaagccaaacatgaagctggagaaaacagcgatcatcttaaagcaagcttattaaaaacggtacgaagaaaaggcgcaataagattattaacactgacattgctttcagccgtcactgcggtttcaggctttggtttggcaaaactgtttttaactgatagtggctggtctttagctgatatcggaaaaatgggcatgatggggggaatagtaacgttgttttttggctgcggtggtggggcttggttaattaataaaataggtgtttggcgtgctttttctgcaggactattgtgtgctctaggctcttcactattatggctttcacaatcaacgggaatgattagtctttctctggttgctgtatgtgttgttttaggctctttatcatcagggatcacttctgtagctattatgacagctggtatgcgatttgcctcaacagataatcaagctggtacagatatgactgccgtacaaagtatgcgtgatattggtgaaatggcgtgtgcaattatgttagtgagtttaactgcggttattggatatagcggtggttttggattggcggctgtgattgcgcttttggctttattggtaacattggtaaatgtaaaatatcaagagagatataaattaatggaataa

SEQ ID NO: 300599 - DNA, 1407 bp, Proteus mirabilis
atgaaagcaatattaaaacgccaatttttacagcttcatcgccaaacaggcactttatttggcatcctattatttattattttatttacaggtacatggtcattagtacatgaaaatttaaatttgtgggttaaatttaagccgttaaataaagaattattgtcactagaacagctattaataaagggtgaataccttttaggtgaaaatggttttaatcgtgtgaaattagcttctgttgatcatcctattatttatttttgccaaggaatggagagatgttcactgcatttagatgcacaaacgggtgaagaaattaaactcactgaagttatttcacctattgttaatttacataaaaatctatttatgggtttttctggacgattatttattagcttatttggttttgcttttgcgctattgctaataacgggtattgttatttatcaccgtaaaatccatcaactatttcggctccgttttaatcaagggcgtaggctgtttttctttgatttacataatttcattgggttattgagttatccgtggcttgttgtatttgctttaacaggggcattatcaggattaggggcattcggtacattaatgctcgcaaaatatgtcgagccagaagcaccagcgcaagtgatgatgaacttaatgggacaatcgacacctatttcagctgagttttttgcatcttctcctcgctcattgttaattaaactgtcacaagaaaaaccagaatttattcctgagactatttattggaaaaatagaggtaatactgaacagcaaattacggtgagtggtattcatttatatttacccagtactgcaaattttgaacagttctcctttttggatttagataatcatcggattacagaaaaaagttctgtgtctcagcagttttggacgcgtgcatttattgccgttcaacctctgcattatggacaatatttatgggcaggttcatcgagctttgttttattggcgcttcattgcttaatgggaatgatggcctgtgtattaacctttagtggattaatgatttgggtattaaaaagacccattaatatcagttcccgtttagtgctaggaagttgcattggcttaatttttgccagcacatgtttaattcctattgctattttctccgcgttatcaccgatactacctttttttagtatctggttaataacgcttcttttttattctttttattcgcaagtgatccaacttactttccttattttaaccataagcagtgcgattttattaatgagtgtttttagccacttatttattactcatgcttctttatggtggataagttgtgcgttgctgataagtgccattttttattttttgataggtcttttcctactgaaaagagcgtaa

SEQ ID NO: 300600 - DNA, 255 bp, Proteus mirabilis
atgcaaaaagcactgctgatcagttgtgcggttttaggcagcgtaatagggagtattacgttgtcattactgatagctattttttatcccagtgtagactcacttaatcgtctatatgccgcggtctttttacctgttttatttttatgtggcatgctctgttttagcttgctttcagtaaatggaaagcaggtattttggcgagcatggagctggtggcctttacctttaatattactggagtttattttatga

SEQ ID NO: 300601 - DNA, 2193 bp, Proteus mirabilis
atggtttacatttccgcgttagctaacttagataaaacacagacattatcaccagtattaaatcaacgtacacaaaataaattggcattaacacaatgcgctatcttgtgttctaccgcgttattttcactttctgctatcgcaaatacagcaacagaaaataataaagcggtcgatgttttggtggtgactgaaagcgcgacacaaaaccgcgatgatcttgctcctggcgtgagtacattaagtaaaatggcactaaagcccagagagatcccacaaactgtctctgtgatagacagagagcaaatagaaaatcaaaacctaaacactctcgatgaagtgatgactcgtgccaatggtgttaccagcgccccgtttgtattattaacaacggcttattacgctcgcggttttcaaattaactcttttgagcttgatggtgttcctgcattaatgggaaatatggcaagttcgccacaagatatggcggtgtatgaacgtgttgagatcttaaaaggctctaacggattaatgcatggaatgggaaaccctgcggcaaccgtcaatatggtacgtaaacatgcacctttagaagatcaattaaaagcaacattcacggctggaagctggaaccgttatcgcggtgaagtggatgtgggggggcgtttaaatcaagcgggtagcgttcgaggtcgtattgtaatggcatgggaagataaagatttcttctacgatatttcagatcaaaagacccgtttgatttatgccactgtcgatgcggatttaacgcctaacaccctattacgtacgggtattcaatatcaaacaatagactccatcaccaatatggctggtgtgccaatggggaaggatgggcacgatttacatctttcacgtaaaacttatttagatgtggattgggatcgcttcaaatgggataccacgcgtttatttgcaggggttgaacatcaaattaatgatgattggttgtttaaagttaacgctgattatcaatatgctaaggcacgtttattgtatgccggagcatggggaaatatcgatcctgaaacaggtgatggtgccatgttgatgggaggagcatacaagtttcataactatcaaatgagccttgataccaatgttactggaaaactctatggctgggaattacagcatgacgtgatagttggaatgagttactcgaaagcgagtgaagaacaacatactgggcaatttaaagatccgcttaatgtacccgtgaatgtttatcgttgggatccgcacagtgtaccaaagccacaaataatgggatattcctctcaaggagcgacaaaaacagaacaaacaggcgtttatggaatgagtcggatcaaacttattgagcctgttacgttggttgctggggcaagagcaagctggtgggaagtcacaaagccacaagctcaattcactgaaaatggaaaaattaccccttatggtggtttgatttgggattttgctcctcaatggtcatggtacagcagttattctacggtttatcagccacaaacaggaaaaacctggaatggcgaaatgttaaagccagtggaagggcaaacgattgaaacggggctcaaaggcgctttgataaatggtggactgaatgtctcagctgctgttttccgtattgatatgaaaaataatccgcaagaagatccagcacatcccggaggtggttttaatacctatcttattagtggtggaaaagttattagtcaaggttttaatattgaaggcacgggatacctatcaccattttgggatctctctatcggttatacctatactgacacgaaatataaaaaagatactcttaataaagggcatagttttaattcattagtacctcgccatatggtaagagcgtggacaaattatcagttaccttgggatgcgcgtaagtggagtgtgggtggtggtattcaagcacaaagtgaatatagcaaaacaaacggtgaagtcacgttacgccaaggtggctacgcgctagttaatacgcgtttaggttaccaaattaatgaaaactggtcagcggcattaaatattaataacatttttgataaacgttattactcaagccttttctcccctcaatggaataaccgttacggtgaacctcgtaatgttatgttgaatatcaaggctgatttctaa

SEQ ID NO: 300602 - DNA, 1641 bp, Proteus mirabilis
atgaaggctaatccctttgtttcattactcttatctttaaaatatccccttagctttatggtcgttagtgctattttagaagggctatgtggattattgttattacccattattatctattgggatcacgaaccaagccaatatttatggatgctcgcggggttaacattaattacacttatttttcagtatatagccacattaaaaggttttcttgcggggacgacggtgatgaaaatcttagttcaagcattgatccgccatttacctcgtagcctaacaccaccacctcaagcacaaacactatgctcaggcgctgcaatgagtgcaatgagcattcctgcccatttattatctccagtgataagtgtggtggttacacccttaaccgtgattattggtcttttattttataacgttatatttgcttttatttttatgatatctgcattcctgctggttattgtcatgcgaataagtgccaaaggattatacaaacaagaggcaacactccagacggcggagaacattgcagctaaaacattagctgattttgcgcagcatcaggcgttattacgtaaaagcgaacgcaatacacagttttcacagcaattacggcaagatttacgcgcacaacatcaccaacaggtacagttattacagcgaagtttaccttaccatttaattttttctctctgtattcaggttatttttatcactgttctcgtgattggggtgatcaatattgatgctaatcagctcactttagcgcagtggttagccgttgttgtattaattgcccgctttattgaaccgttatttcagctttctcatattgatcaagcactaagacaaagcaaacaatcactcactttaattaaaaatgcactggatacaccaatattacatagtccaataaagagtgatgtaccgaaaaactatcagatccattgtgaacaactcaatgttaataactcgacaggtaaagccattctttctgatatttcagtctgttgtcccgataaaaaaatgactgcggttgtggggagttctggtgcaggtaaaacaacactactccatgttttagctcgtcttatcgatgcggataaagggcaaattctttatggtgataaaaaagttaatgatttatctgagagtgtattagcgcaaacaagacaaatcgtatttcagcataatcaattaattaaaggcactttacgctggtcattattgcaagatgagcaatcaacagtcagtgataaagatattttacaattacttaatgcattaggtttatcgctgactcaagcggatttagatgacgatgtgggagaactgggggatcgttattctggtggacaaaaacaaaggctatgcttggcgcgttcattattagccgatcctaaaatcctatttttagacgagcctacagcgagccttgatacaattagtcgtgaaaaagtcacgctttatcttgaaaacttaacatccacacgagttgtgatcacacatgatcctgatgttgccaaacgggcagatcacgtcattgtgctagaggatggaaaagtcattgcagaaggttcgcctaatgaattgttgttatcttcaacatggttctcacgtttttgtggatcatattga

SEQ ID NO: 300603 - DNA, 1695 bp, Proteus mirabilis
atgcataatgaattatgggcgttattgcgcccttatcgccctttgttaataggtgccttgttgctacaagctgtcgctggttttagttctttagtaccttggttagcactttatcaacttcttctttctttcccttttaataatacgttgtggttaaccattgctgttattggtggcgtggtatggcttatctcacaaaccattgcatttcatttgacgcatttaatggatgctaaattaacctatcaattacggttagcattatcagaaaaaatgcagagattaccgctcaattggtttattagccaagggaaaaacggtgttagccaatatgttcaacatgatattaaagcattacatcaattaattgcgcatgcacctgctgatattgtgcaatttatcgttgtacctgttattgcgatcattgtgttatctatattaaatttttcattactactttttgcttttattcctcttatcattgcttatttttgttttaaacaaacgcaatcttcacgttatcaaacctattgtgaacagcgtgatagggcgatgaaaacactctttgaagattatcaatgtcttgcggaaaactcacttattgcacgtcaatttccacataaaggtattatcagtaaaacagaaaaagccttatttaattttgtttttcattttcaaaattgggttaaacgagttggattattaggttcactgactcaaatattattaagtgcgactttgttaacgggatggttattactgggcactattatttttgaacaagtattacctttggcagacttattactgtttattttattactaagacgtattgctgagcccgtcatggtgatggggcatggtggagatgctttacgcatggcaaaaaaatcagcacaacgaatacaacaattattacagcaacctgaaatgcaatatggtgagcaatttttagagcaaatttctcatcatgtaacgttaaaagtgaactctgtttgcctctcttatggagataaaaagatcctcgataatattaatattgaaattaaaaaaggagaatttattgccattgtaggtccttctggcgcaggaaaaagcacattattacaattgattgctcgatttatggatgcaacatcaggtgagatcttgattgagaataagcatttacaaacatattcgcgtcatgcattaaataaaattaccacagtagtgatgcaaaacagtcaacccttaccttattccattaaagataatttattgttatttaatccgcattgcagtgaggagcaactgcaatctacgataaatgaaaccgcattcactgaagttattaaacgcttacctcaaggtttatcaacgatcatcaatgatgaaatgcctctttctggtggtgaagcacaacgtttggcgatagccagagcttttattgccaatagtccgctgttattggcggatgaaccatcttcagcacttgatccagataatgctcaatatatttttaatgcattgaaaaataaaacaatgacaagaattgttgtgacccattctttggcgctggcacagcaggtgaatagagtgatatttatggctgatggaagattagttgcgatgggaaaccataatgatttgctacttaagagtgaacattatcgtgattttattcagaaacaaggagagcaaaatgaaggctaa

SEQ ID NO: 300604 - DNA, 894 bp, Proteus mirabilis
atgtctcaacattcttcattctattcatatattggttatcaacctaagcatcagcaggttgaagaataccgtttccaagaccaaattttattacgtcaaggtgtattagaaactaccgaagatctacacattgaagagacttatcaagccggttttaatttagtggctgttcatagtggaagggtgattagtgaaagtgtcaatgggcagaaaatagagatagcgacaccgagtatttttattgcgagtagtgttgagcgctattctttattaaatcaatttaaatctggtgatcctcttagatacacgttgttgcaattatcatctgagtggcttgaacaacaacatattttattgcctccaatactgcaacaaaatcaatcactcatgttgcatcatctgactatggataacacttttttagcgttaaccatgcagttattccaaaatccagttcacgactccttaaaaccactttattactttggcaaagcatgcgaatttgcttcattaagtttgcaatatttatgtcatgcgcaagagcctgctaatcgaccattaagccagcgtgaaaagaatagcctaaaacaggcgaaagagattttaatcgctgaaatggaaactccgccaaagcttgaaatattagcgactcgtgtgggcttaaatacacgaaaacttacccaaggctttcgtcaattatttggcaattctgtttatggttggttacaagaatatcgcttacaaactgcatataatatgttgctaaatgaaggggaatctatctcaagtattgcctattatgttgggtatacacctgctcatttttctgtcgcatttcgtaaacgttttggtatattaccaagcgatgtacgcaaaggacatttcacgccttaa

SEQ ID NO: 300605 - DNA, 753 bp, Proteus mirabilis
atgaaaatatttaatatattattttttggtttattaattattagtaattcctcaataggtgatgaataccctattatcaccgataaaatgttaagctcaggatataacaaattagagttgcagtatgatcctcaattacctttgattacaccttaccctgaaaataaagagcttgtttatcctcttattaaaaaggctaaaaaaaataacaattctaatgatagctatcttattgcttccattttctttgttggttgtactaatttaaaatataaaattactcatgaaagtgataaaaaccagtgcgaattatcacgtaatttcttaaaaaaaacattagcattgaaccctaaacatggagcagctctattctatcaagctgttatttttgaaaatggttatggtgttgaaaaagatataagcaaagcaattaaatactatgacaaagcatgtcgaataaaaggaaacaaagtgattattgcttgtgaaaatcttttttctatctatttgcatggtaacaaaggtgttcctcaagatttaaacaaggccaaagaatatgcaaaatggattgctgaaaatgggagccaaaaatatcaagaatatataaaacgttgggattacattttattttctcttgaattaagtttaaaactaaaagaatgtaaaaaaagtgggataaatgcatctatatgtatccgcaaaagcaataatgcactcttggaatattccaataaaatgtacccaattgagtaa

SEQ ID NO: 300606 - DNA, 300 bp, Proteus mirabilis
atgtccactttaggtaaactacttaaaaaacaatcagccgaagcactggcaaaaattgaaacccgagcagaagaaattcgccgtgaaatcacactcgctaaaattcgtgaggaattaaacctttcgcaaacagagttggctcaatcgcttggtatttctcaaccctctatagctaagcttgagaatgttgataacgatccaaagctatcaacgttaaagcgctatataaaagctttaggtggtgaactttctatagatgtgacgttaccaaatggtaagcgcatagggctgcatctttaa

SEQ ID NO: 300607 - DNA, 693 bp, Proteus mirabilis
atgaaaaaagtattacttagccttactatgctggcgataatatctacgccggtattggctaaagctcctgtagctaacttaaaaatcaacggtgatattaagccaccaacttgtactattaatggtgaagagaatgatatttttattgattatggtaagatatcaccgtcgcttattcccgagaattctaattatgctttaggctctagagaaaacgacatggtaatatcatgtgatgctattacttatttaacttttactgtatctgatacatatacatcaaataaagcgccagcttggcataatggtatttttgggttggttaatgctgaaaaccccactcaagaagtaggaggcattctacttttcattaaagatatgaaagtagataataaaccagtttatgcgggaagggttgactcaaaagaatcaacttggcggactgagataatagtcaaagacacgttaactggctggactactgaagctcaaatatccaccagtaaagataatttaaaacttgcacaaggaaaaatatttagtgcaaccctacagacaggtaaatccgatgctgacaaaccaaactatgggtatatcttatctagaaaagcattatcagaagataaaatcgatctaactaacggtttggattatataggtgaagctgtttttacctttaactttggtgtctaa

SEQ ID NO: 300608 - DNA, 789 bp, Proteus mirabilis
atgaaagcgagactaaaaaatgcgcttgcactactagaatgtcatgatgtagagacgctagctgttcaatttctaaaatatagcttttttcgtagctcactgagtgggttaattatttcgttaatgaataaagctgaaaataaattggaaagttggaatatcgacttaacgcttcaagtgcaaagccattttttagataccgatattaccgatgcagatcaccctttaattcaactgctgtttaagggtgaacctgtattttggcaaaacttacaacaaggtagttatattaataatgctgctatgcgcggttttatttcacagcttccggtgaacaccggattgtatagtttgcctatctatgatgttaaccataaagcatgcggcacgattattcttttagggcaagctgaagagctagaaaatatcgagcaaggtattttccctatttattgtgaactatttaatcatcaattaaagcatctttttgaattatcaaatatgcaacaaaaaatctcttacttgcaatatatcaatcaattacaaagggaaaaagaaaccacgcttaatgaaacgttagataaattaaccgcatctgtagcgactattgcacttcctaccatacaaatcaaaggagttaatgatttagaagttgctatagaaaattatgaaaaagaaattttattagataaacagcaagaattgaaaggagatattaacgccatggcagaacagcttagtatttctaaacgagcgttaatatataaattgaagaaatacggagtataa

SEQ ID NO: 300609 - DNA, 1401 bp, Proteus mirabilis
ttgaccgattttacatcgcttggtttaagtgaggcgcttctccgcgctattgatgaacaagggtataaaaccccaacccctattcaacaacaggcgattgagccgattttggcgggtaaggacgtattagcgagtgcacaaacgggtacgggaaaaacggccgcatttacattaccgatactggaaaaactcgctacatcagcagagaaaacgaaagggcgtaagccagttaaagcgcttattttaacccctacacgtgaattagctgcacaaattgccgataacgtaaaagcttatagtcgttatttacctattcgttcattggtggtttttggtggcgttagtatcaatcctcaaatgatgaaactacgaggtggcgtcgatgttttgattgcaacaccgggccgcttacttgatcttgaacatcaaaatgctgtcgacttatctcgcgttgaagtattggtgttagatgaagctgatcgtatgttagatatgggatttattcatgatattcgtcgagtcatcaataagttaccgaaaaaacgacaaaatttactcttttcagcgactttttcaaaagagataacagggcttgctaactcactactcaacaatcctataagtattgctgttgcccccaaaaactcagcggctgaatctgttgatcaatatgtccatttagtggataaaaagcgtaagacagagctgttatcacacttaattggcctagaaaattggcctcaagtccttatttttactcgaactaaacatggtgcgaataaattagctgaacatcttaatttagatggcatcaaatcagcggcgatccatggtaataaaagccaaggagctagaacacgtgctttagctgattttaaagacggtaaattaaaagcgttagttgccactgatattgcagcgcggggacttgatattgaccaacttccttatgtggtcaactttgaattaccgcaggtagcagaagattacgttcatcgtattggtcgaacagggcgtgcggcggcaacaggtaaagcgatatctttagtttgtgttgatgaacatggcttattagctgatattgaacgcttattaaaacgtgaaatccctcgtttagcattagaaggttatgatcctgatccctcaataaaagcggcacctttgcataaaaagccaaagaataaagcacgtaataataataaagaaggcggacatggtcgtgctgatatgcgtggtaaagataatcgccatacaccacgtaataaaaatagtcgtaatcaaaaagagagtgaaacgggtgagataaaacagaataaatctaaaccagctagacgttcacgcaaacacgatgatgatcgtgataatcaaaatccttggtcaaaagctagaaaagaattttga

SEQ ID NO: 300610 - DNA, 462 bp, Proteus mirabilis
atgaaatacggaaaactctatgccgtcattgcgattgtaggcattattgtgggaggctattgggtgattaattggcaagctaacagaattaattcactgacagatatcaacaaaaaactggccgtggctctcgaagaacagaagtctattaatactgactatcaagcacgcataatgcgattaaatcagttggatattcaatatacgcaggagctagcgaatgctaagaatgaaattagtcacttgcgtgatattagtgagcgtcatccagagcgggtgtacatcaaagccgagtgtcccaaagtcaaaaccactccctccaccagcttggcttatgcaaccaccgcccgacctactgacaccgctatccgaaattattggttactcagagagcgaattgcagagtcagagcaaatgattttggggttacaggattatattagagtggagtgtgtgaactaa

SEQ ID NO: 300611 - DNA, 1467 bp, Proteus mirabilis
gtgtcaactgcaaacacacctgaagatgaacagaaaccgagtctgaatgcgtttaaacagcctcgtgcattttatctcatcttctcaatcgaattatgggaacgttttggatattacggcttacaagggatcatggccgtttatctggttaaaatgctgggtatgagtgaggcggaagctatcactgtttttgccgcatttaccgcattagtttatggctttgtggcaattggtggctggcttggcgataaaattctcgggacaaaaagggttattgtcctaggggctattgtgctggcaattggttatgccatggttgctttctccgatcatgataaagatatgatttactggggattagccactattgcggtgggtaatggtttatttaaagccaatccttcctctttattagccacctgttatgagaaagatgatccacaattagatggtgcatttaccatgtactatatgtcgattaatgtgggatcatttttatccatgttagcgacaccatggttagcggcgaattatggttgggatgtcgctttcgcattaagtgtggtggggatgttgatcacactggcaaactttatgctatgtcgcggttggatcaaagataaaggctctaggcctgactttgagccactaaactacctgaaactgttattaacgctgttggggattgttgctttaactgcggtatcaacgtggttattacataataatgaagtggcaacatggtctttagcgattatttcattaggtattatcctgatttttgcccgtgaaacttttatgatgaaaggggttgcacggcgtaaaatgatcgtcgctttcttactgatggtggaagccgtggtattttttgttctttatgatcaaatgccaacatcattaaacttttttgcgatccataatgttgaacacgctattttaggctttagtgttgagccagagcaatttcaatcacttaacccattttggatcatgctagctagtccattattggctgctatatataactttatgggtgataaattacccatgccttataaattcacagtgggaatgtttttgagtgcaactgcattcttagtattaccattgggtgcaagtatggcaaatgaagctggtatcgtttcatcatggtggcttgttgccagttatggctttcaaagtattggtgagctgatgatctcaggattaggtcttgcgatggtggcccaactagtgccacagcgtttaatgggctttattatgggcgcatggttcttaacatctgcggcagctgcaattattgctggtaaagtggcaagcttaatggccgttcctgaagacgtacaaaatgcacacgcttcattagaaatttatagcagtgtatttttacaaataggtatcgtaacaggtgttattgcactgttaatgctatttactgcccctatgctgagtaaaatgacacagtaa

SEQ ID NO: 300612 - DNA, 1710 bp, Proteus mirabilis
atgaacaagactaaaacaactcggttcagttttttacattactggcatgggttgggcgcctggaatttttattttttgctaaagtttgttttgctttggtatggttatttaaaatttgatgcatttagcaatttactctttctagcatttttattatttccactaccgaaaacattttggcataaattacgtaattggatagcgatccctatagggattatgcttttctaccacgacacttggctacctagtttttcaacggtattagaacaaggagggcagttaaaaaatttttcattctcttacctcattgaattagttgttaattttattaacttaaagatgatcggggtggcatttattttactggtagggtatctctttattgaacagtgggtaagagtgtcggtgtttattatcgcgggtgtagtgtggcttaatattagtggttttacccatttttcaggtgctatggcttctgctgtttctgccaatagctttactcagcaaaccaacacatctatcgatcagccacagccgcaaaatacagaaatattatcgacagctcagactagagcgccaaataataacgtactgagttcaccttatccgccacaaaaacagccggctaataacaaagtgttagatgaatggcttgctcagttttatcgttacgaaaataaacgcagcacaccggctcctgctcagctctcttcttatgcacaaccctttgatattttaattattaatatttgttcactctctaccgctgatgcggcagccgtcggattacagcaacatcctatttggggtaactttgatgtgttatttaatcgctttaatagtgttgcttcttatagtggtcccgcttcattacgtttattaagagccagttgtggccaaacacaacacgctgatttgtatgatcctgccgatatgcaatgcttattgatggataatctggctgctttaggttttgagaagaaattggtgctcgatcataatggcgagtttggtcattatcttcaagaaattagagagttaggtaatcttaatgtgccgttgcaagatcaaagcggactctctcatcaaattaccgcttttgatggctctaaaatctataacgataaagagaccttagagcgttggttaaaagcacgagaaaaatcagatgaaaaacggacggtgacctttgtcaatttagtgtcacttcatgatggtaataggttcgttggcgaaaatacaacggctgattatggcaaaagagcctcagcgctacttgataacttaaatgcttttattaatacccttgataaacgtggcagaaaagtgatggtggtaattgttcctgaacatggagccgcattacaaggtgatataactcagatgtctggtttgcgagatattccaagccgaagtattactacggttcctgtcggtattcgttttactggacttaaaaatcaacgtttacctcatacgcctatgatgatcgataaaccaagcagttatttagcgttatccgattttattctccgtaatgtgaatggcgatatctttaatcaacccaccattgattggaatactttaacccgtgaattaccacaaaccgcgacggtatcagaaaatcaaaataccattgtggttgattatcaagggaaatcttatatcaaattgaatgaaggagagtggatagactaccctgattga

SEQ ID NO: 300613 - DNA, 369 bp, Proteus mirabilis
gtgaatacaaatgaaaaaccacctaaatatcgtgatatatcaatacaactccctgatgatctaaagactgatttcttgatagaatgtaaacaagctggcttggatgctggtgaagtaaaatatttttctgttggtgcgcctagtgttttgcgggtgttatatgaaacacttacaaaaaccacagttatggtgcctaagctattagggatattaaaaatgtttaaccaacaacgtaatatcagagttgaagtgtacacagataagaaaattatcgatttaaaaggttattcagaagaagaagcgcaacgcttacttgagaaatgtgatggtattcgtcttacccatcgtgaagatgaagacaataaataa

SEQ ID NO: 300614 - DNA, 465 bp, Proteus mirabilis
atgtcatttgtaatttacttacgtttagaaggaagtaaacaaggtttaatatctaaagattgttctactgcagattctattggaaatcgttatcaactagggagggaagatgaaattcaagtgattggaacaaatggtgatattagccgtgaacaaaatgctaccaaccatcctatacaaatattaaaacctattgataagtcatctcctttacttggaatagctataggtaataatgaaatactcaaagcaactttatctttctatagaactagccttcaaggctctctagagaaatattatgaaataaaactaacagatgtatctatttctaatctttctttcgtttttccaaactcaattaacaataatgatttaataccatatgaaaaactaacacttcgttataaatcaataagttggaaacatataactgcaggaactgaaggatatcttattttttaa

SEQ ID NO: 300615 - DNA, 1098 bp, Proteus mirabilis
atgtggctttggcaacagacaaattggactgattttagatatgagcatagtgtagtgatccctttggtgattgatacccgttttgttcaagggatgctttatggtcaaagccagatgttacctgaaagtagctcctctatattagattcggtgttggccaatattatttattcgagtgatatcgagggtgaaaagttaaatgcttgttctgttcgctcgtcattagcgactcgtttaggtatagaggaaaaaaaaacctatcctatcgatgaaaaatcagaaggctttgttaaagcagcattagatgcaattaataatttggataaaccgttaacgcatgagcgtttatttcaatggcataatctgttattcccagaagggtatacaattttaaaccctatcattgctggaaaatatcgcacaggcattgtgcaagtcgtttctggtaaaagaatagataagcctattgtacattttgaagcccccccaccagactcaattgctgccgaaatggcgttatttttggattggtttaatcgtacaagaacagattatcaaccggatctcattattagggctgctattgcgcatttatggtttttaactattcatccatttgaagatggaaatgggcgaataggtagattaattatggacttagcattagcacaagctgaaaataaaacagtaaggctctatgctatgtcaaaaaccattaacgaacatcgccaagaatattatgacatcatcgaaaatacacaaaaaggtgatggggatatcacatcatggcttcagtggtttttacaaatgcttcaattatcaatattggaagcaacgaataaaattagtaagaccgtaagagcaacaaaatattggcaaacccatgatcaagcattgttatcacctgaacagtcaaaagtgattaatcgtatgcttagtggtgattttgctgatgggattaataatagccaatataaaagtgtggcaaaagtcagtagagccagtgcaacaaggcatctctcttttttagttgaacacggttttctcgccgatagtggcgctggtggacgtagtgtaagatatattttgcaagattaa

SEQ ID NO: 300616 - DNA, 1392 bp, Proteus mirabilis
atgaattttccgttaattattaacgtactcgtctttgttgtgctattactcatcttggctaaattaagccaacgtcagtggagcctgtcaaagaaagttcttgtcggtttggtctttggggtggtgtttgggctggcgttacatgcattctatgacgcacacgatcctattattaaagaatctatcctttggtttaacatcgttggtaacggttacgtacaactgttacaaatgatcattatgccattggtatttgcttctattttaagtgcagtatcacgtttacaccaagcatcatcattgggaaaaattagtgcactaaccattggtacacttctatttacaacggcaattgctgctcttattggtattgttatagccaatatctttggtttaacagctgaaggtcttgttcaaggggaacaggaagcgcagcgtttagccgctattcaacataattatataggtaaagtgtctgacttaactgtacctcaattaattttatcttttattcctaaaaatccatttgccgatttaactggtgcaagctcaacctcgattattagtgtagttatctttgcggtattcctaggaatggctgcaataaaactgcttaaagaagataaacctcgcggtgaaaaagtattagcagcgattgatagcttacaagcgtggatcatgaagttagtccgtatcgttatggcattaacaccttacggtgtaatggcactgatgactaaagttgtggcaagctccaatctgcatgacattattcaactcggtagcttcgttgttgcctcttatgttgcgctgggcttaatgtttgtcgttcatggtttattagttggatttactggcttaagcccaattaaattcttcaaaaaagcaggaccattattagcatttgcatttacaagtcgttcgagtgctgccagtattccattaaatatcgaaacacaaactcgtcgcattggtgttcctgaatcgattgccagtttctcatcgtcttttggtgcaacaattggtcagaatggttgtgccggtatttatcctgctatgttagccgttatggtggcaccaacagtcggtattaatcctttcgatcctctttggattgccactttggtgggtatcgtaaccattagctcagcaggtgttgcgggtgtcggtggtggtgcaacctttgcagccctgatcgttttaccagcaatgggattacctgtaacactggttgccctactgatttctgtggagcctcttatcgatatgggtcgtactgcattaaatgtcagtggctctatgaccgcaggtactattactagccaaatgatgcgccaaacagataaagagatctttaatcaggaagaagaagctgaacttaatgtgaagtaa

SEQ ID NO: 300617 - DNA, 276 bp, Proteus mirabilis
atgtggataaaccctattgatgcacaaaatagaggcatcaaaaatggcgatatggtgcgtatctataacgacagagggatcacccaaatacccgctttagttaccgagcgaattattcctggtgtggttggtttacaggcgggggcttggtggtctcctgataaagacggtgttgatcatggtgggtgtcctaacgttttgacatcaacacgtatgacaccattagcccatggtaattcacatttaaccgttttagttgaggtaaccaaagcatga

SEQ ID NO: 300618 - DNA, 231 bp, Proteus mirabilis
atgttaatcatgaattatattttttatttttttaaggatgagcctagtggtttattaaaaataaaggcttatttagataacgatgagatgttttttcacttttttgaagcaataattaaacgtcgattgattattggcaagcagcattttaataatttagggttagggaattacttaataagaataaaattaaatgaaactcatttttataatatcttatctgaaagataa

SEQ ID NO: 300619 - DNA, 579 bp, Proteus mirabilis
atgagcgagcagttaacggaccaaatgttggtcgagaaggtacaactgggtgaccagaaagcgtttaacttgctagttatccgctatcagcacaaggtagcaagtctgatttcccgttatgtacctcagggtgatgtgccagatgttgcacaagaagcctttataaaagcctatcgagctattggatcattccgtggtgatagcgcattttatacgtggctttatcgcatcgctgtgaatacagctaaaaattatctggtagcacaagggcggcgtccgccttcaaatgacttagatgcaagtgatgttgaaaattttgaaacatcaaacgcattaaaagaaatttcgaaccctgagaatttaatgttgtctgaagagttacggagagtagtttttcaaaccatagagtcgttacccgaagatttaagggttgctattacacttcgggaacttgacggcttaagctatgaagagatagccgttattatggattgccctgtaggtacagttcgttcacgtatttttagggcgcgagaagctattgataataaggttcaaccattaatacaagagttataa

SEQ ID NO: 300620 - DNA, 975 bp, Proteus mirabilis
atgaatcttcacaacaatccagatgtatttctggaattgattaaccggacagcagagtattttaagatccctgaagtttatgttgagaaggattattggattacacacgtccttctccaattaagtctgtctgaattcaggaacgattttattttcaaaggtggcacggcgctatccaaggtctttggtctaatcaaaagattttcagaagatgttgatcttgctatgtttaataaccgaggactgagcagtaatcagattaaaaagtgcatgaaagcagcagaggaaacaattgctgctggattgacatatattcaaaaacctgacgagtctaaaggaagccaattccgaaaagtctattataaattcccacgaattgttagcggagaatttggtcacgcttctgatgttattttgctggaaacaaatagttttacttcaccagaacctttttcatttatgcctactgaatcattgattgctgaattcataaagaaagcacagattgagggtggaaatgaaatcataacacgctatggactagaaaaatttgaagtcaacgttcttgacatcaaacgaacagtagcagaaaaaatattaggattagttagagcatcgagcgaagcagatccaaaacaggctctagctgataaaatccgtcatatttatgatctttgcatgatcaagcgtaataagcattatagccaattttttgattctgatagtctttggaagatgatggacattgttattcaggctgacagagatcagttcagagaagcaggacaatggcttgaccaacctctacataagagtgtgcttttctccaagtctagtgaaatatgggaaagtatcagggggatttttcacggcgaattttctgaattggtttatgacagtgatcttccctctgatgatgaagttttcagcttactttcctcagtggccagtcttttgcaaaaatggtctgattaa

SEQ ID NO: 300621 - DNA, 720 bp, Proteus mirabilis
atgaagattaaacctttagttgagaaggaaataaaccggtttgaatttggtaaaattttcacctatagagatttaacaccatatctttcaaatcctgaaacaacagtaaaagctgtcagtcgcctagtgaagaatggtgacattaaaaggtttgctaaagggcaattttaccgtccgaaaaaagggatatttggtgaaatgcaattgagtgatgccgagaagttaaaaacattcatgtatcagaatggaaagcgaaaaggttatattacgggaatggggctttataatcgactgggactgactacccagatcccgaaaacaattaccattgctagtgacaaatcaccacagcgtaaggattttggtaccatcgaggtaaaattagtgaaagctaaagtgcctgtttccgaatctaacagggagtatcttgagatccttgatgttctttccaatattaagaaaataccagatagtaacccatctggagtcatgaaagtcatagcaaaaaaactaaaaaatatcaaaaaagatggcctttatgagcttattaatttggctagtttttattcgcctgtaacgagggctttgttaggattattgatagagaatattaatataaatctcgctttggagcttaaaaaacagctaaaccctactactcattatcggatagggttggatagttattgggataatgcagaagaatggaatattgaatga

SEQ ID NO: 300622 - DNA, 1353 bp, Proteus mirabilis
atgttaagtctgtttagacctgcgccgcataaagcgcgtctgccaaaggaacagatagatcctgtctatcgccgtttacgttggcaaatctttatggggattttctttggttacgctgcttattatttagtaaggaaaaacttcgctttagcaatgccttacctcgtagaagagggattctctaaaggggatttgggttttgctttatcagggatctcgattgcttacggtttctctaagtttatcatggggtcattctctgaccgtgctaacccgcgttacttcttacccgcaggtcttattcttgcatccattgtgatgttaattatgggctttgtgccatgggcaacttcgagcattatgatcatgttcgtgctgttgttcctgtgtggttggttccaaggtatgggttggcctccttgtggacgtaccatggttcactggtggtcacaaaaagagcgtggcggtatcgtctctatttggaactgtgctcataacgtcggtggtggtttaccgccattgctgttcctattaggtatggcatggtttaacgactggaaagcagcattatatatgccagcattcgcggctattttagtagcgatgattgcgtttgcattaatgcgcgatacaccacaatcttgtggtctacctcctatcgaagaatataaaaacgattatccacctgattataaagaaacagacgaacaagaactgacagcaaaagaaatctttatgaagtatgttttccctaacaaacttctgtggatgattgcaattgctaacgtatttgtttacttacttcgttacggcgtattggactggtctccgacttatcttcgcgaagtcaaagatttcgccatggataaatcctcatgggcatacttcttatatgaatacgcaggtattccgggcacactgctgtgtggttggatgtcagataaagtgttcaaaggtaaccgtggtgcaactggggtattctttatgaccttagtaaccattgccactatcgtattctggatgaacccagcaggtaacccgaatgttgatatggcatgtatgttaatcattggtttcttaatctacggtcctgttatgctaattggtctgcacgcccttgaattagcaccgaaaaaagctgcgggtaccgctgcgggcttcaccggtctattcggttacttagggggttctgttgcggcaagtgctatcgtaggttacaccgttgactacttcggttgggacggtggctttatggtcatgatcggcggtagtgcattatctgttgtgttattacttatcgtgatgataaatgaaaccaaacacaaacgtgaaatgtcacagaagtatgaataa

SEQ ID NO: 300623 - DNA, 1515 bp, Proteus mirabilis
atggaaattttagatgctttaatggtcgtttttagtttagaaacgataacaatgatcctgttaggggttttcgcggggattattatcggcgcattaccgggtttaacagtgaatatgggcattgcactgttactcccactgacttactcctttcaaggaatgacggggatcttattattattgggaatgtattgtggggctgtttatggtggctccattaccgcgatattaattagtacaccgggcacacctgcatctgcagccaccgtcttagatggctatccgatggctaaaaaaggtgaagcagggcgagcattaggcttatcaaccatggggtcgatgtttggtggtgtatttagtactatcgctttaattgttattgctcctcaattggcaaaagtggcgacgggattctctgctgctgaatattttgctcttgcggtatttggcataagtattattaccagtgtatcatcgcaatcgattgtgaaaggattaatggggggcgcgattggtcttgcaattgctactatcgggcttgatcctatgacagcagggccacgttttacgtttgataccgtgtatcttatggggggcgtctcgtttattccaatcctcgtgggactctttgcattttctcaaggcttgattagctttgaagaagagtatcgtgagcgcaagcagaagaaaagcgagaaaattaatgcccgtattcatcgtgtattacctacgtggctcgattttaaacgtgttttacctacctattttcgttcatcagcgataggaacggctattggtgctattcctgggactgggggagatatttcatcttttatctcgtataacgaagccaaacgttggtcaaaacaccctgaagaatttggaaaaggatcacccgaaggggtttcagcaccggaagcaggggctaactcagtgacgggtggcaccatggtacctctaatgactttaggtattcccggtgatggcgcaacggcgattattatgggggcttttatggtgcaaggattagcgctagggccacagttatttacggataatcccgttgaagtgaacagtatttttatcggcttaatgatggcgaatattttcctcggtatcttaggcttcttgtgtatgaaactgtttgtacgtgtgatggatgtaccacgaagagtattagtacccattatctttgtgttgtgtagtgtgggggcttattcagttaaccatagcatcattgatgtttttgtgatgatgggggcaggattactggcttatattatgattaagctcgatttttcgatgtctccggtggtgataggtattatccttgggccaatggcagaatctaacttacgccgtgctttaatgatgtctcaaggggatttatcgattctctatacacgacctattactgcgacattcctcgctattgcactattaacactgctgttacctattgtcggacctgggttaaaatcaatgtggaaaaaatggcgtagtcaatctgcttaa

SEQ ID NO: 300624 - DNA, 237 bp, Proteus mirabilis
atgtggctttggcaacagacaaattggactgattttagatatgagcatagtgtagtgatccctttggagattgatacccgttttgttcaagggatgctttatggtcaaagtcagatgttacctgaaagtagctcctctatattagattcggtgttggccaatattatttattcgagtgatatcgagggtgaaaagttaaatgcttgttttgttcgctcgtcattagcgacattataa

SEQ ID NO: 300625 - DNA, 702 bp, Proteus mirabilis
atggacgacgtacaaagacattttcttaatttgacaaaagaacaagaaatgatggctatagcattggatcatggtctttctgctatgagggatgttgctaaggatacattaaatacaataggagatgcatccaatcgtattttaagattaggatatagttatgtatttgatgagcaagagtttaatacaattcttgatgaagataaacgtttaactatggccatatggcagtttacagaaaataaaaatccgctacaagatgttatccaaacctatttagatttaacgttaagaaataaaacggaaaaagaagtatctgatatttattcaataatagaaaaatctattggttttggtgctaaatattcaacaaaaaaacttactaaaatggtaatgattgaaatattatgtcaagttctatataaatcaataatatatagtccagtagtattgaaaagagtaaaagctctttcaaatgtacttttagctgttggaggtatttatggaaggtcagagcaagctgcttttgttgcacaacaactaaagatagtttatcccgagtattattacgctttgtataataaaggaatagaaatgctctattttattccaaaaccaaagatggataaaggaatttatgtggtggatggttattcatcctcttccgatattatgaatgctatattagatatgctagtttaa

SEQ ID NO: 300626 - DNA, 1659 bp, Proteus mirabilis
atgagtgatattgcattaacaatggtgatgttgtcattagcaggcgccttaggactttggataggtaacgttaaaatctatcgggtcagtttaggaattggcggagtgctgtttggagggattattgtcggccatttagctcaacgttatggactggtgctcaacacacagatactccattttattcaagaattcggccttatcctctttgtatataccattggtatccaagtcggccccggttttttctcttctttacgtgtatctgggcttaagctcaatgcctttgccattttgattattttacttggttcactagtaacagcctttatttatcacttatttaatgtgccactacccattattcttggcattttttctggtgcggtaacgaacacgccttcattaggtgcagggcaacaaatcctcaccgaccttaatattgatccagccataatcagtcaaatgggaatgggatatgctatggcttaccccatgggaatttgtggcattcttttggtcatgtggtttattcgcgtgctgtttaaaatcaatatagagcgagaagcaaaacactttaaccatcagcaaaacagcactaaagagacactgcataccattaacattgccattcgcaatcccaatttagatggcttattaatgcaggatatcccactactcaatgaagatgcccttgtctgttcacgtttgaaacgtggcgacgatattatggttccgatgccttccactattattcagttaggagatttactgcatattgtcggctcaagagaagatctcaataaggttcgccttattttaggcgaagaagtagatgcttcactttctacctcaacccatcaattacaatctgtgcgcattgttgtcacgaatgactcagtattgagtaaacgattaaaagatctcgatttaaaaagaaaatatgatgttgttatcacacgattaaatcgagcaggaattgaattaattcctagtaataacagtatgctacagtttggcgatattttaaatgttgtgggtagacctggggccatagaagcaatcacggtacttttgggtaatgcacgacaaaaattagaacaagtacagatgttgcctgtttttattggcattggtttaggggttttattaggctctatccctatttttattccggggatccctgttgcactaaaattaggtcttgctggcgggccactgatcgtggccttgattttaggccgtattggtactttcgggaaactctattggtttatgcccccaagtgctaatcttgcactacgtgaactcgggatcgtcatgtttttagctgtggttggccttaattccggtggcgggtttattgataccttaatatatggacaagggttaagttggattggctatggtatcgcgatcacactactcccattattgatagtcggtataatggctcgtctcgtttttaagttaaattaccttaccctatgtggcgtacttgctggctcgatgactgatcctcccgctctagcattcgctaattctattcatcaaaatagcggtgctgccgcactttcttatgccacggtttatcctttagctatgtttttacgtatcatcacgccacaactaatggcactgattatttgggctttgtaa

SEQ ID NO: 300627 - DNA, 861 bp, Proteus mirabilis
atgactgaattgctatctgatttacgcgtgatttatgatctgcatagccatactactgcatcagatggcgagctctcacctgatgaattaatcgatagagccattgaaaaacaaattacggtattagcgataaccgatcacgatactaccgctgctatccaacctgccaaaaattatattgcagaaaaaagtttacctttaactttgatatcaggtgtcgagatatcgactttgtgggagaatatagaaatccatattgttggattacagattgatatcgaacaccaagctatgacgacatgcctagcaaaacagagccaatgccgtgaaactcgcgctaaaatgatcggcgaacgtttagctaaagcgggtattgctggggcatgggaaggagcaagtgccctagcgaaaggcgggcaagtgacacgaggacactttgcgcgttttttggttaatgaagggcatgtggcatcggtcaataaagtatttaaacgctatttagcaaaaggaaaaacaggttatgtaccgccacaatggtgctcaattggtgacgctgtcacggctattcatcaagcgggtggagttgcggtattggcacatcctggtcgctatggtctatcctctaaatggttaaagcgattagtgctttattttaaacaacaaggtggtgatgctatagaagtggcacaatgccaacaaccaccacaagagcgagaacaacacgcagctttagcacaagcttatgatcttaaagcttcgttaggttctgattttcatcgcccttgctcgtggatagagctaggacgtaatttatggttacccgctaatgttgaacctgtatggacattatggcagggataa

SEQ ID NO: 300628 - DNA, 1005 bp, Proteus mirabilis
atgttagcacatgtcattaatcagacaccttttccccatttttcttttgaaaaattaggatataaagatgagcgctggcaaacaatagtcgttaaagtcacctgtgattttgatcctttaacgggtaaatgcgatattgctgatgagcaaactccgctaattatggcagatgtttatcgaacaacacctgaaaatagcagtttagtacatgaaactaatctggtgtcttataaacctcatgctgaaatctatattgttggtaccgctcggaccttaagtaacacacctgttactcactgggaaacagagttatctattggtcagatccataaaaaattaatactgagtggacctcgttattgggaatatcatcgtgattggtcattgggtgaagctcagcctatttctgctttaccgcttatttatgaaaaggcttttggcgggaaaaatagccatcaggaagttaatgataaaaacccaataggggttggttggtacgatagccatgatatggataaaacccgtcagtatcctgctccccaaatttattatcctttagaagagcatattctatctgtagataaaccttgggaagtggcgggatatgggcaatataatcgatggtggcaacagcgagtacaatttgcaggtacctataatgatgaatggcttaataatataaaaccttattatccggcagattttaattttgctttttttatgagtactccagtagatcaacagcaaaacgatttttttgttggcaatgaaacattatcgcttaaagggttttttgcccaaatcaatcttaccgaacttatcttacccagcatcggttttgtcgtgatcccccaactagttccagagaaattaactaatgggttattaaaattagatacagtatgtgtttctcttgatgaacaaaaattatatctcacctggcgttatcgacagcgactttcagcaaaagaaaacacgcttcagctttatgcctataaattgtaa

SEQ ID NO: 300629 - DNA, 669 bp, Proteus mirabilis
atgtcttttaaattgcccattgaagccgctatttttgatatggatggtttgctaatcgactcagagccgttttgggcacaagcagaacatgaggtctttgcacaattaggtgtcgatttatcacttgctgacagcatgcccgacaccgtcggcttaagaatagatcaagttatcgaactttggtatcaagtatcaccttggcaaggcgtaacacaacaagaagctaaagagagaatgattgctcgcgttgtacaacttattgaagataaaaaaccgctgctccctggtgttgaacatgccctatctttatgtcaatcattaggtttaaagatagccttagcctcagcatcaccgcattttatgctagagcgtgtacttgagttgtttaatattcgtcattacttctctgctgttgtctctgcagctgatttagcgcacagtaaacctcacccagaagtctatctcaatgctgctaaggcacttaatgttgcacccattaattgtgtctctttagaggactcacgcaatggtatgattgcttgcaaagccgcaagaatgcgctcaattgttgtgcctgcagcggagcagtttaatgacaaatgttggggattagccgatgttaaaattgcctctctcaacgaattaaccaaatctcaattattaggctaa

SEQ ID NO: 300630 - DNA, 417 bp, Proteus mirabilis
atgaaaaatgaaactaatattcgccgtggcaaacattgtgtattcctgatgcacgtccatttggtctttgtcacaaaataccggcgaaaaatatttgatcaggatgcaattgaaaaattgcgaagctactttgccagtgtttgtgctgattttgatgttgaactggttgaaatggatggggaacgggatcacgttcatttactgattaattacccgccaaaactggcgatatctaatctggttaacagccttaaaggggtatcgagtcgattacttcgacgtgatcgtcctgatattgcccaacgtgattactacaagggggttctttggtcgccaagttatttcgcggggagttgtggtggcgcaccaatatccattatccgccagtacattgagcaacaggaaacaccgagttag

SEQ ID NO: 300631 - DNA, 234 bp, Proteus mirabilis
atgagaacgagaactgtagctgtatttaaaaacggaagtaaccgagccattcgcttacctaaagatttcgattttgatggtgtcaatgaactcgagataagccgagatggggattgtattattttacgccctgtaaaacctaactggatttcattacaaaacgaagaaaaagccgatagtgatttcttgcttgaacgcgatgatgttattgaagaaggacgagttattctgtga

SEQ ID NO: 300632 - DNA, 420 bp, Proteus mirabilis
gtgaaaaaagtctatatgcttgatacaaacatttgttcttttatcatgcgtgagcaacctatttctttgctcgaaaaacttcagaaatgtgtaatgaaccacgatactattgtcatatcagcgattacttattcagagatgcgctttggagcaataggaaaaaaagcatcacctaaacacaatcgtttggttgatgctttctgtgaacgcgttgacgcgattttggcatgggataaagcggcggtagacgcaactaccgtgataaaaaaatgcttatctgatgtgggattgcccataggaaataatgatagcgcgattgctggtcatgctgtcgcggttaatgcaatattggtaacaaataatacccgtgaattttcacgagttgaaggactaaaaatagaggactggactcatgtttga

SEQ ID NO: 300633 - DNA, 966 bp, Proteus mirabilis
atggatttcagaaatgtactgcgaaaaaatgccattcgcactcggtttgtgatagtcacctatttactattaatgctaatgatcggcttattagttgatagcgcgataggtgccaatcctcatttaagtttaattgataatatgctggcatttctgacattccaatcactgcctattgcttcattgattattgttgccatttcaattgtgttgctgattattgttcactttaaagggcataaaatcatgttgacgggcatgaaagcacgattaattaatcctgaagagccattaaatgcccaagagcgacaattattaaatattgtggaagagcttagtttaagtgcgactttgggctatatccctaagctttatattttagatacaccagaagccaatgcctttgctgccggctggtctgaaaaaaatgcctttattggtgtcactcgtgggttattaaatcaacttaatcgccaagaaatacaagccgtattagcccatgaaacaggccatattattcatggtgatacccgtttaacgctgtatgtaggtattttagcaaatgttattttaacggtaacaaatatctttggtagccgcttatatatagcctctggtaaccgtggtggtaaaagtaatgatgccgccagtaaagcacgattgattttaattgtactcaacgttgttttacccattattactcaagtgctctatttctatttatcgcggacacgtgaatatatggcagatgcggcagcggttgatctcacccaagataatcaatcaatgatcaatgcactaaagaaaattgcagcacaacacgaaactgaaaattttgaagatggctctacaggacgagcatatcgcaaagcagcctttatttttaataagggagactctcttttttcaacccatccttcgattgaaaatagaatagcagtactcgaagggaaaaagactttttaa

SEQ ID NO: 300634 - DNA, 972 bp, Proteus mirabilis
gtgaaaataaatagaactgtcgccattattggcgaatgtatgatagagctaagtggccaaccttttttgccacaacaacagcgttttgggggcgatacattaaatacagcactgtatttagcgcgcctcattcctacattacatccgcaatatataacaggtttaggcactgataattacagtgccttaatgcaaaaagcatgggaaaaagaggggatcaactgccagtcagtgatcaccattcccgaaaaacttcccggtttatatgccattgaaattgatacttgtggtgagcgtagcttccattattggcgtagtgatgccgctgcacgttatattgcaacggacaaccgttttgcaacacatctagataccttgcccgacgatagtgttatctatcttagtggtatttccctggccattttaacgccgaaaggaaaagaagcgttaatcacgcaattaatccgccttaaacagcgagggctcaccttaattgtcgattcaaactttcggcctcgtttatgggatctaatacctcatgcgcaagagtggttcgaaaaactatatcgactcagtgatatcgctttagtcaccggagatgatgaacaagctctctggcaacaacccagccttactgagcaaaaaattgtcgaacgccttcatcaatggggcaataaaaacgtcattgttaaactaggagcaaaaggagctttctggtctgatagtgaaaataccggttatatctgccccaaaccgatacagcatgtcatagacactacggcagccggggattcttttaatgctggttttattgctgcatggctacaaaactaccctttgcctacatgttgtttatggggaaatacattagcaggattagttatccaacatcatggcgccattattccccataacatcactgattcattctattcactcatcaaggataaccatgagacagtcaattgttga

SEQ ID NO: 300635 - DNA, 477 bp, Proteus mirabilis
gtgaaaccaatacttgatatgtgttgtggctcccgtatgttttattttgataaacaagataaccgcgttttatttaatgacattagagccgaagaacatattttatgtgatggaagaattttaaatataacaccagatattatttctgattttaaaaaccttccattaccagataatactttttatcaggtgctatttgaccctcctcatttaattagagttggtaaaaatagctggatgtttaaaaaatacggttcgttaaataaagaatcatggagagaagatttaagtaaagggtttagtgaagcatttagagtgcttaggcctggaggaacattgctgttcaaatggaatgaaacccaaatacctgttaaacaaattttagcactaacagaccaaaaaccaacagcggtacagcgtgtaggtaagaacgataaaacgcacaggatctcttttcttaaggagaacagtaaataa

SEQ ID NO: 300636 - DNA, 270 bp, Proteus mirabilis
atgaaacatccatcaattatacaaattagcaacgatagtattcaaacgctactaatgaaaggggagcataccgccagcgaggtgattaattcagccattgagtctggggaaatagatgagagtgaccgccaattttgggaaaaatacgacaaggtagatatttgttattttaaagcagttcccaagcctggttattcagcgtattaccatgaatcaagcaaagatgttaaaggtgcatttttagcaacggctgtcatggtttattggtaa

SEQ ID NO: 300637 - DNA, 498 bp, Proteus mirabilis
atggctaacggatcagtaaacaaagtaattcttatcggcaatttagggcgtgatcctgaaatccgctacctgccttctggtagtgctgttgccaatttagctgtggccacatcagaaaaatggcgtgacaaacaaacaggtgaaaatcgcgaaaaaacagaatggcatcgtgttgttctgtttggaaaactcgctgatatcgccagtggctatttatgtaaaggctcgcaagtttatatcgagggccaactacaaacgcgcgagtgggatgataacggcgttaaacgatacacaacagaagttgttgtaaggattggaggcacaatgcagatgttagacggtgctagtaaatcagcaggatcacaaccagcgcagcaaaacccgccaccggctcaacctcaagcacagagtagtcaaccaccaatggattttgaggatgatattcccttcgcacctattgggcttatgtatccacgccatttaattaatgtggtttaa

SEQ ID NO: 300638 - DNA, 147 bp, Proteus mirabilis
atggaacagcatttggaagcaagcgatagaaatattacaggaggctcagtaatgctaactaaatacattttgttcgttggtttttggtttgtagtgacattactgattgggttatgggctgaatataaagttgaggatgagatttaa

SEQ ID NO: 300639 - DNA, 468 bp, Proteus mirabilis
ttgtttggattacaaaaaaaagaggacaaacgaagtaatggcgtcactaatacggattatttaggttgggaaattgaacccggtattcgctactttatcaccccgaatctaaatacaacagtggcttattttgatggtggaaaacaagcaataagacatgaagagtatgatacaaaagaaacaaatcacaaccagcaattacgtatgtatgtaaactggacgacacctatcggtgttattatttcgccctcaatgcgtaagtctatttttggaaaaatagaagacagaacaaataaaggtgaatatatcgataaagatatgactcgttataccttacaaatggcttaccaaatatctcctcaatggcgtgttatgacagaatattataatgagcgagttgagaataaaaataacggcagcaagtcaactcaagattattttaaagtatcggtaagagcaactttctaa

SEQ ID NO: 300640 - DNA, 2349 bp, Proteus mirabilis
atgaaaaagaaactgacatcaatactaagtctgacggttattgccatggcgagtattcatttttgctatgcgacaacaggaatgctagagctagatggtgaagtattaccagagccaacatcttatactcatccgccactacaacccacagtaagtacgcaactatttgatgatgttgcactctccgaggcgcgtaatattgaagaacagttaacattagctcaaatggggagtccatcaccaatagtattatccggtcgacgtttattatccggcgtgacatttcgtatggcaaatgatctgtttatcgatagtgcaacactcaccatgaaagtgaaagcttcatcgggattagtacaagccgataaaacgttacatttgatgctaaatggtcaacctatgggatttttgcctttagaagaaggtgagcaagaacatgagtatatgttagaaatccctgaaatgatgttgaccaatgtaaacaacttgagttttcgccttgctagtcgcgatgctttagatgaaaagcagtgtatgcctcctttagctgatgagttaagtttggtgatttcgcccgattcatcattaaattatcgaggtcgttggattaatggcgggtatagcttggaacgactgcccctaccgttctttgatcctgacagaatgacagcgacctcgttacctattgttttagccgataaaccagataatgggcaggtaacagctgccgctattgctgcttcttggtttggtagttttagtcatgatattaaacaaatagatttacctgtattaatgaatcaactacctgatagcgatggtgttttaattggttatgccggacagactattgcaggtattaccttaccatcaggaaaaaatgggcagctcacgatagtcgataaccctgttgatcccgtatttaaattattactgattagcggtgatgatgaaaaaacattacgtcaagctgcatgggcattaaatagtggcaaattaccaccaaatgaccaattaacggttgctgctcaacatattccggtacgtcaggattatgatgccccacgttggttaaataccaattatcccgtaacattgggtgagatagctcatggtcgtgatgattttactcgccaaggaataaatcatgctcctaatcaattttcgtttcgtgtctcacccgatctcttttggtgggatggagatgcgctacctttagatctgcaatatgtttttcctcattcagataaaataaatagccgtcactcttcgttaattgcctctttaaaccatcaatttattggtgcgttatatccttctcgttcagagccattaggaatattaagacagtggttagggatggagagtgcacagcaaagtagtacgctttatttagatccacgacaaatctacagtcaaaatcaattagagttctattttgatttacatgagtatgatgatgccccctgtattttaacggatggccaaggattgattagtcgtattgatccgcaatcaaccttacaatttaaaaatacgtggcactattccagaatgcctaatttagcctatttttcaggtgcatcgttcccatttagtcgccgggcagatttttctcaaaccacattattattgccagaaaatcccacaactgaagagctatatacgttagttaatttaatggcgagatcaggctattcaaccggtacacctgtttcttatatttctgtttttcttggtgcgcaagccttagaaaaaaatcagttagcacaaaaagatatcttggcgattggagagttaggtagtaacggctttttgccaagtgcattttcacaaaaaaccttctcttttataaataaccaacttgagatccaatctccctcattgatagataaagctaaaagttggttagccggtgatccattatcaccaagtagtgatgcggcaaattatcttgctccgttaaatgattggcggggaatgatgagttttatctctccttgggctaaagatcgtgtggttgttttagtgactgcaaaaggtaatgactcaattaaaaacatcattggtgatttgaaccatgcaaatgtcaatgccgctattaaaggggatctgactttaattagtggtcaagatacggtgatgagcttccatttaggagaacatttttcacagggaaacctgcctctattacagcaatttctttggtattgcaccagacatgtctatttgcttggcatgttggcagtcggtttttgtgcgctaacagggagcgtggtttattgctggttacaacgtcgctcaacgcgtcgcctgagtgaaatatcaaagcgccatgttgataaatag

SEQ ID NO: 300641 - DNA, 537 bp, Proteus mirabilis
atgaacatctatacaattagtagtttctcattaggcaatggagttattgacttctcagatccaaagtcaagattatcaagttttttcatttggaatgaagggaatggtaagtttctcttatattcacaaccaaaaggtaaaatacaaagtactatgcgaagagataaactaagagcaccagattattttccttctaatatcggagttcctgttttttcgcaaaaagcggtatctatatttgaacttagaattgcatctgaaatgtcattctataagtgtactgtggaaaatacgcatgaaacgatgtttttatgtaaggtgaataattaccttccgattattgacgaggagaaaacaacattcagggaacttattgatggtactaaattgatcgatattcccacctataaatgtgataaagatttctttatagcgagagatagcgttttttgtgagcaaatgattctctctcaacaatttgtcgatttatgtaatgatgagggattgaatattgaatttttcaatgttaatgaatag

SEQ ID NO: 300642 - DNA, 483 bp, Proteus mirabilis
atgagtgattttaaattttggggatggaataaaaaaccacgaacgatgctgagatatgtaaaacccggagatatcttttgttttcaattaaataatgaaacatatgggtttggacgcatcatttcaaaaatcatgacaggccatgtagtagagattttcgatttcgtttcttctagtccatccataaccgaagacgacataaaaaaatctaacagaaaaatcgaacccgttgtaatcgatacttacgggttatttgatagaaaaggatatcccaatagtgactggaggatcattgggcatcagaataactacacccctattaatgtagaaggggtatattttactttcgggattggtaattcatgcaaaaaaaaggacattttcgataatacttattcaatatctgaagaagaagccaaaaaactccccgaattaatcccttattctgattatcatattaaagaattattaggagctatctaa

SEQ ID NO: 300643 - DNA, 948 bp, Proteus mirabilis
atgcatcgttatatttattttacaacagtgttgtgtatgaactttcttagtttaggctgtgatgaggcaacaacatcgacaacacaaacaggcattttttatatcagtaacaataacaatgtgccgttacaatttaaaattgatactaatcatttttcgattaataaaggtgaggtaaaaaaaataacattaaccaatggagagcatatattagaatcaaactcaggtgaaaagaaagtatttatggtttaccctggaaataatggggggattattaatccctctcaggaaatatactatagctttacttccgtgtttacttcagaagaaaataaagaacacttttatttagatacgcgctctgtttggatcaatggacaattaatacatggtgccattaatagcacagatgctgtgtttatcgacaacaatatctttcgttgtgacattccattaaatgagcctattcctccttatttaccagattggaagaattctggggtaggcaatgtattgactaaatgcttctctcaagaggagtttcaaacgtttttagccaaatatccttatggcattcatttcgataataatcacgatttattaaccaaacaagctaagaaagaacagtttagttggataaatgaaaaagatacacgtactgaggattttaatcctacactgagtgaaataaattttaataataaagaattagtacaagaagccaatactatttatgaaatagtttactcgtatttagcgtctcgtgatcctgataagaaacaagagctttataatatttatcatctgcatatcatgtctatggcatggatttatagccaacaaatacaaaatgatatactggatgataaagaagcctactttcaattaataaaagagaccggaagaatatttggtgcaggtatattaggtgaacctgtattgatataa

SEQ ID NO: 300644 - DNA, 3213 bp, Proteus mirabilis
atgactggagaagtgaatgagaaatatttaacaccgcaagagcgcaaagcgcgtcagatggtgaaggcggtaaacgaagcgagcccacgaaacttaccggccgacgcggtggtatgcccatgtgaaaatgaacatcgccctgtttatccggtgcgttatgcttattctaatttgtttggcgataaagacgcaaaagcggctgttcccccttctatttcaacgttactttctgcctcgtcaatctctgacacaaagggattttcggctcgattgctgcgcacaggttggatttatgtctttgaagaaggggaatttcctacccgccctgatacaaaagggcaattactgatttttaagcatactgttcaacattacgacaatgggtatgtctattcggatgacgataactccactgaggctataaatgcaaaagaaaaaggggattcagaggaaggttttatcccttgcttacgtgactcactaacgaaatcggtacaagaacaatcttgtcaatatccgtatttaccaattaaaaaagacgtcatgaatgcattgtttttattcagtgatatccctctgtctgattatgtcttagataaaatggagacggatgcatcttatcgacaagcctttatgcaaaaaatcaatttaattgattttaatgcaaatcctcacgcgcttgagctgaatgctgaacatattgaatatttgattgaagaatataaaactgaatcagagcagttttcagcctttactgaatacacaaaatccatcggtgatccgctgccaaaagagtatttctcccatattacgggaataaatagcgccagtaaaagtaccgatactctgctaaaccaagcaacacaaaatttagattacaacgaaaaaagttgtctagtcgctctgtatgatcctgttggttatcagaaagatattttatcactttataccttcgtgactgtcacatatgcgatgtttcaatattattggcagtatccaaataaaatcggtcactatctttcggcattagaaactcagtttaataatcccgaggttgctaaaacagagcaaggaaaatcattaaaagataagtttaccaagcatattgatattcagggctggaaaacgtattggccacaaattgaagccggtaataaagagtttgaaacattgcaaggcaatatcgttcaactctatcgtgattttttaagcaacccaaccgtcaaaaatcaggtaggtggcattaaaaactatcttgaccatgcttttttaataaaagagcaatatcaaaaaacgaatttttggcaccgagcttttttcgatgaattaaaagcctacagccagctgcatgaacagttattgacccctctaaaaagttcaccatcagggcgagtcacgcttgatttactattgtcaattgataacgatgatggggatatctggaaagagtatatcactagcttactagacctattgaacgaagataagataaaagataaagcgctcagtgaatttaaaaagcatatcttaccgtcattaaattcagccgtcatgatatgttgggatgcattgggttatgcttatactcaagcacatgccaagttaaataacgccaaaaattatgttcgtcgtattagtcaagcaggcctcaattttcttacgcataaagtactccctgcttttttagggtattttggtatagctgtgagttttgacgagcttacgaccttaagcgctgaagagtttagaaaaagaatgaattcactggaagggattaagcagccactcaaaagtttctcaaagaatatgaagaagatgtttgattgggatactcgatttaaatcagcgggtctaaaacagattatcacaaccgctaaatttaaattaatggaaggctacagtgctatgtatttacctacagataagaaatccttaaacgctcaaatgaaattagcactagatatttatacactgctcacaagtatcattgaatttagtacagtttcacatacgaaagagtttgataaacaagacccattaaatgccgctgccgtgaatatatttcgtgttcaaatggtggcacatattttaaataccgcagaagcagtagttgaaatacgccaagcagctcgaggttatgcgacatcagtgacttttccgccgcttcagcggttattgactaaaattcagttgcctgaaatccaaaccaagttaggaaaagtgggcttaaaagggcttggatataccgtggcaattttaggggtcgcattacccctcgcggaggcatcaacagagttttataatcatgattacattacaggctcagcaaaaattacggaagcggtagggacattggctttttcagtggggctagcagcatggggtgccactgagggtgcggttgcaactaccattgcggcatttgcgtgggagttaatagttatcggtgcgatcgtctatggcgtcggtgcggcaatttacacctattttaaaacagattcgtttgaaaagttattgaagcagtgtttttggggaaatggggataagtattttgcggggggaaaaaaactgaaagaagatcaaatcatatcacgttcttctcaaaagaaagaacagttagattattatgtagaatatgcagagttatttaaagaatattatcaaattgaattgcaagagtttgctaatgttttctttacctctaacctacaagtaaaggcgatcccaaaattaaaagcggatatgaggccagcccacccttatgcagcttcttatattattcagtatcaatttacattaggtaattttcaatatggtatttcggaacttgagtatcaattggttgaaaagaaagttttagaatttatcccacctggaatacctatcaagaatttaccgaagcgaggtgagttagttgtaaaataccgaggaagtgaatatttcgagtcacagcaaattaaatttaatactgcgtttgaagaggcactacaacaggctttagtcagaaagaaaccgcatgatggtgagtttgtgctgagttttgaagtggatgcaggtatgtttataggtaatccagtggggaaatcgataccctctatctattggtattacattgtagatcgcattaaaggcgaaattgcaccactacgttaccgaaacagcaaccccgacgataaaatatatggctgtattgatgaggaaggcacggaatga

SEQ ID NO: 300645 - DNA, 588 bp, Proteus mirabilis
atgagctttatattgagttttatttttggagcactatctggggcaatagcaacatttttagggttgtataaattttatagagaaaagtggtgggataaacaattcaatattttttcagatgtggtagatcatttttacactatttcaatttgcattgaacgtcttcaatatgaaatagaaaaaaaatggtatccacaagacgaggatcttgaaccgattacgcctattaaagaggtattattaaaacttacagaatcgcaacaagcgttagttaatattcaaggcaaagtaagatttttatcagggagaacatttgctgatttacttgaaagttatattaaaaatgtaacaaaattaaagagtaagtatctccataaggattttgatgataatgatgtttccgagttttatagtaaacaactagaattgttagaagatacatcaaataagttaattagtttagctaaaagcacattaaggcgagattcttttttgtctggtttaaatgaaaaattttggttatcaaaatacccaaaaaaatttaaagcttggtgcttaactaatgaatcctctgaaacccgccactga

SEQ ID NO: 300646 - DNA, 297 bp, Proteus mirabilis
atgatgaaagtaaattttttactagtaaccgatgatggtgtgaaaaatggaggttatggattattcaatggaacagaaataattatacatggaagaaactgcgccacatcagagcatagcgctcagtcaataaatacaaagccaataagatatactgcaaacaagttcaacattaaagataataattacgttattgcatatagccataacagcttgaggatgatgacaacaaaggaactgcaagatttaagtgggcttattgaacgttgtaatatttcgccaatcgaattggactaa

SEQ ID NO: 300647 - DNA, 681 bp, Proteus mirabilis
atgaaagagcgtggaattatttttaattctgaaatggtgcgcgccattttagatgggcgtaaaaaacaaactcgtagagtaatgaacaaccagccttgcacactaccagaagaaactattttcgtacaacaggatgattttaatttcagatgggctggcgatttacataacgatactagcggttggtttacctgccctcttggcaaggttggcgatcgcctttgggttcgtgaaacatggagtgtagtcagtcatgaatttgatgatgatggtttgatgattgattatgttcctgatagaccaactaaagctgtgcatgaaatgccgtatggtcatggttatttcactggacatgtcatttactctgctgatggtgatttcacatggggtgacgatgatggttgtattgatggtcgttcttgctggaaaccatctatacacatgcctcgctgggcttcacgcatcacgttagagatcaccgatgttcgtgtagagcgtttaaaggatgctggcgatactgagtttaaatctgaaggctaccctttagagcgtgaattaactggcggtagtatggacccgttttgttggtttcgtaatctttgggattctttgtcacctactaactttaaatatgaagacaatccgtgggtatgggttattgagtttcgtaaaattgaatga

SEQ ID NO: 300648 - DNA, 174 bp, Proteus mirabilis
atgagcaagcaaatgtatttacacgcatcaactaacaatatcgggtctgaatgcaaaactgaactcgatatcacagaagacgaatggaacaaacttacggagaaagagcaagatcaacttatcggcgagttcatgagtgatgtttgtgattggtgggtgcaaccagaggaatga

SEQ ID NO: 300649 - DNA, 201 bp, Proteus mirabilis
atgaaaaagccaattgagattgacgcatttaatctatgcgaaatttgccattccaataaattaattattcacacagaaggaagtcatgagaaggtgtttaattgcgataaggttgaatgctgcgggtgtgataacacaggtcatgttgtagttgaggctgaagattgtgcttacatcgaatgggaaaagccaatcgaataa

SEQ ID NO: 300650 - DNA, 540 bp, Proteus mirabilis
atggcaattaacacaataacggtaagtggaaacctaggtaaagattgcgaacagcgatggacgccaaatggtaaggcggttgcatcttttagtttactagtgaaacaaggttacggagagcacgaaaaagtatcttgggttatctgtaagatgtttggccctaaagctgaaaagctacctgagcatttaactaaaggaaagaaagttacagttactggcgagttcgtcatggaagaatggacaagccagaacggtgagaaaaaatcagcgccagtaattatcgttgatcaattagattttggcggtaacggtggtaatcaggcaggaagccagaagcctcagtctcagtctcagtctcagtctcagtctcagtctcagtctcagtctcaaggatggggtcaacctcagcaaccgcaagcacaaaaacaagcgtcgagtaatcaagccccacaaagtgaacctccgatggattttgaggatgatattcccttcgcccctatcggactcccctacccacgccacgctatttatgtgatttaa

SEQ ID NO: 300651 - DNA, 699 bp, Proteus mirabilis
atgattagtaatgacatcattctaagcaaaacaggcatcgatttaaccaaagtagagcaaggaagcgaagaatggatgtcactgcggttgggtgtaattacagcatcagaagtgtggaaggtgctatcaaaaccaaagccaggaaagacttggtcagatactaaaaatacctatttaaatacgctaattggtgaggtttgcactggtgtaacaaaggaagttaaggcaaggacgcttgagtggggaaaggaatatgaaatcgaggcaaggatgtcttttgagttctattcaggacttgcagttaaagaagtgccaataattttcaaggatgaaagcttaagaatggcttgctcaccagatggattatgcagtgatggcgcaggtcttgaattaaagtgcccaaatacaacggaagtgtttattgacttggctttaaatggaattaaagcaatgaaaaaggaatataccgcacaagttcaatattcaatgtgggttactaacaaggatgtttggcacttctctaactacgatccgaggatgccgggaggaaaggaaatcgtccacatcccagtggaaagagatgaaaaaatgatggaaaagtttgatgagttaatacctgaattcatagaaaaaatggatgaaggattaaacaagttaggcattcaatttggcaatcaatggagtgtatatggcaattaa

SEQ ID NO: 300652 - DNA, 885 bp, Proteus mirabilis
gtgagcacgtcaattattgagtttgtgcaacaacaagagtcattgttttgtaacgcactaaccgatcaaacgatcacatgggctaaggaaagccagtttgcaattcaggcattccaacgaaatgacgagctagcaagagtggctatggaaaaccccgctagtgctcagaatgccattattaacgtggcggctattgggattacattaaatccagcaagtaagctggcgtatttagtaccaagaaagggttttgtttgccttgatatcagctatatgggcctcatgcacctagctcaagtgactcaagctatcgaatggggtcaatgcaagttagtccatgaaaatgatgtttatgaatccaatggcctagacaccccgccaacccacaaatataacgcatttagtgacagaggtagtgttattggtggttattgcacagtgaaaacagcaagtggtgactatctcacggaagagatgaggctggatgagataaaagctgttgaagctacaagtaaatcaagaaatggtccatggaaaacatggtgggatgagatggctcgtaaaacaatcgtgaaaagagcaagtaaatactggcctcgtcgtgaaaggttagatcaagccattgattatgtgaacaccgaggcaggtgaaggcaataattttgatgtgccagcaaataaagccaagtacataacgccagcaagtgatgatcaattaaaggctatcacggacttgatgcttaaagttaatggcgaatggagtgatgcttttttcacattcattagtaaaaaattcaaccatcagatatccagtccagagcaattaaccgcatttgaagccaataccattatcgacatgctaaggaaaaaggcagaaggaaaatga

SEQ ID NO: 300653 - DNA, 528 bp, Proteus mirabilis
ttgctatacttcccttttattgctttatctgataatagaagaggtagtttaccaccatcagtaaattgtgatacttccatatatcccattatacttcgtgatataagtactgatgattttgctacacatcatgctggaaccttagctgatgaacgctatactagatatattggaatgttttttaataattgttcagaaagtaatactaaaataaccgtaaattttgataataaagatattgatcctaataatggttaccttatcaatcatgcaacaggccctacagcaagtgataatgtgacattccaattaattgatcttgaagataatcctattaatttaaaccagagaaatgcattcaccaaaaatattgatgaaaataatgaagctttttttcgtttcgctgtaaattatgtcaaaaaagataatcttcccccaaagccaggaaatgtaattgctcatattacgttcattgcagaagcgaacgatcagattgttgaatctgataaaatcaaaatagtagactaa

SEQ ID NO: 300654 - DNA, 612 bp, Proteus mirabilis
atgaaatgggcatgtttagctaacgggtacaattatgatattaaagggtgccaattgattattctagagcaagaattcaataaatatggaattagcaccgattcactatctgtattagaaaccgactttatcaaagatacgctaggggtcgatgatgcgcttgttaaaactatcctctacggcactatatttaatgctggctctgttagtttgtcagcgaagggaagtatggtgaaaaagctacaaaagctctattccgacgattatgtatcagaaatgctggagcattgggaattagaaacaaaagaactttgtgacagtttaaacctacttcttgacgagtatctaaagacaggaaagaagaatggatatgggttatgtgttacaaatgctgtaggacatccatttaacacaacgtggaggaagtcacatagcggtgagtggaaaaaatggactaaagatagtaaaaagatgaagcgaaagttgcttgcccatatgattcaaggactagaaagcggtgcagtctatgattatgtgagttcacacagcggtgtttgtgcattagaacatgatggatttgtgagcttacatgagttgccggatggtgaatga

SEQ ID NO: 300655 - DNA, 777 bp, Proteus mirabilis
atgtggtggccgtttaagaggcgaaaaacagaaccactcgcaccggttaaacggtcagcattcacaactgacttatatcctgcgctggcgcgagaacagggctttgatgggattaatttaccccaacccacaattgcaggtgttgcgatggatagcattgatagctatgtgccctcatttaaaggtgagcaggtttacggtgtgccagagtcacaggcctcatggtatgccttacaaatgtttatcggcaacaatatgtgtgcggttatcgctaaacactggctggtggataaagcctgtaatatgcctgcgcgtgatgcgatacgtcagggttacgatattgattgtgataacgacgatgatcgtgctatcagtaaaaagcttcgcaaacgggataaaaaataccgcattacacatcggcttaaagagctggttcactttgggcgtgtatacggtggtcgtttagcattattcgttgtggagacatcaaacccgaaagagtggtatgaaaacccgtttaatatcgatggtgtgaccaaagggatgtacaaggggattaaacagattgatccacaatgggtaacacctgatttaacggacgccaatgttcaagatcctgctagcatggatttctacaagccgacctattatgtgattggtgggcgtaagtatcacaagtctcactttattaagtttgtgccgttccctgagcctaatgtacttaagactctttataactactttggtgtttctattcctgagcgcatttatgagtga

SEQ ID NO: 300656 - DNA, 294 bp, Proteus mirabilis
atgggtatgagttggctaacggtcggcttatcttgcactgtatgtaatttcaatcgtggtattagtgtcggcataggtagtcgtaaagaagagtatgtcgataaaatcggggtatctaaatcactgttagagaaagcccgtatctttatgtcttatctgccggctgaatttcgttttggttggaatagaaacaaagacgccccacacatgagaataaaatttcctcatactgactcaatcatatcgggtgagtgtggtgatggtattgggcgaggggatcgcgtaagtttttaa

SEQ ID NO: 300657 - DNA, 258 bp, Proteus mirabilis
atgccaatcccattcccgtttgattttaaaaatcctgactacccgcaggtatttgaatggcgaatggaacgattaacacgaattcgccaaaatccagaagctataccagcactcaacgcttattacaaagataatccagctcaatttattattgattggggaatgacgtatgaccacgaaaccctgagagaggattaccgtcatatatcccatttttattattcccccgacaagaggaatggattgaatggtttatag

SEQ ID NO: 300658 - DNA, 456 bp, Proteus mirabilis
gtgagtaatacatcactaaaagatagggttcgcgcaatagactggagttcatcctatacagcttatgggccagcaaatgatgttcctgagttattgctacaattaacatctgatgaccacaatgaggcgaagattgccagtcacaagctatggtgtggactgtgccaccagcatgtctctatggcacccgctggatatcttgccctaccattcttactagaaatccttgatagcgttgatgattcaatcaagagtgaagtactcgatatattgtgggggtttgccaagtgttgtactgaagttagtcctaatgttcctgagtattttgaaccagtcagagaacgccttatctccgaactacctagatttaccttattatctgaacatagcgatgaatcaatatcattttattcttctgaaataatacaatcgttgaacgaaacatggagctgttaa

SEQ ID NO: 300659 - DNA, 357 bp, Proteus mirabilis
atgaaaaaaaatttatcagcatcagcagtcgctaagttaatagttctcaatgcattcttatatgcaacagaaaagggtaaatcaattactcgatataaagtttcaaatagtaccctgaggaagatgtctcatcgtaactctttgagagaaagttttttggtcgaagtggataatgaattgtcagagttagggtgggcaatgattagaaacaataacgatgaaaattgtttcatggtcatgagtgccacagataactggcctaaattgagttctaaaagattaaacaccattttggagcaaaacgatgaaagtgaaatagatgatatgtatgctcatcatgtggaaggtgatttctaa

SEQ ID NO: 300660 - DNA, 447 bp, Proteus mirabilis
atgaatatcaccaaattactcactggtagttgtgtggtgttggcattttggctctggtgggtaatagatgactacgacaagttgagcaaagactacaacacagcaactagccaactctcccagcaaatcgaaatcaacaataaatatcaatctcgtatcactaaattaaacgaactcgatacaaaacacactaaggaactcagcgatgcaatgtctgaaattagccagttgcgtgttagcgctgagcgtaatcctaacagggtgtacatcaaagccgaatgtccaaaatccgaaggcgctaccacctccggcgtggctaatgcaaccaccgcccgacctactgacaccgctatccgaaattattggttactcagagagcgaattgcacagtcagagcaaatgattaaaaggatgcaggagtatataaaagctgaatgcaataactaa

SEQ ID NO: 300661 - DNA, 303 bp, Proteus mirabilis
ttgaccgatgtcgattttatggttattgaaggtaagcgtaatgaagcccgtcaacgtcagttggtcattaatggtaaaagtcgaacgatgaatagtcggcatcttactggccatgcagtggattgtgcacctattgtgaatggctcaataccttggcaagaatggtcatactttaaaaaagtggctgatgcgatgatccaagctggtaaagagtttgacattgatgttgagtggggcggtaattgggattcatttaaagatggtcctcattttcaattaacgtggaaatcatatccggcgtaa

SEQ ID NO: 300662 - DNA, 381 bp, Proteus mirabilis
atggaacactccaatggggggcgtatgcgtatgcctgaaaaaaatattgatttctgggcgcaattttttcgctggatacaaattaatttgccttttttaagtggtgtgacgttagcaacttttattgcgtttattcgcgaacgtcgagagggaaatacaactcggcaatcatttgcggaagctgtgatgtgtggagctttaactgttggtgctattcgtgcgtttgatttagggcttcattatatgggcttgtctgactcatggacatcattggctgaattttgtggtgctatgattggctttcttggaactaaaaagttaagtcgtgttctcgatacgatattcatatttattaaaaataaacttggagtaaataagtaa

SEQ ID NO: 300663 - DNA, 1743 bp, Proteus mirabilis
ttgaaaaacaacgaattagaatggcaggcgttacgcccagattacgcctcctaccagactttctttcaaacagcatcgcaattgcctgcatcttcacttcgtgaggttcaacctcgcttatatgaaagcttacagtggctaaataatgcagaagcaggccaatttatgctgttaaaagcagaagattctactgcttatttcgaaacactcgctgatacattacaacaagcagagataaaaacttatcctgttgtaggtgcctatcaagctgagtctaatcaaatttattggcaagaaaatgtagaaggctcattttcatcatcagaatctattgcttgttgccaatggatagagccagaacaactttttggttcattttattatcataaagataagctcctcgttaacccaggactgttgcataaagtcaatggtggtattttagtcttatccattaaaacgctcttagcacaacccttaatgtggtttcgactgaaaaagatggttgaagagcaacgctttgaatggttagtgtggaatgaccatcaagcacttcctttgcctattgaagccatgccccttcacttgcgtgttattttagtgggcgatcgcctaagcttagaagagcttgagtttatggagcctaatattagcagtacggcactatatggcgaatatgagtacgatatgtatttagaagatgaaaccgctctgagccaatggtgtggttttgttaatggactttgccaaaaatatcgtcttccttcattatctgctgatgcttggcaagtattactgactcagggcgcaagagagcatgaagatcagcttatcttatctctcgatcttgaattcatattacgccaattgcgttatgccatgcgttttaatcatgacgcttatcttggtgctgaggcgcttaaaaaagcgcaagaaaatcgtttatggcgacatagctacttattagaacgaagccgtgatgaaatattacaaggccaagtcactattcacactgaaggtgaaatggtaggccaaataaacggtctttctgtcttagattatcccggttatcccgatctaattggcgagccaactcgtattacctgtgtggctcatattggtgatggcgaactggtcgatattgaacgaaaagcagaattaggtggcaatatccatgcaaaaggcatgatgattatgcaagcctacttaaattctgaattacgattagatcagccacaaccttttagtgcttccgtcgtttttgaacaatcttacggtgaagtagatggtgatagtgcctcactagcagaattatgtgcgctaatcagtacattgtcacaacacccaattgatcaacaaatcgccgtaaccggtgccgtagatcaatttggtcaggtacaacctattggtggtgttaatcaaaaaattgaaggcttttttgatatctgtcagcaaagaggattaacaggatcacaaggggttattataccgctggcgaacgtgcgacatctggttttaaacgagagcgtgatacaagctgtcaaagaaaataaattccatatttggccggttgtccatgttgcagaagcaattactttgctaacacatcagccttattacgaagagcaatgtgaaaatccacaatcaaatgaacacttgttagctattattcatgatcgaataacacaagcgaataatcaggataggcctaagttaccttggttcctacgcttattcagataa

SEQ ID NO: 300664 - DNA, 336 bp, Proteus mirabilis
atgaacaatattccctctatgccgcagttagggatttatgtctcaaaaatcgatcccacccttcgcatcactgtaactgacgttgatattgttgatgacgatgatgagtctcctgatgatgaattgttttatttagtccgctggatcgagggggaagatgaaagtgatatgtcggccatggaatttgagctagacccagtagagtggcatgcttttgttgagtctgagcaattagtgtttgagcgcgatccatacatggattcagcccccgaaaattcaaaccttgcgaaaatccgggatttactcatgaagactaaacagaataatcgttcgtaa

SEQ ID NO: 300665 - DNA, 384 bp, Proteus mirabilis
gtggacactttgtctattaaaggtatttttgaagtttttgttaacaattgggttcctggtatcttcaccttctttttaggcatctgttactcaaatatcgttgaaaaaaagaaacttaagcagaagctaaagaacgatattcttgagatcttcgtaccgatctttaatgcaggaaacgagatctcattcgaaatcgcggaaaatgcttgcaggaagatgaaaggtacctttcaggcatacaagagaatatatccaggtatcttcaacaaagaggtagagaatgaacttgaagacctacttaaagatggtttcctcataaatggtgaagttaatccgcattactttgaaccagccaatattgagaatctgattaaaaaattgtag

SEQ ID NO: 300666 - DNA, 1065 bp, Proteus mirabilis
atgattgatttcataactactaatacagggattgtattgaaatatgatccagaaacagcagatacatcttgggtttggaatgaattaaaaactcattcaactgtaacaatttctaaagttttttattttaatattagcgatctgctcaactctccgtcacaagatcaagattttgatagttatttttatgagtttcagtttggaacttttagtggtgattatattgttataccaagttatattttaaatattcaaaatgatttatatataagtaaagatatcaatcttagtaggagcgtctttgctgcagagcgtaatatttctatttttggtcgactctcgcgaatattgaatcacagcaatccaatttatattggcggggattctgcggaggcaataccttctaatatttttagtgagttattaagcaaatttcctaactcgtacgaagtagatagatatgccgatgctagagtacatacgattcttgagcaatatttggaaggcatgaaagatgccagaggcctctacgaaacatatctcaataaaatagaaccaattagaaaaagtaatctcgacttagcaactatcaatgaattagaaatagaaaaatacactttaattagagataccattgagaatgctttaagtacgaaacagcactggtccgaaaaagattggcaaaaattgatggtgcaattccttcttcttttatttccaaagtatattcatgttattgaaaatattaccatccatgattactacagcatcccaggcaagaaaaaagatcgatatatagatataggcttggttgattctaatggtaatttagatattatcgaagttaaaaagccatttgacgacaagatcttgcgcaggacaaagtatagaggaaatagcataccaacgtctgagctaagcggtggtatcatgcaagctgaaaaatatctcttccatttatcaaaatggggaacaaaaggtgaagacaaccttacaaaaaaatatgcaagtgaactaccctctgggatgagcattcatatttctaaccccaaggctacatcatag

SEQ ID NO: 300667 - DNA, 909 bp, Proteus mirabilis
ttgcggatcactaatgatgagaaaccatcagacagtacacttagtaactgggttaatgacttagaaagaattaagatcttttttaaagatatccccgcaaatgaaatctcactggaacatgtaaatggctatattaatgaatatcatgccgatgcttctgctaatgtacaaaatcgtaaggtaagctttctaaagaaaatttttagttacgcaatggatgaatctcttatgtttgataacccagctgaacgtaagaaaatgaaaagagtcgatgggaaaaaacgtagaagattatcttatgatgattttcttaaaattagagcgtccgcagaaccttggttaagaacagcaatggatctggcattacaaacaacacaagcaaggcttgaagtatcacgcataaaatacaatatcaaagcccccaaagaaggcatctgtgggtgtttatggtatgaagaacccttaaatggaatatacgggatgatttatattcacagacaaaaagtgcaacataaagaggcatctcatattgcgatccccataggcaaagcacttaaggatattatcgataatagccgtgacaatgtggcaagcccttatattgtgcatagactacctactcgtattccaaataaggtgagtaaagaagtgaatcatccaacacaagttgcacctgattaccttagccgtgcattttcagcattgcgtgatcgagtgggcgttgccagtcatttgcctttagatgaaagacctacctttcatgaaataagagcattggcagcctttatgtttaaacaacgtggttttgatccacaagctcgaatggctcacagtgatgcggagtcaaccaagatttatacagaaaaccatgtacaatgggttgaagtgccacattgtgagattgcttga

SEQ ID NO: 300668 - DNA, 345 bp, Proteus mirabilis
atgataggtgcattaaacttaagtccttcatgtgtgaaaactttgtcagcggtagaagcccttccttctagctcaaatcagcatgaattgaatggtgtttctcaattaaggagtatattaggccgagaaagaaaaacttttcctgttaaattttctcttaggggagaagatggatatgtagaatctttagttacttggtatgatgctagagaaaatcatgaatctcgttctgaataccgtctttatttccaaaccaatacagtgatggatcaagctagagcgggtagcacattagtttttggaattggtagtgatgataaattttgggcagaactaattttatag

SEQ ID NO: 300669 - DNA, 1305 bp, Proteus mirabilis
atgacaattgaaatcctagataaagcagaatatatcaaactattgagaaaaaaacttggattaggtccaacagaaatggcaaatcttctgggcatgaacgcaaatggcgaacggactatacgtggctgggaaaatggggaacatactccaacgcctacaaaatggcagaatatacttgatttagaaaagtcactagccgaacattcaaaaaatgccccattcaagcaaaaatctttagaagaagctgattttacatttattgatttatttgcagggatcggagggatacgtttgccattccaaaatcttaatgggcattgtgtattttcatccgaatgggataaattttctcaaagaacgtatttaacgaattatggagaaatgccgaacggagatatcactcaaatctcagcaaaagatattcctgaccatgatattttattaggtggcttcccttgtcaagcattctcacaagctggattaaagcaaggttttaacgatactcgaggaacaatgttttttgagatacagcggatacttgcagaaaaaaaaccgaaagcatttctcttagagaatgtaaagcaacttcaaggccatgataaaggccgaacactacaaactataattaacatattacaagggaagcataatcaagctatacctgatgatgttccaatgagtgaagaagcacgtcatgcactctctataaaacttaattattgggttgattttaaaatactacgcgctgcagattttggcatccctcaaaatagagaacgaattttcatcgtaggctatgacagggattattttaaaaatatagactttgatagcctatttaaatggcctattccaccaaaatcagatactcgagttggagatattcttcaaccacaggaagaattagaagccgagatcaaaaaaataggtaaagacaaatatactatttctgaccaactatggaatgggcataaaaaaagaaaagaagagcataagataaaagggaatgggtttggttatacattatttaattccgaaagcgaatatacaaatacaatcagtgctcgctattataaagatggctcagagatcttaattgaccaaagccaccttggtaaaaaccctagaaaattaacgcctagggagtgtgcgaatcttcaaggattccccaaaaactatattgtcgatgctgtatctcaagggcaaatttataaacaatttggtaattctgtgtgtgttaaagtagtagaggctgttgctacaaaaatgattgagacactattagttctttcaaaaaagaattga

SEQ ID NO: 300670 - DNA, 1671 bp, Proteus mirabilis
gtgctaaaagatctgagtttagtgattgatgaatgcagagaatcttttgatagcttggaataccgcggagatatacgccttaataaggtattcgctgaagcattgacagatgcgctgtctgaagtagatgcagaatcagaatatgatgttagaccattttcaattcatcaaaaaaataaagagggactgtatacaaacttatcatcttcactactttggtatggtttcactttctggcctttagtttcagctctaagtgagtaccaacaaaagttagacgagttaaagagccaattgcaaagtaagaagcatacaaaagatagtgttgataaatacttcagccagcttccgttgaaaaaaatagataaatcagtctactcctcaccaatagggaaagatgttcagctttttatcaatagcttatcaccacaagattctaacttttttgataaatttcttactgatagagattggtggtataaaccacttaaaaaaagtaaaagagaggttggtaaaaagctaaatagagatgattttcctcaatcatcttttgatcttgcatcacgagttattgttgcaaactcttctcgactttttacacttgtaaaagctttctctatttctaatgaattaagaaactattttttacaaatagaaaagcagccaattacttttatagacgaaaataataaaaccaaatcattactatccacttcatcatcaaaaataggggtaaattacatctattatggggccccagggacgggcaaaagccaccagcttaatgagctaacagaaggtggtagaaaaattgttactgttttccatcctgatactcaaaattcagattttattggttctttgaaaccaacgaatgtaaatggtgctgttacttatgtcttcagaccaggcccttttactacagcattacttgaagcactaaagaacccagaacaaaatgtttatctagttattgaagaaattaatcgagcacctgctgctgcggtatttggtgaattgtttcaactcttagatagagaaaacggggcaagcaagtacgaaattgatttcactgatcctgatatgcaggcttacattaatgaggaacttaaagctgcgggtctagatgaacgttcaaaattatcaatacctgcaaatttgtctttacttgcaactatgaatagtagcgaccaagccgttatgcctttggatactgcatttaagagacgttggtcatttagatatatgaagcttgattttgagaaccctgcagttagttcacaaaacctgcgaattatgactactcagggtgtttattatatcacttggaaagattttgctaataaagtggtcaatcatcaactgaaagaaatgaaagttccagaagatcgcttaatcggcccattttttctcaatagtactgaattatcaaatagtgagacatctaatgaagcaatcagcggtaaactgtttgtgtatctctgggatgatgtattacgtcataagggacggaatatcatttttgataaaaatattggtacatttggtgaattacatgaacagttcattgagggtaaaaaacctgttttcagcgaagtaattgaatctctaattatctcgaatggcaacacggctgatgatactacaggggttccagaaggagatgagtaa

SEQ ID NO: 300671 - DNA, 1257 bp, Proteus mirabilis
atgagtaaccttcaattttacagagatcgttctatcatcagtcagttacctgatgaattgtcttgtaagatgcgtgaaatggggttaatagccccagatcattataaggttcgtttttgtggtttcttttcttggtctgggactacagcagttttcttgccagtaaacagcgcattaacagataataaagagttagccgctcattatttgttccagtcattaaatcgttactattcagacaaattaacaggtatacaagatactgatggtgatacattgattgggggaaatttaatttttacttcaatcagtatatttgaagactatataacaaatggtttatatgtcaggaggcataaaattcagtcggttaataaaggcaaaacaaactggtcccgtacagtatctcgacatatgccatttatatccaactcatctcctgtttatttagagcttgaatcatctcagataaagaatatatcagatagtgaaaccgctaggatccatgctgcaatcattagagacattaagaaaaaatttggtgtgcttataaatggtgaagagattcattttgatgtaaatctagaggaaatgcctgtcccctccggcgaccaagaaactcaactcgctcatttaaatcgtgaactctctttaagttattctgaaagagatattaacttaatcaggttattaaagcagtatattgaaaacatggatggtacgaacaataacctattgataataggtactcgttattttcagaatgtatgggagtgtatgctacataaagtgctactcggagaaaaagcatacaatcaaaaattacctgttccttattatctacaaaactctaaatatcatgaggttgcagaaaaagggcaaagagccgatatagttattagtgacaagtctaatcaacgagttgcagttgttgatgctaaatattataccgctttgacaccaaaagatgctcctggttggcctgatttagttaaacaatttttttatgaaaaagcagtcaaatctacagtaaataatggtgtgaaagttacaactcattttgtatttcctggagtagaacaaaaattaatatcagttcatgttgggaaaagaggacaagggggaactgatttatttattgctgaattagaataccctgttatttattgccattattgcgagccaatatctgtgatgaaagcctatatcaatcataaaatttgttatgagtttagaaaacaaatttttgaggtttga

SEQ ID NO: 300672 - DNA, 873 bp, Proteus mirabilis
atgtatactcaaaaaatcctacaacagaaaatatctaatatcacgatctggcgtaaaggtgataacagagcgccccataaaccactgttactcttattagcgctttccgagtaccgcaaaggccatccacgactatttaattatggtaatgaaattcatcaacagttattagaattattgatgaattttggcccatctcgccgtgagcattatccaaatctgcctttctggcgattagttcgcgatggtttttgggagttgcaactaccaaaagagagcgatctatcaaaagataataaacaaccatcgaaaaataaattaattcagcaaaatgtgttaggtggatttgaccaagaaagctatcagcttcttataaaaaagccaagtttaatcaataagctagcacaacagattttaagtgaacacttccctgataatgttcaagacgttattgctaaccgtcttgattttccactacaagaaattcgccaaaaccgagatcccacttttagaaaaaatatcttacgtgcttacaattatcagtgtgctatatgcggttataatctacgttatgatagcaccgtggttggtctagaagccgctcatataaaatggaagcaattcggcggcccatgtactatcaataatgggttggcattatgcgcattacaccactctgcctttgatatgggcgcaatcagtattgatgataatatgaaattattagtttctagcggtgtgaatggtaatcaaatggtagagcaattattttggcagttttcaaataaggtaattggcctacctaaaaacacaaaagaacatccgaaggatacatttatccattggcatcgagagcaagtgtttaagctatag

SEQ ID NO: 300673 - DNA, 426 bp, Proteus mirabilis
atggctttacaaagagagcacagtttgaatggctttatttttactcataacctaaacagttttggtggtagatgggttcgagagtggtatttcaagcctaaagatgctaaggagtggtgcccatattatttgccttccgtgacggttaaaaaaaatgatgttgtagagtttttaaaaaatacggaagaagccaagaattattatgataaatggttgctttctgcaagcgatgttgaagcagcggagaagcgactacagctcgcacagcaacaagttgaaaaggtcactgatcccaattgggattgtaggggaaataacccgaacaaagaaagtagaataattaaaaatgcgatgagtgaattatgtagtgctaaggcatctttggaaaacgctaaagcgttgaagaaaaggctaagtaatcagtaa

SEQ ID NO: 300674 - DNA, 240 bp, Proteus mirabilis
atggatgttcaactgaccaatggtccatgcgaaggtgcgtgggctcaagtaaaactaaatgatgaaggaatgccttcatcaacgtacatggctgagttgccagcggtatgtaatgatgttcatgtcgacggaattattgagtcctttaatatagcgccagataaatttatctatgaactgcacgtaacagtgagaagcggagagcctccgcacttcgagtatcgctttcctgagaattaa

SEQ ID NO: 300675 - DNA, 552 bp, Proteus mirabilis
atgaaatactctcaagctgaaaagcttcaattaatgatgctttgtgaaatttaccgggtcatgggaatagaaaatagttttaaccccgaccttgttgaagaggctatttctactgataactactgggcgttgtcgtgggaatacccgtctctagaaactgaagatgaaaccccatctaaagttaaattgttcgttgatactgttgatatgtatgacatgctctcatatacatatgaaagacttagtgatgaggataaaaaagatgtcagcgaggcagtacctcatttctctcctgaatactctctaactttcccagggtttgatgggaataatgagtctgaatacatgcaaataggtagattgttaaaaactatgggtcgcttttcaggtacagaactaaccaaaaattcccacgccccctcagtagaaacatatagaagaatgttagatatatttttacctatacgtcataagtttgtatttaatgaaggaatccgcaagcaagagttaatcgatatacttttagaacgaattcacccaagcaacagatag

SEQ ID NO: 300676 - DNA, 1488 bp, Proteus mirabilis
atgaagccagaacatcttgcattattgagagataagctctggcgattaaatcacctctactggataaccaataaagaaggcaagccagttcgatttaaaatgacgcctgagcaactcgaatactttgaagggatgcacacgcgaaacattattcttaaagctcgtcagcttggcttcactacagaagtctgcattatccaattggacgcagcgttatttgaggcggctaaatgtgcattgatagcccacacacttaacgatgctaagcgactatttagggaaaaaataaagtatgcctatgacaagctacctgatgaaatcaaagcggctaacccagcgagtaatgatgcggctggtgagttggtgtttagcaaaggcggctcgctctatatcagcacgtcatttcgtggcggtacgctccgttatttgcacgtttctgagttcggtaagatatgtgctaagtatccagagaaagcccgtgagattgtcactggcgcatttgaggcggtatcaagcgattgttttacgacgattgaaagcacagcggagggtcgagcaggttatttcttcgattattgccagtctgctgagaaagcgcaaattcagaataagactctctctaacctagactggaagttctttttcttctcatggtggaagaatccagagtatgccattaaccctgttgagccattaccccagcggttagttgattactttgatgagatagccagcaaacatggtgttcaattaaacgagcgccagaaagcatggtattacgccaaagagaaaacgcttggcgacgatatgaaacgggaatacccgtcaataccgtctgaggcattccaacaatcggttgaaggcgcttactacgctaagcaattccgctacctgtacgaaaataaacgcattggcacacttcctgataactcacacttaccggttcacacgtactgggatattggcgtcggtgattcaacatcaatttggtttatccgtgaagtgggcgaagagttccatgtcattgatcactactcaaacagtggtgaaggtctacggcactacatgaaagtgttaaaagacaaaggctacacatatgcaagtcacaatggccctcatgatatcgataaccgtgagtttggttctgatgcgaaatcacgacgtgaattagcgcgtgaagggtacgaaatagacggacaaatttactcaatccgatttgaagtggtgccaaagctttcagtcgatgaaggtatcgaggcagtacgtgaaattctgccactttgcgtgttcgatgaacacaaatgcagtgaaggcattgctcatctagaagcttatcgcaaagagtgggatgacaagcggggctgttggaaagataaaccgcttcacgattacacgtcacatgatgctgatggatttagatattttgcggtgagcagaagaaataccaagcgcccagcattcgaaattaacctaggaacaaccttctga

SEQ ID NO: 300677 - DNA, 285 bp, Proteus mirabilis
atgtcgatacctcaagacaaccaagccattgaagagttaattactcttgttggaggttcagataatgttattagcgtttcacactgtctaaccagattacgttttgttttgaatgatcccaatctcgctgatatagataaaattaaaaaaatatcttttgttaaaggctgttttaataatgcgggtcaatttcaagttattgttggtatggatgttgatatctactataaattattaattgataagctttcattaaaagcaatatgggattctggcaaaagctga

SEQ ID NO: 300678 - DNA, 2544 bp, Proteus mirabilis
atgaaacctatgttgcataaaattctttgtatcaatctttgtgttttatctgtggcaatgccgaaaatcgcattgtctgataattactttgatccaaatcttttactaaataataacgacaatattgatttaagtaatttcagcaaagaagactacattgcaccaggagactatagtttaagtgtttttgttaatactgagccattaggtgaaaagacaattttatttaaagcaaacaaagaaggtaaagttgtcccagttgttacaatcaaagatttgaagctatttggggttaatgtttcagcgataagtaagctaagtcatctgcccgaagatacagaaattgataatatagaagcgtatattcctaattcaaggctaacctttaatattaataaattaacattaaatgcatcttttccccaagttaatatggataagagctttcaaggtgaaattcccgcagaattattagatgatggcgtgagtgctgttatccttaattatatggctaactttattaaaaacagaacgacaggtgattattcaagccataataacaactttttcttgaatcttaatggtggtgtaaatataggcccttggcgtttaagaacaaattattcttataataaatcgagtggttcagatcagcgttcttcaagtgattctgaatttagtaatacctatgtaatgcgaaatatcgcttatttaaaatcaatgctgaaaattggtgaaattaccactggagggaatattttttcaagtattccgataagggggatttctttagccactaaccaacaaatgttaccaagtagtatgcgtggatatgctcctgtggtaagaggttttgccaacagcaatgcaaccgttaccattcgtcaaaatggtcaaattatctataaatcttttgttgctcctgggaattttattattaatgatatttccgccggcggtattggtggggaccttgaaataaccattgaagaagaagatggctctaagcgtgtatatacacaagcctattcatcgctgcctatcatgttgcgtgaagggcaatttgagtatgagtttagtgcggggcaatatgatggtggtatcacgacagattccaaaaaaagtaaatttactttaggaacgtttagttatggtatcaataactcaattactgcatacggtggtttattaattgccaatggttatacctctggtgttatcggttctggtgtttctcttgggttattaggtgccttatctgcggacgtcactctcgccagagctaatttggataaaacttatcacggtcaatcatatcgggttcgttattctaagagtttattatctacagggacttcgtttgatttaaccgcattacgttattcaactaaagattactatgactttagtgattacaataactcaggttatgaattgcgagaaggtattgcaccttggttaagccaacgtcagaaatctagttttcaaacctcaatttcacaatcattaggaaaatacggttccatgtatcttcgtggtgaaaccagccgttattgggggaatagccgtgttaataatagtgtcacattaggctataacactgttctgaaaggtattgcatttaatatagattattctatttctcgcctaaaaagtgatgacaatacatggccagaaaatagacaaattaattttaatatgaatatgccactgagtgtgttctcaaatgcaagtggcttgcaaaatatgaatgcaagctatcttttgacacatagcaatgatggaagaacttcgcaacaagccggcttaaatggctctgcatttgataatcaactttcttatggtatctaccagaatacagataacaaggcagatagttatagtggcaatatgaatatgagttattcaggaagtaaaggaacgctttctgggggttatagctatgggaaaaatagaaatagctttaatggtagccttattggtggtgttgttctgcactcaaaaggagtgacattatcaaggatgttaggtgacagtattgccatagtgagcgcagataaagcaaagggcgcagaaatcaatggaaatgtgaaaatagatacatttggtaatgctattgtccctcaattaagtccttatgatacaaacagtattagcgtaaatgtcagcacattacctgatgatgtgacacttaatgaaacgtcaatgaaagtctatccaaccgaaggggctattttagcaagacaatttcaaactaaagtgggttatcaggttatttttgatataaaaacagcggaaaatatagcgataccttttggtgcaatggcttctttgacagatgaaaaagataaacaggtaaataccggtattatcgatgcctatcaatctctttatatgagtgggttacccaatgatgggaatgtcgtggtgacttggaataacaatacgggcaaacattcatgtcaatttagttattcagagcttgaaaagattgaagtatcacaacaaaacccaataagaatggtgaccgttaattgtcaataa

SEQ ID NO: 300679 - DNA, 726 bp, Proteus mirabilis
atgttaaagttcattcttattttcttgactctgtttgtatccacagtggctcaagccagtgtggttattatggggacccgcgttgtttatcccgcaacgcaaaaaagcattaatgttcaattaaataataacgatgaatcccccgcattaattcagtcttggttagataccggaaacgcagctgcagcaccagattcaattcacgttccttttatcattactcctcccatatttcgtatggagccgaaatcagggcaaaccatccggattgtctataccggtgaatcattaccacaagatagagagtctcttttctatctaaatgtcttagacattccagcaaaacctaaagtggaagaaaattcggaaaactcagagggaaataacaattacttacaattagccgttcgtagtcgcattaagtttttctttcgccctgataatctcaacgtaacgcctgatgatgcttaccaaaaagtgacttggcatcaggaaggagcactacgcattaaagcgattaacccaacaccttattacatcacttacaacaaaatctcagtgggtcaggataaacagctaacgcctgttgaacaaagtgggatgatagctcctttttcttcaaaaatattttcacttaaagagaagccaatattaacaaataaagtcacttgggttgttgttaatgattatggtggataccaacaaggtgaatctactttggaataa

SEQ ID NO: 300680 - DNA, 2535 bp, Proteus mirabilis
atgaattttaataaccaattacacctcatttcctatcgttattctcttccgttttgtgtcgctttagggattggggtgataacaacttcttcattcgctgctgaagaagctgaatttgatcctagctttttgcattcagtgcaaggaaagaatgcgattgatatacgtcgctttaattatggcaaccctattcctgagggcaagtattacgctgatatctatctcaataatgaatggaaaggaaaagctaatgtacagtatttatatactgacaatgcgaatacgtcgacgttatgtctaacgccggaattactttcattaattgatgtcgtcaaaggcactgttcctgaaaacagttataaagccacttgttatcccgcctcagaaggactcccctcagcaaaatttcattttgatttatccactttaaagctgaatatagaaattcctcaggcacaagtgaatactcgacctcgaggatatattgcccctgcacagtggcaaagtggagtccctgccgcatttgtcaactatgatgttaactattatcaatacaatactccggatataaataatgagcagacttaccttgggttaaaagcgggactcaatttatggggatgggcttttcgtcaccgtggtggtgaaagctggaataatggtcattctactgggtatcagaatatcgaaacaaatgtgacgcatgatattgctcagttacgggcacaattcacattaggtgatttttatacgaatggcgagttaatggatagccttagcttacggggaattcgattagcatcggatgaacgaatgttacccaactctttacgtggctacgctccgatcgtgcgaggcattgctaatagtaatgctaaagttacgatttatcaaaatgctcacatcctttatgaaacaactgtgcctgctggcccctttgtcattaatgatttgtatcccagtggatatgctggcgaccttcttgtgcaaataaccgaatctaatggacaaacaagaacatttacggttccttttgcttctgttgcccaacttattcgtcccggatttagccgttggcaaatgtcagtgggacgctatcgttatgcaaatgagacatatcatgatttaattgcacaaggcacatatcaatatggtttgacaaatgatatcactttaaatagtggactgaccacaagctcaaaatataccgcaggattggctggtgttgcttttaacacgccgattggggcaattgcatctgacattacattgtccagaacaacatttaatcactctaacgtaacgcgtaaaggctacagtttacatactagctatagcgtcaatattccgaccacgagtacaaatatcacgttagcagcctatcgttattcatctaaagatttttaccatttgaaagatgcgctattggctaatcacagtgaatttattgatgatgtttccataaaaagtgccgcattttatcgccctaaaaatcaattccaagtttcaattaatcaagaattaggtgaaaaatggggaaatatatttttaactggtaccacttataattactgggagcataaaggaagtcgtaatgagtatcagatgggatatagccatttttggaaaaaacttggttatcagattggcttttctcaatcacgagataatgagcaacaacgccgagatgacagattttatgtgaactttacgcttcctttgggagagcgtgttcaaagccccattttttctactgtcttaaattataataaaggcgagaaaaacagcattcaaacatccatcagcggtatcgctggggaagataatcaattctcttatggtatttcaggtaatagtcaggaaagtggaccttccggctatgcgatgaatggaggctatcgttcaccttatgtaaatgtaaccgcaaccgtcgggcaagatactcaacataatcgtcaaatgtcattgggtgcgtcgggggccgttgtcgtacatccttatggagtgacgttaagtaatgatttaagtgatacttttaccattatccatgcaaaaggagcacaaggtgcggtcattaataatgcaccaggtagccgattagatttttggggaaatggtattgtgccttatgtcacgccttatgaaaaaaatcaaattagcatcgaccccactaatttggatttgaatgttgagttatcagcaacagaacaagaaatcattcctcgcgctaatagtgccacgttagtgacatttaatactcaaacagggagaagcctactatttgatattcgaatgccagatggtagtactcctccaatggcttccgaggttttggatgagcataagcagttagtcggatatgtggctcaagctggacgcttatttacccgcggtcttcctaaacaaggtcaacttgatgtgatatggggaccaaatcatgacgataaatgctcatttacatatcatgcgacacgcaatgaaactgacatgcgacctcaaaccattcctgttcagtgtataccgcactctaattag

SEQ ID NO: 300681 - DNA, 1083 bp, Proteus mirabilis
atgaaaagaatctttgtcatattatttcttttaactctattccctagtctagctgttgctggtgcagatgactacgtaccgtctccaataacaatcaacacatctaccctccctgttgttgttattggtcctgctgatgcccatacttacccacgagtgataggggaactcaccggaacaagtaatcaatatatatttaacggcggtagtttaatagcattaatgcgtggaaaatttactcctacattacctaaaataggcaaaatcacatataactttcgccaaggaaataacactcaatcttccgatttcgatatatttgatactggagttccagggctaggtattattattggtatggcgggctattggcctgcaacgccattggttcccataaacagctcaagtatatatattgatcctgttgccgccaatacaaatccaaatgcttataatggtgcaactggaagttttggtgctcgtttatatgttgcttttgtcgcaacaggacgattacctaatgggtatgtaacgataccaaccaaacaactgggccatattttattggaatctaatcgggcaagtttgaataataaaagattaacagctcctgttatgttaaatggagggcgcatccaagtgcaaagccaaacatgctcgatgaatcaaaagaattatgttgttccattaaatactgtctatcaatcccagttcacgtctttgtataaagaagtgcaaggaggggaagttaatatacaacttcaatgccaagacggtattgatgtttatgctacattaaatgatgcgacccaacatgggaatcgttctgatatattaacattagcaacggattctacggcaaaaggcgttgggctaagattatataaaaataatgaagtaactgcgattagttatggttcagacactcctaacaaaggaaatcaaaatcaatggcatttttcaaattatagaggagagataaatccacgtataaaattaaaagctaattatataaaaacagaaaatactattacgccaggaagtgtaaaagcagtagcaacgattactttttcatatcaataa

SEQ ID NO: 300682 - DNA, 834 bp, Proteus mirabilis
atgaacaatcaacaagccgaacaactaaaaaagattatgatggctgatagttattttgcacaacctattacgcccccttttccacagcctttagcaataaaatcattacaacagacacttaatatcaaagatacagaaggacttgttcaatttattatcgcttcacctaaacgttttaacgaatcagaaaaaatgatcatgacacaactgaaagatatacaaattgccttaatctctattatgtcgaatcatctttcagtattaaaaaaagaagatagtgaagcttattatcaaccagagcattggctagaaacccttaatcatttgcctttgcttagccgtaataaagttgaaagcaaacgacttgataagcaaacatttgatttttcaattgctcaagcctttgtgcaactgttattaggtgcagccattaatgcagcttcaccgtcattagccgagtttatcgattttttacgcaatcagggacaacaaattgaactaggaatacgccaatcctttgatagctataaaacaataactattgcaggtgtgacggaaatccttaatcataataatcagcttatttttgtacctaaattaaaaataatgagtctacgtttctcacatcgaacagccaaaatgttattagccagttgttcggggcgaaaatttacgatttcagtagaatacacaacaatcacctcaatttttgatattggtgcacttaatgatccactaattaatcgacaattttatgcttttttaaataagtttcgtcagttgagtattactcaatctgattcattttttagtggggactttttattgcaatag

SEQ ID NO: 300683 - DNA, 561 bp, Proteus mirabilis
atgacacttattgatacctttatcaatcgctttcaacttactttacccgagccggtaaatcagcctattgatgctaaaaaatcggcagcggttttactgccgattatcaataagcctaatccaacgatcctcttaacagagcgcgcatcaacgttgcgctctcatgccggacaagttgcgctccccggagggaaacgcgatccacaagataaaagcctcattgaaacggcattacgtgaagcccatgaagaggtcgatattccgcccagtatggtttctgtgatcggccaattagccccattacgcagttcagaaggttatttagtaacccccattgtcggggtgatcccccccaatttatctttacggcataatcccacagaagtcgcttctgtctttgaaatgccattaagttatgtactcaatactcagcgctatttaccgttagattttcgtcgtgccggtaaaatgcatcgcatctatttttacccttatgaagggcatttggtgtggggactaaccgcagctattttacataacctcgcgttgcatattacttaa

SEQ ID NO: 300684 - DNA, 744 bp, Proteus mirabilis
atgaatatcacagcagatgtacaaaaattagagccgggtaataaggttcaattaattgaggtggatggtagtgggtttgatggccctattcttcgcttccatgcttataacttacctcacacaccggaagagatagagcaatctaatggtgttatcaagccaaaaccaatttggtggcaaggaaatgaatacggagcatggccttacgaagttgaaggaatggcaaaaaatagtgatggtagtccagcgagaccatctctaaaggttgccaatatagatggcttgatctcatctctatgctttcagtttgacgacatggtgcaagcaaaagtgactatttacgagacatttgctcactatcttgatgccaaaaattttcctgatggtaatccaaccgctaaccctgatgagtgttttaaacaggtttattacatcgatcgtaaaactaatgaggtggctggcgaatccgtagagttcgagctgtctagcccgtttgatttgcagggagtaatgatacccgttcgacaaattcataatctttgttactggtgcatgaaaggcgattatcgtagtggtaatgggtgctcatattcagggaataaatattttgatgagagaggaaaccctgttgatgatccagcgctagatagttgtggtgggcttattagtgattgcaaaaaacgctttggtgagaatgagccattagattttggagggtttcccgctgcggggttaacgagatga

SEQ ID NO: 300685 - DNA, 1590 bp, Proteus mirabilis
atgtctaatcctatttttcagcaagaagttgctcgtcgtagaacttttgccattatttcccaccccgatgcgggtaaaacaaccatcactgaaaaagtgttgttattcggacaagctatccaacgtgcaggaacagtaaaagggcgtggttcaaatcagcatgctaaatcagactggatggaaatggaaaaacaacgtggtatctccattaccacttctgttatgcagtttccttacgcagattgtctagttaacttacttgataccccagggcatgaagacttctctgaagatacttatcgtactttaactgccgttgactgttgtttaatggtcattgactcttcaaaaggggttgaagatcgtactcgtaaattaatggaagtaactcgattacgtgatacgccaattttgacctttatgaataaattggatcgtgatattcgtgatccgatggaattaatggacgaagttgaaacagagctaaaaattgcctgtagtcctgttacttggccgattggctgtggaaaactgtttaaaggggtttaccatatcttaagagatgaaacctatctttatcaaacaggccaaggtcatactatccaaaactcacgagtaatcaaagggttggataatcctgagttagatgaagcgattggtgatgatttagccgttcaattacgtgatgagctagagttggtgttaggtgcatcacatgagtttgatcatgaagctttcttagcaggtgaattgactccggttttctttggtaccgcattaggtaactttggtgttaatcacatgcttgatggtttggtgaagtgggcgccagcgccaatgcctcgtcaaactgatatgcgagaagtgacagcggctgaagagacattcacgggttttgtttttaaaattcaagctaatatggatcccaaacaccgcgaccgtgttgcttttttacgggtggtgtcaggcatgtatgataaagggatgaaactgcaccaagtacgtacgaaaaaagatgtggtgatttcagatgcattgacctttatggcaggggatcgttctcatgttgagcatgcttatcctggtgatattattggcctgcataatcacggtaccattcaaattggtgatacttttactcaaggtgaaatgttaaaattcaccggtattcctaacttcgctccggaattattccgccgtattcgtctgcgtgatccgctaaaacaaaaacaattgttaaaaggtctggtgcaattatctgaagaaggtgcggtacaggtgtttagacccctagctaataatgatttaattgttggcgcagttggggtgctacagtttgatgtcgtggttgcacgcttaaaaggtgagtataacgttgaagccatttatgaatctgtgaatgtatcgacggctcgttgggttgaatgtagtaacgaaaagaaactcgaagaatttaagcgtaaaaatgagcaacatctggcattagatggtggtgataacttaacttatattgcaccaacgatggttaacttaaatttaacccgtgaacgctatcctgatattgagttccatcaaacgcgtgaacactaa

SEQ ID NO: 300686 - DNA, 915 bp, Proteus mirabilis
atggatagaaatagtatttattacaaacaagtacagcttttgatacaggtattgcctttcgttgccaaacagcaatgctttgccctcaaaggtggtacagcaatcaatttatttgtcagagactttcctcgtttatcggtcgatattgatttggtgtatctgccaatgaagagccgtgatgatgccttgcaggaaatttgcgatgcacttgatgctattagctcagatttaaaaatagcatttaaagacatcgagctaacggaagcctatcgctcaaaacgcgatgctctaaggttgatcgttgctcgcaacggtgtgcagatcaaagtcgagctatcacctgtattgcgcggtactgtttatgaaccaaagttgatggaagtatgcgcagctgtagaagacgaatttggctatgttgaaatgcctgttgttgatctagctgatttgtatgcaggaaagatatgtgcagcattagatagacagcatccaagagacttatttgatgtgaagtggcttttggagaatgaaggcctaacggatgaaattcgtaaagcattactcgtttatttatcaagccataatcggccaatggctgagttactcagtccgcaatttaaggatattactgccacctatgaaggtgaatttaccaacatggccgagacggatgttccgttggtggagctggaagccgtaaggatgcacctagtagacctcattcaccaaggcctgaccgatagtgaaaagtcttttttgctatcttttaaaaatcgagagcctgattggtctctaattggtttagatggagtcagtgagcttcctgccattaaatggaaacaaatcaatttggcaaacatgccgaatgacaaacatacacaagccctagcaaagttgaaagatgttctcggtgtttga

SEQ ID NO: 300687 - DNA, 549 bp, Proteus mirabilis
atgcgttatgctgatattcgtattgaaacagagcgattattattacgctcttttgccatgaaggatgctcaagagtggttccagattatgagctctcctgaggttactcgttattggagccatcttccttggcaaaatatacaacaagcgaaggaagatattattcaggatattacgcatatggagcgtaaggaatatctgcgtttagccattattgataaagcaacagataaacttattggcatgtgtgtattcttcaatcatcatctccattcttgccgtggtgaaattggttattgtcttgataacgcctttcaaggaaaagggttgatgtatgaggcaatgattgcttttattgattatttaagaacacatctatcaatacgccgtttagaagcggatatacatcccgataaccaagcctctagggcattattaaccaagcttggttttgagcaagaaggctatttaaagcaacgctggattgttggtgatgaagtgtctgattccgctatttttggtttgttgctaccaacttatattaagtaa

SEQ ID NO: 300688 - DNA, 993 bp, Proteus mirabilis
gtggattttcaccacgacgatcaagaaataacaccagaaacatcacttgtattggcggaaaaacaaccattattagatctcaatgcaactttcacctctccgacacaaactaaccctgcactggcttatttacgcagtttaggctctaaacgtagtcgccaaacgatgggatcgtttttaactatcgtggcaaaaatgattggtttctcttcaataaagcattgccaatggggagcacttcgccgccaccatattcaagcgattatcgacatgttatctgatgcggataaagcacccgccacaattaacacttatttagctgcactaaaaggtgtcgctttagaagcatgggcgatgaagttgatggatacagaaagctatcaacatattcgccaagtaaaatcggtaagaggcagtcgattacctaaaggtcgagcgcttactggacatgaaattcgcgcactttttcgctgttgtgaaaaagaccactcctcaaaaggtttaagagatgcggccatattaagtgtactacttggctgtggattacgccgttcagaaattgttgcgcttaattacgagcatattcaatttcgtgatcaagcctttattgtcagaggaaaaggtaataaagaaagaatatcctatatgccagaagatacttgggaacgtgttcaattatggatcgatgaaataaggggagcacaagatggcgcccttttcacacgtattcgacgctttgatgatgtaacggatgaacgaataacagaccaagccatttattatattttagagacacgccaacaagaaagtggcattgataaatttgctcctcacgatctgcgacgcacttttgcctctgcaatgttagataatggcgaagatattgtaaccgtaaaagatgccatgggtcatgccagtattatgactacacagcgctatgatagacgtggtgatgatcgtcttagaaaagcggctcgacatttacgtttttag

SEQ ID NO: 300689 - DNA, 3897 bp, Proteus mirabilis
gtggcactatcatctgcgatgctctacaaagagatagagcaactctcgttgcgggatcagcaacgattgagaaaacgcttacgtggcgttgataaaataagtaaagaaacgtcgaaacaggcggtattaagcgagattgagcaggatattattgtcgcaaaacagcgtatattaaatcgacaagctcactgtcctaaaattgtttatccagaaaacttgcctgttagccagaaaaaagaggctatctacaatgcaatcaaagataaccaagtggttattattgcaggggaaacgggatcgggtaaaacaactcagatcccgaaaatttgtctcgaattagggcgaggtgtaaaaggttatattgggcatacgcagcctcgacgtttagctgcacgctctgtcgcagagcgaattgcccatgaattaaacacaacattaggtgagtctgtcgggtataaagttcgttttagtgatcatgttggtgataacacgctggttaagttaatgactgacgggattttattagctgaactacaacaagataagctgttattacaatatgatactattattatcgatgaagcccatgaacgtagcttaaatattgactttattcttggttatttaaagcagcttttgcccaaacgcccagatttaaaagtgattattacttctgccactatcgatcctgagcgtttctctaagcattttaatcaagctcctattattgaggtatctggccgaacttatccggtcgaagtgcgctatcgtcctattggtggtgacgctttggatagtgataaggatatgactgagggcattattgatgcgattgatgagttaagtcgagaaagtgcgggtgatattcttatttttatgagcggtgaacgtgagataagggataccgcagaggcattaaataaattacaactacgtcataccgaagttttaccactatttgctcgtctttctaatagtgaacaaaaccggatatttcagcctcataccggaagacgcatcatattagcaaccaatgttgccgaaacttctcttacggtacctggcattaaatatgtgattgatacgggttatgcacgtattagtcgatacagttatcgaaccaaagttcagcgcttacccatagagcctatctctcaagcttctgcggatcagagaaaagggcgttgcggtcgtgtttctgatggtatttgtattcgtctttattcggaagatgattttatttcccgtgcgcaatttaccgatcctgaaatactaagaaccaatcttgcttcggttattttacaaatgacctcgataggattaggggatattagcggatttccttttgtacaagcgcccgataaacgtaatatacaagatggtgtacgcttattagaagagctgggtgccttacaagagggtactgataataaaggtgcttatcgtttgacgccgatggggaaacaattagctcagcttcctatcgatccaagattagcgagaatggttcttgaagcgcgcaaatatggtgcagttagagaattaatggtgatcacatcggcgctttctattcaagatcctcgtgaaagaccgatggacaagcaacaagcatcagatgaaaaacatcgtcgtttccaagataaagattcagattttctttcattactcaatttatgggactatttaaaaactcagcagaaagaattgagtcactctcagtttcgaaaacactgtcgccaagagtttttaaactttatgcgagttagggaatggcaagatgtctatacgcaactgcgccaagttgttaaagagctaggttttccaattaatagccaaccggcggattttaaaagtattcatgtggctttattaagtgggctattatcacatatcgggcaaaaagatagcgataagcaggagtttactggcgcgagaaatgcgcgttttgctatttatcccggctcggggttatttaaaaaaccgcccaaatggaccatggtggcagaattagtagaaacatcacggctatgggggcgtattgctgcacgcattgaagcggaatggattgaacctatcgctacccacctagttaaacaccactatagtgagcctcattggtcaaaagcacagggtgcggtaatggctaatgaaaaagtcaccttatatggtttacctattgtggcttctcgattagtaaattatggcaaaattgatccactattatgtcgagagctatttattcgccatgcgttggtagaaggcgattggcaaactcggcatgcttttttccgtgaaaatttaaaattacgtaccgaggttgaagagttagagcataaatcacgccgtcgcgatattttggtagatgatgaaacgctgtttacattctacgatcaacgaataccacaagatgttatctctacccgccattttgataaatggtggaaaatagcgcaaaagaattcacctgatttgctgagctttgaaaaaagcatgcttatcaaagaagatgctaaacgtgttagtgcattagattatccaaattattggcatcaagataatttaaaattacgcttaacttatcagtttgagccaggtacagcagcagatggcgtcactgtccatattccattaccgattttaaatcaggttaaagatgaaggttttgattggcaaattccgggtattcgtcatgaattagtcgttgccttaataaaatcattacctaaacctatacgtcgtaattttgttcctgcgcctaactacgcttcagcttttttagaacgagtggttacccctgaaggtgaattactcgataaattagaaaaagagctacgtagaatgaccggcgttacgatcgaacgtgatagttggcaacttgagcaagtggccgatcacttaaaaatgacttttcgagttgttggtgacaacaataaaacccttgctgaaggaaaagatcttaatcagttaaaagcgcgtttaaaggacaaagttcaagaaacattatcagcggtggcagatgatggtattgagcagcaagatttacatatttggagttttggtgacttgccacaacgctacgaacaaaagcgcggtagctattcagttaaagcctatccggcattagtggatgaaaagaatagtgttggtatcaagctatttgaaacagaaacagagcaacaagcggcaatgtggcaggggataagacggttattactacttaatattccttcacccattaaatacttgcatgaaaaattgcctaataaagcaaaattaggtctttattttaatccttatggcaaggtgctagatctgattgatgactgtatcgcttgtggggttgataaactcattgcttcttatgggggattaatatggcaagaagagcaataccaaaaactccaagattatgtccgtgctgaattaaacgatgttgttgtcgaaattgctaaacaagttgaatctattttaactcaggtatttgcaataaataaacgcttaaaagggcgggtcgatattagtgttgcttttgcattgtctgatattaaagcacaacttaatcaattagtttttcccggatttgtcacatcccatggctggaaacgacttgcggatattcctcgctatctcagtgccattgaaaaacgtatggagaaattagcgattgatcctaaccgtgatagagcacaaatgagccgagttgaaaatgtcattttgcagtggcaacagtggttagctaagttaaccgagaagcaaaagcagcaagaagaggtacaaaatattcgttggatgatagaggaattaagagtgagtttatttgctcaacagataggaacaccttatcccatctctgataaacgcatcttacaagctattgagtctatctcattaagttaa

SEQ ID NO: 300690 - DNA, 411 bp, Proteus mirabilis
atgaaattgattaccattagtgcgggttatattgatagcttttgggctccaatatgtgaaggaagaatcatccctaatgaatttataggattaaatctgaataattatgagagtgcacaaaaattaattgaagaatatttaattccaaaagcgatgaaattcaaatcaaaatcatggcattattattttaaagaaacattaagatatgcaattaacttttggagtaatgagcgattgtataatatttatatgggggtattacctgaaatacctccacctcaaagtaagtatattaaaatgaaagatttttatttgttaatttggactggaatgtaccctaatgaagaatgtgttgtatatacacctgaactttataaagaagttccttccgtagaaataggatcattctag

SEQ ID NO: 300691 - DNA, 420 bp, Proteus mirabilis
atggatccgtggggttggagttattctcctaaaattaatgttgagcacatttttcatggcgaaataaaccgaagaggaagagctgttggctttcaccatgaaacaagtataggtcatcaagggaaagctcgtatcattgaaataataaattttccaaatgctcatggtgtttaccaaggtaaagttgaagtgtttgatattagaacaaatcaatgggtagcaaagggacctaattcaacttttttccctcaatcttggagtcgacaacaggtaatgttagagattagaggagcgtataaaaatggtaccgcacaggagaatgggaaatggtcaggagtttctcctagtggagttaagatagaagggtggcttgactcttcaggtaatataaatacagcattcccaaaatacattgattaa

SEQ ID NO: 300692 - DNA, 318 bp, Proteus mirabilis
atgagcttttttattgataaagatggatatcccgaagtagatcttggttatgaatatcatgtattggcagattttttaagtggtgatgttcaaggtagtttgtatagtgtgaatgaatatcttgaattatgtgaattggttaagaatggtgagttagcagaatgggaaggtacaggtaatgcccatactgtcaccattaaaccgcgtggtgtcgagatttttaacgaatatactgaagagagcgtaacaatctcaacgatagaagagttcaaaggttatctggaaaagtggaaagaattacttttgagtagagaataa

SEQ ID NO: 300693 - DNA, 366 bp, Proteus mirabilis
atgagtgaggctgaagcaagagctgtatttgaagctcaggggttagtcttaaataacaaatcattaagaaaagcagtatgggtaaatacagggaatgcggattttaaccctggtggtgaaaaatatagagttactctagaacttggggataaatctgcagctttattaaatggtcatattgatatatctaaatcacctatagattggagagaaacggggcatcctaatggtattatatctaaaacaaatgaagtgggttctagagggatcggagttaatgtattagatgatattaataaagatataaagagaataacagtagaaacaaaagggaaaaatggaaaatggggaaagttcaagtgttag

SEQ ID NO: 300694 - DNA, 720 bp, Proteus mirabilis
atgcaagcatttaatcttacaaaacctacagtgttgtcagattctgatgtggtggaatcttacttacaatctatgaatcttagtcttcatgatcttacccgcatttttgaacggggtctatctgggcgttattcaacaacgcgaaatcaccctttaatttctagagggcagtatttttatggagaagcagtgagtggagctagagatattcttgcatctaggggatataaaggattatctctaagaaatgttgaattgacggttgataaaaatcacgcaatttatatttgtcgtggctgtaatcaaacggggcttattaatggatatccagaatcccgtatgaaaaaaggggattttacctgtgatttaatggggcttattcgcaataataatcctggtcaaggcatattagaactcaacgataatcaactaaaaatagattttggcctttcgaatgaagacattaccccacctttacctaataaaattggattagatttatggtttttgttgtatgatttcgataagactgacgaatatgggcgtgttggtattcgagccgaactttcgagaccaatttcttataatgataagaatatagtaaatagtttttctacacgtttgatattagatattcaccaaccagaaccgattatccaaggtagagatacaccacagtttacccaggatattgaacttgatatttccaaagtaggttaa

SEQ ID NO: 300695 - DNA, 1113 bp, Proteus mirabilis
atgtttaattcagagtgtttgcgtatagccagagagcggagaggcttgacacaaagggcgttagctgaggaggcaggattaactagtaagacaatttctaattatgaaaaagcaggtatttttgagcctattgcaagtgatagcatggagaggatatcagctgttcttggttatcccatagagttttttcttgatagagatatcccttctttatcaacagaagctgtgagttttcgcgcaatgacaaaactgagcgctcaaaaaagagattcggcgcttagtgctggaaagttggcgcaagagttgtccatgtggattgataataagtttaccttacctaaggtaaacgtgcctaattgtagttttgatagctacttagaaccagaacatgcagctagagcagttagagaaagttggggtataggtgagttatcaatatctaatgtaattcatttgcttgaagccaatggtataaaagttttttctttagctgaaaattgtcttgaagttgatgctttttcattctggatggatgaaaaaccttttgtacttttaaatacaatgaaaacaccggaacgtagtcgttttgatgcggcgcatgaattaggtcatttagttcttcataaacattctagtaataatgggcgacaggctgagttggatgcagatcgttttgcatcagcatttctaatgcctgaacgtagtattttagcgacaattccaagaatgcctccattagaattattaatttctatgaaaaagaattggaaagtttctttagccgcgttggtacggcgtacatttgatgttgggttatctagtgaatggcattatagacaattatctattgagttagctcggcgtggttatcgaactagtgaacctgaaggaatgctaggacgtgaaaaatccttaatattagataaggtattttctacattacgttctcaaggggttaaacgaggtgaaatattaaaacaattaagattaccaattgatgagctgagtgcattgacttttaataataatttctttatggaagcaattagtggtaatgaatacatgcagagatctaaaaataaattcacgccaaaattacaattaattaagtaa

SEQ ID NO: 300696 - DNA, 663 bp, Proteus mirabilis
atgatagaatggcttaatacaaatttgggttccgatacagcaacttattttggtttattggtgggaattgtcgcactgtttatcagtggaaataaatataaaaaatggaagaaaaatagcattaggcaaaattcacataacattaatggtaatgtaaatcaagctgcacgggacatcaattattactattccgcaaataattctgatagcaaccagttaaaaaaaaagtatgaacatgaccttaaaatcatcaaagaaatactagaaacattaccttatgaagatacattagaatgggttgaacggagctatattgctggtttacctcgtgatgtttgtttgaatatggaaaaagccgagaaattcagtggtgaaaactatcggttgtttaacatcgaagtacataacgcaaaagatgctctcattgaagctataagattattcctgaatagtgcggaggtatttttgactatcgattatcctgacaaagttcctatgatgctaagtcttccccatgattggaaatataaaggtgagcaatcagagaaggcattccgcacgcatcagcaaaacttgcgagaaacttctggtgaaatggtagaacgctataaggaatttgtcaaaacgatcaaaattcaggaattcatcatcgataaattttaa

SEQ ID NO: 300697 - DNA, 618 bp, Proteus mirabilis
atgaaaaataccattgtaaaagatctgaaaacactggaagagatttatggtcaacctgccgaaccatcggtcttaaaagaagtggattttattcaccccctttatcgcccttatattgaagctacaccatttgttgcattagccacttatagtgctgatggtatggatgtttctcctcgtggcgatgagccaggttttattcatattgaagacgatcatactttattattacccgatagacgtggtaataaccgcattgatagcatgcgcaatttgttaattaatcccgcgattgctttattagtgctagtccccggcattaatgaaacattacgaattaatggtcatgcggaaattttaatagatgaagaaacactcgcacgctttaaatataacaatgcactacctcgctcagtcttgcgcatccatgttgagcgcgtatttttccaatgtggtagggcacttattcgttcaggtttgtgggaaaacaaatatttagctgataaatcaactattccagcaccgggacaaatattgaaatccatttctcatcaacaatttgatggtgataaatatgatgcacaattgcctgaacgtattatgaaaacattatattaa

SEQ ID NO: 300698 - DNA, 1797 bp, Proteus mirabilis
gtgaaagacacttattccagttgggatgataaaacccagcagttaaatccagttgttggtgcggttattgccatcgcggtaggggttgcaacttatggtacggcaacagctgcctcaataggaggaatggcaagtaatgcaactattgctgcaggagcctctgcgggggttgcgtcaacggcatcagttgcggcacaagccgggtttgcttctttagtttcgcaagctgcggtctctttagccgaaaatcaaggcaatatttctaaaacatttggcgccttaagtcgcagtgatacggtgaaatccattgtcaccagtatggccgttgcaggcaccttgcaaggtcttgaccaatttatgggttgggatcaagcaatacaggggggaacattaccgacaacaggcaagttgcttgcgacggataatgccacatggactcaagttgctcaacgcgttgcctcacagtcagtagtgagttctacactgggcacagccattcaaggtggcagttttattgataattttaaaactgcgctattaagccatatcggcagtcaatttcacgctgaaggtgccaatctcattggtgataacggtgcgatattagggcatgcaggaaaggttttaagccattctgttgttgcaggagtgagtgctgaaattgcaggaggcagtgtaacaggtgcagtagccggcgccttggcagcagagatagcggcaatatcgctacaaagtaaattatttgagcctagttatttaaatgaaactgacagacaagttgcattaattcaagaggcactacatggcaatgaaggaaaaacacagctcactaaattaattggtgcactgacaggcgctattgtgactcgtaagcctgagggcgtattttctgcggctaattctgcggagttagtttatcgacataattacagcgaacatatactttcaaagctagcactagaaaataataaggacataattgcagcgtcaaaaggtgatgttgcagcagcagaaagagttgtaaatcgacaaaatgcagggatgattgcgattgctcttggtttaggaggaagtgcgagcattattggtggtcacactgttattgcagcaacaccagaacttattgctattacgcaagctgcatttagtacatgtaaagctaattgggtttattgtgctaatcagctaggtattaatattgctgggatatcagctccagaagctgcaatcgctggtgtcaccgttggtactggttataaagtattagctagttcagaagaaagtgctaaagctttctctagcatgttagctaatagttcaaagtctttaatgacttcaggaaaattaaatataactgctataaaaccgatagtagaacaagaaaaattattaataactaccaacaaaaaagctattgaaataatcaataacggggagtttataatatattcaggagtaactacgaatggatataaagtatctaatggagccaaaaccgtagtttttaaaaatgaattagaacatcctattgttcaatctaggattaatattaaagtgggagatgttgaatcaggttggttgcatgtacaaaaacgtcatttttcaggagcgcaaaatgctagccaatttacgcttagtgaacaggaaattaaagatatattattaagtcctgctgtcattaagattcctataaatataggaattgataaatttagtaaacagccaactaacataattactatgctcacagataaaaatggaaatttaataactactacccctggggaaataaagtga

SEQ ID NO: 300699 - DNA, 696 bp, Proteus mirabilis
atgaaaaagaattttctctattttaccttatttacggctatatcaacatcagcactggctgtaacaccttcagctcaattacagatcaatggggatataaaaccgccaacttgtacaatcaatagttctaacaatacagaagttgtctttgactatggccgcatatcaccaagcttgataccacaatcttcaaactatcaatatgtggatatgaaaccagaaacaagcatcagtattgaatgtgatgctaaaacttatttgacttttatacctactgacacatatggtgatgtagatcttgattataatactagttatgatagtgcttggtttcgcttagttgataaagccaacccagataaagctgttggggcttcattttttaattggaaagatgcaactgttgacggaaaaacggcttttataagccgagcaacacctaaaacagctgaagtaggggaatctgtcttagttaaaaataatattcatgggtggacatcagagcaacaagaggatgtatcagccgcatctcttaaattggtctcaggtgaaatttttaccacaaaatttatgccagggaaaacatctcatacatttattctttctcgtgatgagttggctaaaaaagcgatagatattagtaatggactcgattttattggtgaggccgtattaacattctctttcggtgtttaa

SEQ ID NO: 300700 - DNA, 780 bp, Proteus mirabilis
atgagtcaaattacagtagcaaacaataactcagttgtcacgcaaaaccgttttacggttccagaagtctattatcgtaaccagaaggtgattaccactgaatcactggctattggttatggcgcggagattaaaagcatacaaaataatttcaatcgaaatcaatctagattcgaagaaggtaaacattacttcaagattgaaggtgatgaattatctattttgcggtcatcatttagtggagtgcaaatatcgaacaaagctagattgctttatctctggacagaacgcggagcatctcgccacgctaaaatgctggaaactgatcaagcatgggatttctttgagttactcgaagatacctattttggaacacgaaaaaataataaccttcctggtaattacattgaagcactggaaaacttattaaaagcagaaaaagagaaagcagtgatcgcagccgagcgtgaccatgcaatagaaactaaagcgtggattggtaaaaaacgtgaagcaacttcaatggctacggcatctaaagctgttcgtgaaaagaatcgtcttgctgaaaagctaggtgaaagcaaaaaacacgcaacagtattagcagtagagaagaaactaaacaaaaaattcaaatggcaaccattgaagaagtggtgcaaagagaatgatgtagaaatatctactgttcatgatgatagatacggaacagctaactcatacccatcaggcgcatggaagtccgcttatgatgtggatttagctaaattgttctaa

SEQ ID NO: 300701 - DNA, 1134 bp, Proteus mirabilis
atgcaacatatcattaaatcaatgactaatgcgtatattgaaaaaggctatattacttcacaagcttttattgccgatcaagatctctcaaatcatcaattaaccattaacgtaattgaaggaaagataaaatcaatctttattgataacatgacttctcccatggttgatattctatttccttcatatcaagataaacgacttaatttacgtgagttagagcatgggcttgaacaacttaatcgattaacaacatcacaatatagattagatattcaacctaatgacaggataggatactcgactatttttatttataagaaaaacaaaacgcatcctttcagaaatcaacttactattgataattcaggttcaaaagcaacaggtgaaattttactgacgaataccacaacaatagattcgttatttggatttggagagcagtgggatctctccttaaacagtaatacagatttattacattcacattattatagaggctatacagcgagtataaacattccctatggctattggttttatcaatatcagttatcttataaccgttcttctcattttattaaaagttatagtaatcaatatatctataaaagtataaatactaatcagcaagttgatattagtcgtttactttatcgggatagtaagaagaagataatattaaaaggcatattaaagcataaaaaagtaagaacggaattagccaaacagccgatattaatcaatagcccaacattaacatcattatcattagcccctcaatatcattttaatctgacatcaggttatttatctattaatccatcagcagaaattgggttgtctttttttggggcatcacctgattatattgctgaaaactcaccccgaagccactatagaaaattgagtctaaatatacattatcaatatttatttccttactctgtctcctatattacgtctttttatggtcaatatacatctgataatctttatagtgtggaaaaaataaccatagatggattaaatgcagttcgtggtgctaaacaaaataagcttagtgccaatagaggactttattggcgtaatgaaattaatacaccatggataaattcatttttaggtcaatag

SEQ ID NO: 300702 - DNA, 615 bp, Proteus mirabilis
atgagaaataaaccgtttatgagaatgcttaagctcataccggcgtttattgtcgtagctacgttatcagcctgtagttcacaaaacgcgtcttcacgcttagctaattcaacaactgccccacttaataaatcttcaagcacatctatttcccaagcatctcaagatgaatttgaatcattggtgaagaatctcgatataaaatctaagatacttgaccaatatgcagactggaaaggtgttgcataccgcttaggtggcaatacaaaaagtggtattgattgttccgcttttgtccaaagaacttttcgtgatcaatttggtgtcgaattacctcgttcaacctccgatcagcaatttgccggtaccaaagttaatcgttcaaccttaaaagcgggtgacttagtactgtttaagactggtcgcactatgcgtcatattggtatttatatcggtaatgataagtttgttcacgcgtcaaccagcagtggtgttatcgtttctgaaatgtccaatgtctattggaaaaaccgtttctatacagcacgtcggatcattgataataatacaacaacaagtcttgctgataactattctcaagcgtcattaagataa

SEQ ID NO: 300703 - DNA, 339 bp, Proteus mirabilis
atgacgactatcgaaaaaattgaacgccaaatcaaagaaaatcccatcctgttatacatgaaaggatcaccaaaattaccaagctgtgggttttctgcacaagccgttcaagcgatttctgcttgtggtgagcgttttgcttatgtcgatattttgcaaaaccctgatattcgtgcagagctaccaaaatatgctcattggccaactttcccacaattatgggtggatggcgaattagtcggtggttgtgacattatcttagaaatgtatcagcgcggtgaattgcagaagttattaaaagagactgcagataaataccgtggtgaagaagaagcataa

SEQ ID NO: 300704 - DNA, 231 bp, Proteus mirabilis
atgaacctcgcaaacttatctcaagaagaaaaagacaaaatcaatgtcgatttggctgcttcaggtgtcgcatataaagaacggctcaacatgccaattgttgcgtccgaagttgaacgacaacaaccagcacatttgagagcgtactttaatgaacgattagtattttatagagagagaagtaagaaattgcctgacagtaaatcggtacagtatttgaaaacagagtag

SEQ ID NO: 300705 - DNA, 888 bp, Proteus mirabilis
atggatacacgtttattaaatgcttttgtggtgttagctgatacagggcactttggtgaagcctccaaacagctttgtattagccagcccgcattaactaaacagattaaaacgttggaatcacaactggatatcgtgttgtttgagcgtggtcgccatggtgcaaagctcacgcaagaaggacaatatttactcaatcaagctcaagtggtattacgggaatcccatattttagaaaaacaagctcgtcaattagttgagccacaaaaagtctcactttatgcgggattcggtctgtcatcattaagttttattacttcactattggcgagatttaatcaaattgagccaaatattagtgtcaatattgatgatatgtcttctcataaaatggaagaaaaattattaatgggtgaacttgatgtggctttttctcgtttacccgttatgccccctttacaagggatagcgttgacacaagagcaactgatgttagctattgcaacacaacatattacggtgttggaggcagattataacccattacattatttcgactcattagggcttattctacttgctccagaaaaagggaaaaaactgtatcagcagatacatgcttttttacaacagcataaactagcaccgcgtttattacagcaatctcaagatattcagacccaattagcgctagttgcagctgggttagggatagcattagtgcctaaaagcgcgcaattaatttgtgataaacaaagagtcacattgttacctctatctgggttatacacacaatggaaaattggtgtaatttggaatagtaatattaaaaataaagaacgtgatctttttattaaaataattactgaaaaaattgatattaaataa

SEQ ID NO: 300706 - DNA, 1011 bp, Proteus mirabilis
atgaaaaataaatcattttatttcacgctattattattttttattgctatggatacttctgctgctcgatgtcggaatgtgtcaatcaaatataattttccagcccaaatagatattacaaataaaaaagtgggagataagctttattcttttggtgcgccagacgcccctataaacgttgctggtcaatgtctacgtgctaatagtggggcgggaaatacaaatggaaattatatttatattgttgatcaatatggctcatcaccaacattatgcccgactactggtacagttgataaaaattcaccagatggatacttgcgttttcgttcaacgggaagttgtgctaattcttcttggctgctagttctagattataaaatatctggggttggctggaccaatttaacaggtcccggtggtggtactgattcaggcgttgtttatttacaaaaaaagccacctgtaggaaaaacggttattaatcctgtctatatgttgaaacgtaattattattctcgaattggtcaaatgggcaatacgttacaaaaggaaagcgttgctcttagtgcaccaacatcgatgacgttgataaataatgcttcttgtgcagtgtctgttaatgacgtcgcatttggtgaacaaaccgctagtgacgtaaaaatgaatactattgcaggaaaaaatataaatatttcttttacgtgtaatgctgtattacctgcatacacactcagtttttctggtaaagatggtgtgaataatgccacaacagggatcattaaggttaaagataatagttcagtggggtatcaactttcttgggcagatagcacggttaaacccattaatagtgctgtagttattaataatgtggcaatagctccgaatacaaagccaaaaaccaataattttactattccgataagggtaaaacctgttgcgttatccactcagccaatccctgggccggctaatactgcattaacgattaatataaagttaaattaa

SEQ ID NO: 300707 - DNA, 1125 bp, Proteus mirabilis
atggaatactttactaaaaaatcattatttacctgcgataaaactaatgaaaatctccctaataaaccgggtgtaataacacactgccaagatctagcgtctgacttagggttaagcgaagcttttgcgcaatacacaatatcttatacttcttgtgacagtgttcatggagaaattatccgtgaagatactggtgccgtttttattccgaaaagtcaggcgcctaaaaatggttggcctgtcattgtatggaatcatggtacggtagggatagcgccaacttgtgctccctcattaacacctaaaaatagtcgcgtatcgcaatatttaaatacttggctatcccttgggtttgcgattgttgcacctgattatccaggtttaggctcatcagggttgcatcattatatggatgaaagagcaacagcatggagcgctttggatagtgcaaaagctgtcttgaaaggtgggttttcgctaagtaatcgctttatctttatggggcaatctcaaggggctcatgctgcatttgcctctgtcggctatcagcctgaatatgcaccagaattaaatatcttaggtgcgatagtgacagggacgccttattttagtgataatctacttgaaaactttattagtgatggtgttcaagatgaaggtgatagaaagctaccttacgcgatgtacttatatctttctgctgctgataaaaatccaaacttaaaagtggaagattatttccaagaattagcaataccttatgttgaaaaagcgaaaacgctttgtatcagtccattaagtcaattggtaatggataataaattaaacgcatcaaatagcttaaaacctaagttttacgagctattagagcaagaagcgtcaagtttaaattatagaaaacttcttgttgataagcccgtatttataggaattggtttagaagatattcatgtgttaactcgttggcaacaagagtttgcaagagatgtattggaagcaggcacaaatgcatatgtatatgaatatccgaatattggtcatttagatgtatacaatgtctctttgcgaaattcagtgccttttgtatttgaactgatgaaaaataagcatagcaaaatagactaa

SEQ ID NO: 300708 - DNA, 2562 bp, Proteus mirabilis
atgaatagtagacgccgtcgggttgtaataaccggaatgggggttttatcatctttagctaaagatgtgcctcaatttaaacaggttctttttaatagacaatgtaatattaagccaagccaacgctatttaaaatggtttaaaaatgccaatgcatctgagattgagatggcattagattattcagatataccgcagcatatcgctcgatcactagacaatgcggcattatgggcatatcgagtctgcaatgaggcattacaacaagcaaacttaatagataatcagtctattttagataataccgcgatgatcgtgggcgtctcttcagcaggaacggaagcctttctgccattatttgaacaacatattgatgatttttcgataaaaaaagccattttatccggtggattttcatcatgctgttcgagtgtatcaagtctacttggcttacgtggtggtcttgaattagtggcgacggcctgtaccgcaagccctaacgcgataggtatggggtatgattatatccaaaatggcaaaaatcctgttgtgctagcggtcggaacagaacccatttatcttcctacctttgcgggtttttatgcccttaatgtgatgaaaacaacaccaacttccccattttcaggtactcctggtatgtctattggtgaaggtgcaggagcgttagtattagaagattatcaacatgcggttgaacgtggtgcgacaatatatggtgaaattgtctcttacgcgacatcttgtgatgcttaccatgaaactagccctgatcctcgaggaaatggtgcagtgcaagttatgtataaagcactggataatgcgggtattactcctaatgatattgattatataaatgtgcatggtacaggtactgaagcaaatgatcgcattgaaaccatgtcgatgaaaaaagtgtttcctaatatttatcatatcccattaagttcaacaaaatcttatgttggtcataatattggtgctgcgggtattgttgaaatcatcgcgtgttttatttgtttagcagaagacaaacttccccctacattaaatttcactcagccaaggcatagctgtgatttaaattatgtaccgaatttctttcaagataaaaaagtaaaattttttatgaagaataattatgcttttggaggaaataactgctctattatcgcaagcccttatattacagataaaacaccgacggaatataaagctaaaaaagtggttattaccggagtgggggcgattacatctattggcaataatgtaatggagataataacagcgatttcggcaggagataaaacaggtacattaaaacctatcgtatttgcgagtgatgtgcagaaagatatcgacaacttgatgtctgttgtcataaaagataatgattttgagcaatcgttaggacatccttattttgatctcgacattgatcatcgcttaaaaaataacgcctgttatcatgctatcactgacgttaatccgaaaaaaacattacgttattatgatccaagaaaagctattcctagcgggacttatgctttattcgctttaaatgaagcacttgctaatgctggacgcaaaattaaacgtgatggtgataacttaggttttattgttggaatgtcaaaagggccacaaagtaccgttaatcgttatttacaaagtttaattcctgatccgcaaaaagtaagaacatcagaatttcctggtactttaatgaatgcagtaccgacattttgtgccatcacagagggaataaaaggttataccacgacattggcaacaggggttaatgctgcattaggagcgttaacttatggttatgaaattatcaggcaagatctacaacctcaggtaattgtcggaggggcagatgagcacttcagttctatttcactctattttcaagcgatgagtaagaaagttaatctgaccaagaatgcgacagattatcaggtttattctaatgcaagtgccggctatatccccggagaaggggcagggatgttatttcttgaagataaagagtatgccaagcaacgaggcgctaaaatttatgctgaaattattggctacggtaaagcgaatgataatacttttttagtagacgaaaatattactgatagagtggccgccttatgtaaggctatccaacaagcattatctgaggcgcaactcagttgccaagatattgatattatctgtggtaccagtgatggtaataaagagaatgatgaagttgaaatccgtgcgattcggcaactattttatcaagcggcaaatcatgtaccagtagttaattacaatgccttttttggtttagttgaatcatgcgctgggatattggcgatctctttagtgattcatatgatgcaaagcaacacgataatacctattccttatacaaaaagttttatagctgatgatattcattttgttacccaaccgattaataagcagatagaaactgctttagttcttggttcatcagaaggatgtaaccactatgcaattatcatcaggaaaccgttatga

SEQ ID NO: 300709 - DNA, 951 bp, Proteus mirabilis
atgaccaatttacgcactgtatcaaaacacccagagcaattagaaaccacaccattaattgcggaaagtcatcactatgatgaccctttagcacctcaaaagctggtatttttaaaagcggttaatcaacagcgttgtgtgattaactcaccacagcgcaatagccaacttactaatacaatacccttttttatcgtacttttagttatggcctgttatacattttggggttttatggataggcactcatctaaaatgtatacatttcaggatacaattaattataacaaaagaatttatgactcatataatgaacaaggcaaaagccctccaaaatatttagataaatatgttccatactttaacaaagggaaaataagtatatgggcctatattaaggcatattataccggtgagcttagccgtaatagccaagcagaaatatttttaataattggctggttaatttttttccccggttttttatggctatttggctatctctctttctttacacctcctgtgtaccttattgctgataggcaaagaggaatactgtatagctatggcatggggaaagtgcgtttaacccgctataaagaggcgcaatttggttatgcgggcaatatgttggcaattaaactatatggcattaatgaaaaaacaggccaattaaaaacgatcctctatcgccccaatgtgtcccactactccagtttcctaaccagtactgacagtgaaaaccaccgttttatcactttccttaatgcctatatgcaacaaggccgagatgctgtttcatcggttgattaccaagcccgtaagccctttttatcttttggtaaaaacccacttcctgctgattttgagcaacaggtcgaacagattctggcaaagcttgatcaggagaaaaaaaccatgcgtaaaattgataaggagggcacggaatga

SEQ ID NO: 300710 - DNA, 2253 bp, Proteus mirabilis
atggtgatgatacaacaaggggggcaaataaaggactcatttggtggtgtcggtaactcactaaaagcgttagcatcacttattacccctgcaagagttgctatgtttggttttgctggtgctgcggcagctgtggcgttagccgcgtataaagggtcgcaagaatttggcgagtataataagcagctaattcttactggtggttatgcgggaagaacagcggcacagctagatgctttggctagaagcttgtcggggaatgggatcgctcagtatggaatggctgatactatctcaaaagtagttggatctggttctttctcgggtcgagatgttgatatggtatctaaaactgctgctgctatggaaaagaccgttggtcaatcggttgatgagacaataaagcaatttcagagattgcaagaagatccagttaaagcggtcactgaattagataagtcattacattttttaactgctacccaattagaacaaataaccacacttcagacgcaaggaaaagagcaagaagcggctaaaatggctatggaatcatatgccaatgctatggatgagcgaaccaaacagataaaggaaaatctaggccaccttgagagagcgtgggaaggggttaaaaacatggctagtagcgcatgggatgcaatgctagacatcggtaggacgaaaagtcttgatcagcaaattagagaatataaggaagctttagtagatgcacaaataaaacctgctggagaagatatattacgatataaaacagggttaactatagatgaagttagaaacaaactagccttgttagaggaggaaaaatttcaacgtgacattaaaaacacaagagaaaaagccgcaagagatgaggaagagcgtaaaaaagcgcagtttagagccgatcaagaattaaagcgacaatacgaaaccgcagaggaaaagcaccagagactactcaaggagataataaataatgcggatgcatctcaagctgcaaaagatgaagccatccgccgagagaaagagcgttacgagaaagaaaaagccagaggtaaaggtaaaaccccaacctaccgaccagattatggtactagagtagacgaatcagcaaatcaagccctactatccctgcaagcacaattgaaggtgctaaaagagcataaaacagtcagtgatgtgattagctctgagcgtaaaaagctgtgggatatggaggcgaaaatatcaatccttgagggggctcagaaaacaaggcagttaaccaaggacgaaaaggcgttgcttgctaaaaaggactacattcttgcttctcaagaagcactggccatagctggtgatgaggttaagcttcaggagttacataatcgtgagttagataaacaacttaaacgtgttgaagaaattaatgccagaagtcgcgccttagagttgggagctggtaagtctgaccgcatgtatcaacgagacattgcactagagaaagctaaatcaccagacgagagaaaagccttagaggagtattatgctaaggaagactctattcgtgctaactgggagttaggcgtcaagaaaggctttgctgaattccaagaacaggcaacaaacgtttacggtaacgtagctcaaattagtcaatcagcattccaaggcatgagtaacagtctctctgattttgtattgacgggcaaagctaattttgctgacttcactcgctcattcttagaaatgaccaccaagatgttaatgcagatggctatgctaaatgctatgaaagcggcatttggtggtaatgcggtaggtaatttctttgggtttgcaagtggtggttatacaggcggtggtggtaaatatgaccccgctggcgtagtgcataaaggcgagttcgtctttaccaaggaagcaacgcaacgattaggtgtagataatctctatcgactaatggatgcaggaaagagaggttatgcttcaggtggtcatgtcggtggttctgcgccaatgtcggttacacagccaacagcatttatcgctcgcaatcctcaaattgctggtggtggggtgaatgtgacaattgatatgagcggcgtcaagattgaaaccgaacagcaacaaagtgcaatgccaaatatagatgtgagagctgctgagcaatcgttaaagaataaagttaaaagcctttttattagtgaagggcgagaaggtggtgatttgtacaagatcattaaagcagtatcaggaaatagataa

SEQ ID NO: 300711 - DNA, 498 bp, Proteus mirabilis
atgtgtaaacaagcattgaagttttgccgagttagacgttatgccataagtaatgctctagatgatctaacaattaatgatgttggaaaaaaacaagaaaaaagagatagagtgcacactaacgaagagttaggacaaatttttcgttattcagagaacaaaaaattacctgaatactatcgaaacttactaagattgctgattatttttggatgtcgaacacaggaacttagattatcgcaatggggagaatgggatttaaaaaactgggtgtggactgttccgagagaacatagtaaatcagataataaaatcattagacctattcctaatgagctaagatcactgattcaaaaattttatgataggaatttagaatcgggctatttacttggagagttaaaaaatcagcaacagttagccaatggggacgtagtttatggaaaagactcgaccataaagagccatggacattacatgattttagacgttctttag

SEQ ID NO: 300712 - DNA, 369 bp, Proteus mirabilis
atggccagtaataaaggtattaataaactgagtgataaagccctcaaaaatttgataggaaaagaaggggataatgataagttttatgctgatggaaacagattaaacatcaaagccactaaaaagggtgttctgacatggtatttcaattttcgtttaggtggcagggaatctaccccaattaaattaaaattgggtaattaccctgagctctctttaaaaacagcacgagaaaaacgagaacaatgtcggtcttggttggcagaaggtaaagatcctcgccaccagctatatgcaacaaggcaagaaacgcaaaagcctgtaacagtaaaagatgcgcttgaatattggataaaagaatatgcttaa

SEQ ID NO: 300713 - DNA, 594 bp, Proteus mirabilis
atgaaatttaataaattagcattaggcgtagctttatctatgatagttgttgcccccacttttgcagaagatccagtagaaccaacaaatccaacaacacaagcagaaagtagtcaaggtaccattcgttttacaggatttattaatgatgttccttgctctattgataacgataacttaaatcaaacagtaaaattcggcgaaatcgcattacatgaactgactaccaacaacttccgttcagatagtgagaatttcgatatcgtattaaaaaactgctctacagaaacctataaaacagcaaaagttgcttttactggttcaacagtaagtggttttgaaggttatacaggtgagttattgggattaggaagcaaagttgagaatgcgggtattgtgatcacagaccgtgctaataatccaattacttttggtcaaggattcccaactgagggtaaatcattaaataatggtgatggtacaacgactacccttcaattttcagcctatgtaaaaggtaatgaagctaaggataagaaagcaaccacaggttcttttgatactgtagctaacttcaaagtgatttatcagtaa

SEQ ID NO: 300714 - DNA, 657 bp, Proteus mirabilis
atgaatcgcattttaacgttagtttttgtggcatttgcttttgtgttatcaggatgtgcagagccagtcaaaacagactataccgcctttaaagcaagtaaaccaaaaagcattttagtgctgttacctaaaaatcagactccagaagtagaagctgcccatagttttttatctcaagtgacttatcctttggcggaagctggctattatgtttttcctgtcgccgttgttgaagagacctttaaacaaaatggtttgtcaacgggaagcgatatccaagcggtgagtcctagtaagttacgtgagatttttggtgcggattctgtgctctatttggatgtcacccaatatggtacttcttatcaagtgatcgccagtgagacgcgtgtcagtgccagtgctaaattggttgatttacgtaatggtgccttactgtggagtggacatgccagtgcatcgagtgcagaaggggatacagcatcgaatggtttggtgggtatgttagtttctgcagtagtgactcaaattgttgatactattgcagataaaagtcatgaaattgcaggagtagcaagtgtgcgtttactttctgctggacatgccaatgggatcttatatggtcctcgctctccccactatgaaaaagagggacaataa

SEQ ID NO: 300715 - DNA, 669 bp, Proteus mirabilis
atgataagagaattagctgaaaataataatcaacttaacgagacttttgggcaaataagcgcattagaaaagcaaaaattagaatatgaacaaagaatattgcaacgtaatgctaattactaccaattagctagaacagagctaaataaaatacaattacaaatcagtgaaacagaaaaacaacttattatagaaaaagataaattagctaaaatggcgattatcgcaccgatatcgggtactgtaatggatctttctgtttttacccaaggtggctttgtaaaaacaggtcagacattaatggacatagtgcctgaagatcatcaacttgttattgaagcgcgtcttgctccgcatcttattgataaggtaactcctggccttcccgttgatttgatctttagtgcctttaatcaaaataccacgccaaaaatccctggtgaagtaacgattatttctgccgatagattaattgatgaacgaacaacagagccgtattatcaagttcttattaatataaaagattatacattattagcagataataaaaataaattgaaagcaggcatgcccgttgatgtgtttattaaaactggcgatcgctcattattaaattatcttttcaaaccagtattggataggctccatacttcattaacggaagaataa

SEQ ID NO: 300716 - DNA, 705 bp, Proteus mirabilis
atgaaaaaattattacttagcctaactatgctggcgataatatctacgccagtgttggctaaatcccctttggctaacttaaaaatcaatggagatattaaacctccaacttgtactatcaatggagcaacacagagtgatgtgattttcgattatggagccataagcccaacacttatccctcaatcaactatctactcttatccagccagtatagctcaaaatacagttacgattgaatgcgatgcaaaaacatatttaacctttgttgcgtctgatacttatgctgatacagaattaagtgttaataatacatcaggctggtttcatttagttgataaagcaaatcctgaaactgcggttggagcagcttattttgtatgggataatgtgatcattgatggcaaacctgcatatatttcacgagcaaatgacgtggctattacagggaaaagctacaataacgtcctatacaaagggccaactaatggttggacatcagaacaacaaacaagcgttgataaaaacgccctgactctaatttcaggtaaaattttccaatcaaatttcaggcagggaattgaaagtagttctaatcaaaccttcattttatctagaaatgaattaagtaaaaaaggaatagatttatctaatggattagattttatcggggaggctgttctcacttttaattttggtgtctaa

SEQ ID NO: 300717 - DNA, 1284 bp, Proteus mirabilis
atgtctagttctcaactgaaaaaacaatatattggcgaacatcaattatctccagaaacgttaatgatgagctatggatacgatccattgttatcagaaggctccgtcaaacctcctgtatttttaacatcgacatttatttttaaaagtgcagaagaagggaaaaatttttttgatacggtaagtggaagaaaaccccttccagaaggagaaaaagcaggtttagtctattctcgttttaaccaacctaatagtgagatcgttgaggatagattagcagtttatgaaaacacagcatcatgtgtcctcttctcatcgggaatgtcagctattacaacgacattaatggcttttacacaacctggcgatgttattttacattctcaaccactttatggtggaacagaaacattaatagccaaaacattcgctaagttcggtattcaagcaacaccatttacagatggtttaaatttagcacatatccaatcgcaagctgaaatggctagccaaaaagggagagttgcggtgatatttgccgaaactcccgccaatccaactaattcactggttgatattcaagcgttaaaaatcgttgcggataaattagaaacaagccaaggctatcgacctattattatttgcgataacaccttattaggacctgtttatcaacatcctatagagcaaggcgctgatatttcactctattcattaacaaaatatgtgggtggacattctgatttagtcgccggtgctgcaatgggatcacgcgagcttattaatcaagttcgcctattaagaggtgcaatagggacacaacttgatgcgcattcttgctggatgttaggccgctctttagaaacattgcaaattcgcatggaaaaagccaatcaaaatgcgctattagttgcacaatttctacgtgaccatgaaaaagtgaaagtgatccactatttaccttttgtagataaaaatagtattgaaggtcaagtatttgctagacaatgcacaggcgcgggatcaacattctcctttgatattgttggtggtgaagcagaagcttttcgttttctcaatgcgatgaaaatatttaaattagcggtgagtttgggaggaaccgagtcattggcatgtcatcctggctctaccacacattcaggtgttcctatggaattacgccacaatataggtattcaagaaacaaccattcgtttatctattggtattgaaaatccttatgatcttattgctgatttatctcaagcattagatcatgtttaa

SEQ ID NO: 300718 - DNA, 1647 bp, Proteus mirabilis
atgaatatagcgatgacagaaagatataaatggttattgtttttcctatttatcttattaacttattttattcctttagaaacgcgactgttatggcaaccagatgaaattcgttatgctgaaattagccgtgaaatgttagtttctggcaattggtcagtgccttatcttcttgatattcgttattttgaaaaacctgttttaggatattggatcaattgtattgctcagtggctatttggtgaaagccattttgcggtgcgtattgttgtagtaacatcaaccttattaacaggatggcttatttataaagcggcaatggtagtttggcgcaatagcgctcttgcttttaatgctatgaccgtttttttatcttcttttctggtattagcaataggtacttataatatattagatcctattgtgacgctgtttgtgaccgctgcaatgtactcatttttagttgcgttatcgaccccgaataaaaagggcaaaataattgcttatatgggtattggctttttttgcgcacttggttttttaacaaaaggctttattgcggttgttttacctgcattagtttttttagtcatggcaattagtcaagctcgctttaaagaagtggtttgctattcctctattgcattgttagctctcgctattacagctggaccttgggtgattactgttgcattacaagcaccggattattggaattattttttctgggttgaacatgtacagcgttttattgctaaagagtctgctcgttcacaaccaacgtggttctatatcccgatagttatattgggtgtattgccttggctaggttttttatttggtgcattaaaatcagctttctctttaaaaaaaggtacactctattttctgctgtggtttgctctcttttttgcttttttctcagcctcaaaaggaaaactattaacctatatgctaccgtgctttgtgccattatctattttaattgcacactatatcgaagagttaaaagatagacctgatgagaaaatcagtaaactgaacgcatctatcaatattgcttttgggctaatgggtatatcagccgttatctattctttatacagtgctaaatttgagctttatgatacgaatgaaacgttaaaaatagtgttagcaataagtgggtttttattttggagtgtgattggtgcgggggcgctgtttagacaaacacagtttttaacgatgttttgctctatcggactaagtttagttattggctatgcaatcccagaaaagatagaaagtaggagtacaccagaaaatattatccaacgttattatgagcctttgagtaataaatcgtatcttttaacggacgaagttggtattggtacatcacttgcttggggactaaaacggactgatattcgtttaacagagacgaaaggtgagttggcttatggtttaaattacccagatgtaaaaaataaatactatagccttgaacagctattagcattaatcgaagcaaaccaatataaaggggtagcgattgttttagtcagacctgatagaaagcagattttgactaaattgactacattaaaggaaaaaccgatagtagaaaaagagggcgatttaacgctggtgttctttaattag

SEQ ID NO: 300719 - DNA, 372 bp, Proteus mirabilis
gtgcattgtccgacggggtatattgatctgtttgggttgacgtgttgtccaacaaccttatcagggaatactataaaaaaatttgatggctcagatttaattactattccagaaaatgctaaagttcgtaaactgatccctactaaaggatatataggagactacggatatgaatataaatggaaaaatactaatggtggtacaacgacggtgcgtattcatggaataggtgagacagcacctgctggtacaaacgctagtcaaggctgggttgtgaggattatggatggtaaaaaagtatggatattaatggaaattatcatcctaccggtatttttaacacagacagccctaattataatccatcactaa

SEQ ID NO: 300720 - DNA, 375 bp, Proteus mirabilis
atgtctaaagattatgatacttttctaaaggaaaaaataatagaaataaaaatatcattgtcaaatcaatgtactgatatgtatgaattaataggatcagttcatgatctattttcttcagtttatactactaaattagtggctaacaaaaatgttattgaagaactgtgggatgtattgcttagtgtattccttaaaagtaatttttatggaaatagatatgatgcgatctttgctatgaatgatattcatctttatgcaaaaaaattaaaaataagcttagaactagacgcaataagaaaatggaggaaaagcagtaatacatcgaattcaacagaagagatattagaatgtgttgatgatatactaacttaa

SEQ ID NO: 300721 - DNA, 1215 bp, Proteus mirabilis
atggcaatgaaaatgaacccattagaaatggtcagtgcaattgaaaatgggattgggggaacgctgggatttttagccgccattattggtttgggtactattctcggtaagatgatggaaatatcgggggcggcagagcgcatcggtatcactttacaaaaatgccgttggttatcaccggatgttattatggtattggtgggactgatttgtggtattaccctgtttgttgaagtaggggtggtgctacttattccattagcattctctattgctaaaaaaacaaacacctcattattaaaactcgccatccctttatgtactgcattaatggccgtgcattgtattgttcctccacaccctgcagcgctttttgtcactaatgagttaggggccgatatgggaacggtgatcgttgccggtcttgctgttggattattagcctcattagtaggcgggcctcttttcttaaaagtattgggtgagcgcttaccttttaaaaccgtaccagaagcattttctgatatggaaattcgtcaagaaaaagatttaccttcacttggggcgacattatttacggttttattacctattgttctgatgctgattaagaccgccgcagagcttaatatggaaaaaggcacttcggtttatattgcattacaatttattggtaacccgattactgcaatgtttattgctgcttttgttgcttactatattttaggtattcgccgtaatatgggcatgagtaccctattgaaaaaaacagaagatagttttagctctattgccaatattttgttaattattggtgctgggggcgcatttaacggcattttaaaagggagtggtttaagcgattcattggcggtgatcctctctaatttggatatgcatcctattttattagcttggctagtagcgattattctgcatgcagcagtaggatcagcaacggttgctatgatgggtgcgaccgctatcgttgcaccattaatgccaatgtatccagatattagccctgaaattattacattggcaattggctctggggctattggctgtacgattgtcactgactccctattttggttagtaaaacagtattgtaatgccacattaagcgaaactttccgtttttatagtatcgcgacctttattgcttcatttgtggcattagggggcacttttatgctttcttttgtcatataa

SEQ ID NO: 300722 - DNA, 1650 bp, Proteus mirabilis
atgacaaacacagttattaagtacgttttagaccgattatatgatttaggtatcaaagatatttttggtgttgctggtgattacgccttccctattgaagacactgtttgcaacaaccaacaacaacgttggattggtaactgtaatgaattaaatgcggcatatgctgcagatggctatgctcgaattaaaggaatggcggcattatccaccacctttggtgtaggtgaattaagcgcgattaacgctattgccggtgcctatgccgaaaatttaccgattttccatttagttggcatgccagcaagtggcgtacaaaaaagtaaacgtcttgtgcatcatactttaggtaatggtgattttgatgttttttatcagattgctcagcgccttgcttgcgctcatactattttaacacccgaaaattgtgtggaagaaatggagcgcgtaatagaagcagcattaaaagagcgtcgtcctgtttatattggtataccttcagattatgctaatagccaagtagtagcgccgttatctgttaccgcaccacaaaagccaacaagtgataaagcaacattagaaaaagcagtatcagcaatcattgagaaactcacccacagcaataatgtctgtgtattaccaggctttttatctgcacgtttagggttaacagataaaatccagcattttattgataaaacaggtttaccttatgccactatgtttatggataaaagcatattaagtgaatctaacactcaatatgttggtatgtatgacggacaattaatgacaccagaggtcagagaatttgtcgaaagtagtgaatatatattagggatcggtacattactgactgactttaatacaggcagtttcactgctaatataaaatcagaacaatttatcagtatcatgccagactatgttgaaattgattctgtgatctactcctgcgtttatatgacagatattctttctgaattaacccaacgactgccgaataaaacttatcataaaataacagcgaaaggattaggtgaagcggttacatctgataataataaaattacagcacaatatctctatcctcgtttagaacaattctttaagcctaatgatattattattgcagaaacaggaacctcatccatgggattaggcttcgctttattacctgaaggtgcacaatttcataatcaaacactatggggctctattggttgggcaacaccggctgcattaggcgctgcgttagcggcaccagaaaaacgcattattttaattaccggtgaaggctctcatcaattaacagtacaagaaattagtcaatttgttcgtttcggtttaaaacctattattctagtattaaataacgatggttatttaatagagagattattatgtgattaccccgaagcttattataatgatttagctcagtggaactatcatcagttaccgcaagcctttggtgcaacagattggtatagtgaaaaagtaactacagcaagtggactagataatgcgttaaataaagccgcactaacaaatagcgcatcttatattgagatagtcacagagcgatatgaggcctctgaattagcgcaaaaattaaaagaatcaaaaagttcattatattcattctaa

SEQ ID NO: 300723 - DNA, 1395 bp, Proteus mirabilis
atggttatgcaacatgctaaaccaggcagggtggcacttgccgttatgggcgcattgcttgtaactgcactacctgcgaaaatgtcttatgctgaaggatttattgatgactcaaccctgacaggggggatctattactggcaacgtgaccgtgatagaaaagagttaacaccaaacagtcctgattacggcaaatataaagccaatttacaccactctacctttaacgctaatcttgatttttcttctggttatctgggtgatttttttggtattgatttagctgcttttggtgctgttgaacttaacaacagtgggccagctgcacctaatgaaataggatttagtgatgcaaaaagtcgctgggatgaaaaatggacaggtgatcgcagtggcgtgagtatttataaagctgctgctaaatttaaattgggccatttctgggctcaaggtggatatattcaacctaaaggacaaacattattacgtcctcattggagtttcttacccggtacttatcgtggtgcagaagcgggcgctgtatttgatttcgataaaaatggtgaactctctttctcatatatgtggactgatgaatataaagcgccgtggtatcggaatatgtacaatttccgtaaggcagacttagagacaaatattagttatttacactcttttggtgccaaatatgattttaaaaatagcttagtattagaagccgcatttggccaagctgatggttatattgatcaatattttggcaaagtttcttacgatttccctatcgcaaataatacattaaaaacctcttatcaattctacggtgcaaaagataaagtcaccggagggggaattaacgatgtttatgatggtttggcatggttacaagcattcactttaggctatacctacaatgtatttgattttaaagttgaaggtacttgggttaaagcagaaggtaaccaaggttactttttacaacgtatgacgccgggatgggcaacctcgaatggtcgtttagatatctggtgggatggtcgttctgattttaacgccaatggtgaaaaagcattatacgcgggagtgatgtatgatctaaaaaattgggatctaccgggctgggcgattggtacttcctatgtgtatgcttgggatgcaaaaccgagtagtaaccctatttatgaccaaagtaaacgtattagagaaagcgcatggaatgccgacatcatgtataccgttcaagaggggagagcgaaaggtacgttatttaaacttcactacactcgttatgataaccattccgatataccaagctatgaaggtggttttggtaatatcttccaagatgaaaaagacgttaaattcaatgtgatcatgccatttacgattttctaa

SEQ ID NO: 300724 - DNA, 696 bp, Proteus mirabilis
atgaaaaaatcattattttcactattaattctatctacactttctttatcaacacaagctattgcacgacatgtttccgttgactctaagaatataactatccaaggcagagtagttaaaaaagatgccccaacttgtcaggttcaacctgtagctacagttaaattaccgaatgctcaaattgatactttttcaacaactccttttgcataccttagtataaattttactgactgtgataaaccgaagggaaataaaaaagttaaaatagtttttaaaccacaagctgattcttatttaacaaatactcataagggaccagatgctaccaatgctcgagtagcattattagattatagtaagagagaacctattccacttaatgctaatcaagatgaacgtacattttctttggattatctatctgattattcgattggggctagcataatttttttattaaaatatgaaggaccaggagggagtgatgaggttaccgaaggtgttttcagttctaccttatcttttgatgcttacgtcactgatgatatcgtcgaagtttccgacggaagagagaccatgcaaagtgatgccgacggaggagagtccatgcaaagtaatgccgacgaaggattcccagcagcagtcctcctaagtggtgccggcttcgaaaacgtaagattcgacgatgaataa

SEQ ID NO: 300725 - DNA, 1497 bp, Proteus mirabilis
atgtttttatttaaaaaagctgttatcgctttgtcaattaatatcgcattagtttcttcggctctggcctgcacaacgttattagcagggagtgaagcaactaatgatggctctttgattgtagctcgtagcgcagatagtgatgctttaaaagcacaacattttgttattcatccagccaaaaataatcagactggtatttatagcactcaagcccatcatggcgctaataactttacttatccactacctaaacactcattacgttataccactgtacctaattggaaaactcaattgcatggtgcaacgggttttaatgagctaggcgttggggtgagtggtacagaatctatttttgcctcacctaaagcattggcgttcgatccttatgttgaagatacggggatcactgaagatgatattccagatattttactctcaagggcaaaaactgcccgtgaagcaattgaattactggggaacatcatcgaaacacaaggtgcgggagaagggtttggggttgccgtcgttgataaaaatgaggtgtggtacctagaaacaggtacaggtcatcaatggatggcgcaaaaactaccaaaagataaatattttgcgacgggtaatcaagggcgtttacagacttaccatacagatagtaatgataatttaggttctaaaaacttagttgagtttgcaatagaaaaaggactttatgatcctgccactgatggcgaatttaatttttctaaagcctatacgcgtgatgatgaacgtgatctcacttataattacccgagggtttgggttatccagcaacaatttaacccttctctgaaacagaatgtggcagatggtcgtcaatttgcgcctatgctgacaccggagaaaaaagtatcagtagaagacgccaaagcgatgttacgcaaccattttgacggtacagaacatgatccttataccaatggattgaatggcaatgaaccatggcgaccaataagtgtgtttcgtacttatgaatctcatgtgatgcaagtaagacctgaattaccgcaagagattggtgaagtgacttatgttggtttgggaatggctgatctaaccgcttttgttccttattacagtggattaaaagcatatccgcaacactatgctattggaacagataaagcagataatgactctatctattggaaatatcgtaagttacaaacattagtaatgacagattatcctcaatttgctcctattgttaaaaaagcataccaagaatgggaagctaaaacagcattagaacaaaaagaaatggaggctaactatttgtcactgagtaaaaagaataaagcagcagcggataacatgctgaatgaatttaatttacgtgtaatggctgatgcagagcaactaactgaaaacttaactaatcaactctttactcttaaaactaaaaatatacaagatgagatcttttttgctaatcaatctaaaaaagattaa

SEQ ID NO: 300726 - DNA, 756 bp, Proteus mirabilis
atgatgtgctcaacagtcatatctaatcttggttttgaatgccaccctataggtgctgaattactaagaattattagcccattcactttctgtgatgatggggaacatgttggtgctttcgtaaaagaaattaatggtaaatatcttgtaagtgacagatgcgatgcattaatgaatatggaagcaaggggtatttcacttacaaaaaaaagaattgatgaaatacgcagttttataagttatcaaggcgcagaacttaacgatagaggtgaaattattagctgggcaacagaagatacgattggatcagccacctccaatgtaatcagggcaggaatattagcctccgctttatctattgactggcatcaatcggtcagagttgaaagatttgaaagtgaagttatagattatttatatcactccagcttaaaagataggatttcattgaggtctaatgtattaggaatgagcggacataacatagtcattccagtaacagttaataccgaagaaccaaagtatctttttacatctagcgtaaaacaaggtggaagttggaatagcgcatattctctacttggtaaactaattgacctaaaaaatgcaaataccacattaaataatcgatatgttgttgttgatagcgaatcaatcggcgaccaaatgcaacagctatctcttttgtttaatgaaataagccatgttttacctttcgcaaaaagagataagtggatatctaagctagcagcataa

SEQ ID NO: 300727 - DNA, 561 bp, Proteus mirabilis
gtggcaaagtgtactgattatcaacctagccaagtagaagttgacaatgttctatactgtgaaaagtacatcgatttctcaggtgttagttggacggaaaaaccgcctccaaacagaccgcttttatggcttcaaatgaatattttgccattagacaaagatggaataccagtgcaaggattaactattttaatccaatggaaacctgatcatgaaccaaaacaagatggcgatgaggtgttcccaaagataaacatcgtagcgctttataataaaaaaaggatatttgcagttgatagttatccatttgatgcgcatacaaacagatataaagtagatcatcctgactttgtaaattatattgtaggtgcccactaccatgtttattatgaagaggctggacgctataatccaataggattcccaattaaagaaactataaaatcagatgatattagagggttttggcggtttttttgtaatcatttaaatataaaatgtgcaggtgaactccctatacctttagaagatatatctggacaaataggattgccattatga

SEQ ID NO: 300728 - DNA, 966 bp, Proteus mirabilis
atgttgagtatggaaaaaattaagcaaccctattggccagcattaaaattgatattaagttcacttattgtttttagtttctatttgaaacaaagccatacccctgacttttcattactgattaatatatttgatttaacattaattcctatgtttgtttttattatcgggtttattactaaaaatggaacatggaaaagttggcgtgataatttattggctgccttagtgatttatgcgactttccaaactattgatatgatccctctttattattcagggcaatttgaccttaatacttaccttctttttcctcaaaatggtgtttggttttttcttgctacacctatttggcaagcttttttcctattgttaccttcatatatcagacatcataaaccaatattattctctcttctgcttgtcagtattttgctatcgttgttaactaaaggctatgaaactaaactatccactttcttggctataatacaatattttccattttttattatcgcttatttagtagaccaacaaacaattgctaaattgagaagtcaatcttttgtggttattgctttaataagtttattatcaatatttatactttattatcaatctaatatcaattatattattctaacaaaattagaagggagtctattttttgcaaaattaattatatatattatttctttattgataagttttattttaagtgcaggaattatttaccttgcaccaaccactcaaaaatacgcttctcttgccaataatgcgttaggtgtttatctaattcatccaatcatttgctttatccttttacaaggcataatcttttttcagttatctcttacattaccgatggtttttgcactcaccgttatcaccattagcctagcactattattggcatcaattaagcttattcattggtttattagcccaacttttaatatccgatag

SEQ ID NO: 300729 - DNA, 201 bp, Proteus mirabilis
atggcactttccgatactaaggttcgttctgcaaaatctgaagataaagtatataagctgacagatggtaacggactatttcttctggttcactccaatggttctaaatattggcgcttttgttatcgctttggcggtaaagaaaagatgttagtatttggcgtgataagttatttttacagattattgataatgatctga

SEQ ID NO: 300730 - DNA, 492 bp, Proteus mirabilis
atggtaacaaaagggcttaaatctaatggtgagagtgcttggatacaagctgtatatttattttttatttttgaatttattatcgttaactctgttattccttgttttatctatttcagaggtatgaatgaaaaaagttggttttcaattattacttctatttcaggctgtttagttttattcattttcattatatcaatgcttatcccatctatcccttctataattataaatgcaacaatgaaactttcaggtataaagaatgaaagcccgcgcacatatgttgtggataacaaggaatatcctgaagaattgtttgaattagacttatggaacaaacggactataaaagatagcaatagatttactattgagggtgtatctatgtattcatttggagaaactaatttagtatgtccaaaagatatagtcacgccttatggaattatttttttgataaaaaagaagatgacaaaattagtaatgaattaa

SEQ ID NO: 300731 - DNA, 372 bp, Proteus mirabilis
atgactaaaaaattccctagccaagaaatggatagatttaatgttagattaccagcaggcatgcgagacgcgatagctgaacgcgcagataaacacggaagatctatgaactcggaaatagttcagatattacatgacaaactaactggcccagaatcactacaaattgatatagaatttcatgagttatttcgacaaataactgacaatgaagccgctgattactttgatggttttgatttggatgactttaaagaaaaagacaaaaaaatagatattcttattgatgccctcatccatagaataaagaatgataatgaaaaaataagagagttacttatgatgaaacgcggtctaactttaaaaaaataa

SEQ ID NO: 300732 - DNA, 171 bp, Proteus mirabilis
atgagtaatgaattatatgagcaaacaagaagcagtagatttactttaaaccttcctgaaataatgcgtcaggagctagagaaaaaggcaaaaatggattttttatctctcaattctgcaatcattatgagattagcaaaaagtctaagagaggagaaaataggtgagtaa

SEQ ID NO: 300733 - DNA, 306 bp, Proteus mirabilis; identical to SEQ ID NO: 296450

SEQ ID NO: 300734 - DNA, 423 bp, Proteus mirabilis
atgtcaaaagagataagcgaattacagtttagtcttcactatgcctcagaaacagacagtgaaaagaatacctccatcattttaacggcgaatatccatacggctgatggtgaaactcaacaactgacacaattaatttgcacgacatcttccgcaggtaaaaagcaatatcgaatcggcttgcaaaaaattagtgatgctggtgctccattgctggtggcgattgaatcctattggcgcaaaaacacacaagagagttgtgtttatttgttagagaaagcgaagcaatttattcaaggacacttacaacaaacgaatacatggatatctatgtatggtcttgtgattgtttctaatgcgtcactggaagaacagttgcctgaaggtttattaaaggcacttaaagtatcaatccccgcctaa

SEQ ID NO: 300735 - DNA, 951 bp, Proteus mirabilis
atgacccgtttacgcactgtatcaaagcaccctgaacaattagaaaccacaccattagttgcggaaagtcatcactacgatgatcctttagcacctcaaaagctggtatttttaaaagcggttaatcaacagcgttgtgtgattaactcgccacagcgcaatagccaacttactaatacaatacccttttttatcgtacttttagttatggcctgttatacattttggggttttatggataggcactcatctaaaatgtatacatttcaggatacaattaattataacaaaagaatttatgactcatataatgaacaaggcaaaagccctccaaaatatttagataaatatgttccatactttaacaaagggaaaataagtatatgggcctatattaaggcatattataccggtgagcttagccgtaatagccaagcagaaatatttttaataattggctggctaatttttttccccggttttttatggctatttggctatctctctttctttacacctcctgtgtaccttattgcggataggcaaagaggaatactgtatagctatggcatggggaaagtgcgtttaacccgctataaagaggcgcaatttggttatgcgggcaatatgttggcaattaaactatatggcattaatgaaaaaacaggccaattaaaaacgatcctctatcgccccaatgtgtcccactactccagtttcctaaccagtactgacagtgaaaaccaccgttttatcactttccttaatgcctatatgcaacaaggccgagatgctgtttcatcggttgattaccaagcccgtaagccctttttatcttttggtaaaaacccacttcctgctgattttgagcaacaggtcgaacagattctggcaaagcttgatcaggagaaaaaaaccatgcgtaaaattgataaggagggcacggaatga

SEQ ID NO: 300736 - DNA, 420 bp, Proteus mirabilis
gtgaataaaataaaagatataatcccgggtaagtctttagctggtataaatttaggtgataatattaatgattatattactaataatatattcaataactattatattggaaaaaatggtcttatgttccttgatgatgaaataataacgattggatatgaagacgatggaacaatttattctattatgtgtgatgaaagatttgaaggaacatataaaaataagctatgggctggtatgagtgtgaaggatgtattagataattcacataatcaagtggcattcggcggttgtgtaatagttgacggaattaacggtataggattaccattgccaaaagaatatgatgattttgaaagaattactgattttttaccaatcaattttatttttaaatatttatctatatttaggatatga

SEQ ID NO: 300737 - DNA, 786 bp, Proteus mirabilis
atggcgaaaaaaccgacttattcagtacgttttgtagcaggtcaacctgtagaaaggattgaacctagtctacctttaggccaaatagaagagatgctaccgattgggatgccactatatacagaaggcactttaaaaattgctgtttggaatatttacaaacagcaacgggtcaattggcgtagtatgctggaaacgcttgccaccgatactcaactattacttttacaagaagcgcaaacaacacctgaattagttcgttttgcgggtaaaaaccatttaattgctgatcaagttcctgctttagcctttcaacagcaccctgcgggtgttatgaccttatcaagttctcatcctatctattgttgcccattaagagaaaaagagccttttttaaggcttgctaaatctgcattaattacggtttatccacttattactggtgagcatttaatggtgataaatgtacacgcgatcaattttagtttcggtgttgatgtttatcaaagacaattaaacagcttatcgactcatatcatcgatcataaagggcctgttattttggcgggggattttaacgcctggagtcgtccaagagttaatgtgttaaagcgttttgctagaagattaaaacttaaagaagtgatctttgaaaaggatttacgcactcgcgcttttggtaagccgcttgattatatattttatcgtggattatcactaaataaagcggaaatcttaattacagatgcatctgatcataatcctttggtggcgacattttcttaa

SEQ ID NO: 300738 - DNA, 837 bp, Proteus mirabilis
ttgaaagcttatttttctgaaactctatcaatatcagcaaagcctaaaatattttcactaaactatacttttattaatatcggatggacggttggcccacctattggcacattattattaatgtatggtacccaattacctttttggttagcggcaatatccgccagtattcctttatttatgatccaatgttttgtgcaacgttcagtggtagaccattccacagaagaaaatagtgtaaagtgggatccgaaaataatgctaaaagataaggcattaggctggtttgtgctttcaactttttttggcacattaacttttggtacatttgcttcgtgtatttcgcaataccttttagttgtttatgatgctaaattggctgaatctgctattgcggtgatcctccccgtcaatgcggccattgtcgtctcattacaatatatcgtcggtaaacaagtggttgctgaaagactacgtaaattaatgaccttaggcacactcttttttatcttaggattagcgggctttatgctggcgggtgataatttaattttctgggcaatggcgatagcaatatttacctttggtgaactaatttatgcacctggtgagtatatgatgatcgataacattgcgccgttaggaatgaaagcaagttatttttctgcacaatctttaggttggttaggtgctgcattaaatccacttgctagtggttatatcctgacaaccttgccccctatttcgttattcgctattttaatggggatcgcagtactagcttggctttgtatgttgcaaggtatgaactacagtgaaaaaagaatagctgcttaa

SEQ ID NO: 300739 - DNA, 711 bp, Proteus mirabilis
gtggcagaaattttagagaaaattgatgatggccagatgggggttgttctgaaacgtatgatggtgcgtgcggcatctcgtgttgctgaacgttatggcgtacaagctattgtaacaggtgaagcattagggcaggtttctagccaaacattaaccaatctacgtttaattgataatgcgacggataccttaattctgcgtcctcttatcacacacgataaagaaaatatcattaatatcgctcgccaaattggtacggaagattttgctcgtactatgccagagttttgtggtgttatctccaagaatcctacagtaaaagcggttaaagccaaaatcgaagctgaagaagaaaaatttgatttttctattctcgatagtgttgttgaaaatgctaagaatatggatattcgccgtattgctgaagagacggtacagcaagtaacagaagttgaaatggtctctgagtttgcaacgaatgacgttgtactggatattcgctctccagaagagcaagaaaactcaccattaaaattagagggtgtagatgttaaagaattaccattttataaattaagtacacaatttggtgatttagataacagcaaaacttatttgctctattgtgagcgaggtatgatgagtcgtttacaagcactgtatttacgtgaacaaggctttaataacgtaaaagtgtatcgtaagaagtaa

SEQ ID NO: 300740 - DNA, 459 bp, Proteus mirabilis
atgcctaacattaaacctttttcattattcccaacattatctgacaacttactttcaaaccgttttgatcagatagatcgcttgtttagtcagttaacaggcagtaagccaattgcatcacctgtacagacttataacctgaaacagattgatgataaccattatgaattgacagtgagtgtgcctggatatcaagaagatgacttatcggtttcattaaaaggtagtcgtttattgattgaagggaaaaaagaagaaaaatcagaagaagataatgataaatggatacaccgaggcatatcccaagggcaatttacattgcagtttgacctcggtaaaaatgttaaaatagaaaaagccgatttatcaagtgggcttctgaccatcgctattgagtatgaattacctgaagaagaaaaacggcaaacaatagcgatagaaaataaagataaaaaataa

SEQ ID NO: 300741 - DNA, 207 bp, Proteus mirabilis; identical to SEQ ID NO: 298561

SEQ ID NO: 300742 - DNA, 873 bp, Proteus mirabilis
ttggcaataaccgaagccatacaagccaatttagctatttataaacctaaagagtcattagttgacagaattaataatgttcactgtgtaacattgcatgaatggttggataaatatcaagatgggttaaagaaaagaggattgaggaaaaaaacgttatatgattacaactctaaaataaaaataatcaagttaaatattgctgacgctccgctcaatgaaataaccacaaaggatattgctagctttatctcaaattattctaaacgctctatggcaaagttaatgagggtcactctgcttgatgcatttaatgaagctatagcagaaggtttactaaatgaaaaccctgtatcggtaactagagcaccgaaaacacaggttaatagagctagattaaccttggatgattttaattacgcaataaatcatacaaataaaaaatacaaaaatttatttttactagcattacttacagcacaacgaattagtgatatagaaaatatgaaatggagtgatataaaaaatgataggatatatataactcaaattaaaacgggagcaaaaatatcaataccgacgtccttaaaaatcgatgctgttaatgtctctataaaagaagtgcttggtaatatagaaaagaaaggtgattttatctgtggcgttaaagctcaatccataagaaaggctttcttgcaatccttacctcaaaaagacaatatgccaacattccatgagataaggagtttatcagcaaggttatatgaagatgaaaaaggagccgaatttgccaaaaagatacttggtcataagtccatgcaaatgactgacaggtatcttgataatagaggtagtgactatattgaattatga

SEQ ID NO: 300743 - DNA, 243 bp, Proteus mirabilis
atgcgcccaatttttttgttaataccatttatgtttttaattggctgtaccgagcaaatgagtgtcggagttggcacttctagaacgcataatataggatatccggtttgttcaacattagtttgtggaaagaatacgcgaacagttgaagaacaaaaggcaattaatgaagcggtgcatgaacagcaaagagctattatgcgaggagaaaaaccagatttaaaaattattgcctcatattaa

SEQ ID NO: 300744 - DNA, 390 bp, Proteus mirabilis
atgttaaaattaaataaaattcatcatgtggcgattatttgttctgattataccgtcagcaaacatttttattgtcaaatactggggcttaccctattaaatgaaaaataccgtgaagaaatacaatcttggaaagctgagcttgcgttaggtacagtctaccaaattgaattatttagcttcccagatgcgccagcacgtttaagttacccagaagcacgtggtctacgccatgtggcatttgcagtggacgatcttgatgcttcagttgcttatttacaacaaaacaatattcaatgtgagccaatacgtatagatcctagtagccaaaaacgttttaccttttttcaagatcccgatggcttacctttagagctttattcaatatag

SEQ ID NO: 300745 - DNA, 303 bp, Proteus mirabilis
atgataaaggttattgcagaagattttattaaatcaggatcaatagaaacggtcttaccactttaccaagaattggtgaaagctagccaacaagaagcgctttgtattagctatgatttatttgttgatgagaaagatcccggtcactttatttttattgaatcatggccaaataaagaagcattagatattcattgtaatagtgaacattttcgtcgcatcattccgatgattaaacaatatacaaaagcagagtcaaaaatcactttagtcaatagtgtatttgataaaaatatagattaa

SEQ ID NO: 300746 - DNA, 873 bp, Proteus mirabilis
atggcgttaaattttagtggcgtcactatggcacaaaataccatgaatgatatttatgttattaatttatcctcaaataatgcagtttgtggcgtaaaaattaatgaaatgttagtaatgcataataaaaaataccctaaaggtcattattccgctggtcaaaatatctctagcgtgcttgaaaatgggaaaaataccttaggtataattatgtttaatggatctgtttttactggtgaagaaaaacttacccctgatatgtggtgtgaagtcgaacttaagaaattatctgcaaatggcgataacaccttaatatcgggacttagattaaacggaaataatgatgggaaaatggtggtctctgataaatatcaaaataacagtgagcatatctattttggtggtcccagtcgaaaaagtgaatataaccttttagaagcaaaaaaccaatttaatatacaaagcctcccccaatggcaatgggaaaaagcaactcccgttactgaagacgatatacctaaaattcgtgctttttatgccgaactacgacaagcatttatcgataaaaatctagataaattaaaaactatggggaaaatatcctgggaagaaatggcctatgccgataatggctctcctgatatcttttggaaatcgcttaattttcaagaacgattagaacaaggatataaacccaatactattaattgggatgaatatacttttgttacttataacgacaatcgagtctttcgctatgaggttggttttagccgattatcccccattgaattaatcaactctgaaggaagaaattatttttataatccttacctttctattattgatgggaaagtgactattgtccgataa

SEQ ID NO: 300747 - DNA, 351 bp, Proteus mirabilis
  misc_feature (319)..(328): n is a, c, g, or t
gtggttaatggagcaacgtcactcttatcgggaaatatcgcggtagttggcaatgcagctcatgttgttatagccaacccaaatggtattgaatgccataattgtagtttttcgaataccttacaagaaacgttaacaactgggaaacctgttatcaataataataatgatgaattaatcggctaccgcttagaaaaatctatcgctcccacaaataaaggatatatgggtggaaaatcaattgatcatattggaaaaattgtattcagtaacgaaaatgaccgtagttctagtcattcttttaataaacttaatatcnnnnnnnnnntaaaacggatttatatcttctaa

SEQ ID NO: 300748 - DNA, 642 bp, Proteus mirabilis
atgaaaaaactttctgcgcttattctagcggctgcaacacttgcaccgtctatttcttttgctcatcaagcgggtgattttttattccgtgcgggtactgcaacagttcgtcctaatacaggttcagatactatattaggtgggcattttgatgctaataacaacactcaattaggtttaacctttggttatatggtaactgataatattggggttgagttattagcagcaacaccttttgagcataaagtttctttaactggtgtgggtgaaattgctaaagttaaacatttaccgccaacattaatggcacagtattactttggtggtgctgaagataaattacgcccttatttaggtgctggtctaaactttacgaccttctttgatgaaaaattcaataataatccagcggtaggccaacttggattaaatgatcttgatcttaaaaactcttggggctttgcagcacaagcaggtttagactataacctagataaaaactggatgctgaatgcttctgtttggtggatgaatatcgaaaccgatgtcaaatttaaagatggcgatggaaaccactataaagtggatactcgcttagacccatttgtgtttatgttcggtgttggttatcgtttctaa

SEQ ID NO: 300749 - DNA, 414 bp, Proteus mirabilis
atgtttttcaaatacagaaatgaaagacaaggggattgggtattactagaaataaaacctactgttttgtgggaaaaagattgtagtttttatcctacaaatgcagcatcaaatagtgtcagattcaatgatatattatccatgaaaagcgttgatgcatttaattctatgttttctgaacaggtattttcagaagtaaggcctaattccctttccagcgaatacacaactgatgttcaagctgaagtccttgtctgtggtaaaatagaaccttcttactttttgaatatttatcatccaaataagtcctcattcgaccattttgataatttgcatccaacaatgagtcagcgatattatgctaatcttaatggtagaactttatactcacagaggcattattacttaggataa

SEQ ID NO: 300750 - DNA, 696 bp, Proteus mirabilis
atgaaaaaagtattactcagtcttgctatgctgagtgtaatatcaacgccggtattggctaaagctcctgtagctaacttaaaaatcaatggtgatattaagccaccaacttgtactattaatggggcgacacaaagtgatatgatttttgattaccgagtcataagcccaacgcttatccctcaatcgaaaaactacgaatatcctaacggtatagtccaaaatacagttacgattgaatgtgatgctaaaacatatttaacctttgttgcatctgacacttatgacagtgcggaattagctaataatacgctagcacagtttcatttagttgataaagaaaatcctgaaaccgcagttggagcagcctcttttttgtgggaggatgtgactgttgatagtaaaccagcgtacatttcacgagcaaatgatgttactatcacagagacaaattactataacgttctatacaaaggcgcaaccaatggttggacatcagaacaacaaaaaggcaatgttagtaaagaatctctggcactaattccaggtgaagttttccaagcagtttttaaagatgtatataaaattccttcttttcttttatccaaagatgcattaaataaaaaaggaatagatttatctaatggcttagattttatgggtgaagctgttctcacttttaactttggtgtctaa

SEQ ID NO: 300751 - DNA, 681 bp, Proteus mirabilis
atggttaatgaattcttaacggcaaaaaagagttcagcatttcctattttcgtagataaaaaaataaatcaacaacggtatattaagttagcagaaaaaataattaaaaaagaacccattaataatgataatgttgatttagttagcagtgcaactaagcaggaaaaacaggctcaaattcatcagaaagagaataacagtgcatacaagaatattgaatctagtatggcaatgccgctaaataacgtatcaaaatttgatacaaaagaagagccggaaatttatcaagaaaatatcaatgaaactaataaagttgttccttttccttcgcaagttacaccaataaaaacggtaattgcattaccaaaagtagccaaaatggtttcacagctacctgcttggcaagtaatagataaaaaaatatctatgctgactctaccacccagcattacttatacatttacaaaatggaagagtcgttatcatcaggctaaaattcattttattgataaacaagttcagttaattgcctcctcaggacgcgtttatcaaactgcattagagaatttgaagcaatataatggggggttatccatagatctaactaatagccataaaaataaatcgtggtatatcaactctattaatgctatttatgaaagagaggatgaaaatgaatga

SEQ ID NO: 300752 - DNA, 555 bp, Proteus mirabilis
atgcagttaatgggaggtataactcttacacctgaaggtggagcgatacatcgtatttcgactatgggaagttctagaatattagttgataccaatcatgttgcaaatataccaataaaaacaggattagtaccagtagaaacgaatcgtcatggtaaagcggtattaatggctcgacaaaattattctcgtagtaatatttctattgatattaaccaattaccagaaaatgcagatgcggtacaatcatcacaatatgccactttaacagaaggggctattggttatcgtaaatttaatgtgattgaaggtgagaaagtgctagccgtcattacccgtgctgctgatcatagttttccgccttttggtgcgagtgtttataacaaaaataatattgaagtgggaatgatatcagatgatggttttgtttatttatcaggagttaaagcgggagaaacattaggtattaaatgggaaaatggaatgtgtaaatttcaattacctgaaacattagaaaataatttaagcaatactttattgcttctttgtaaataa

SEQ ID NO: 300753 - DNA, 747 bp, Proteus mirabilis
atggatattcctcgtattttcactattagcgaaagtgagcatcgtattcataaccctttcacaccagagaaatatgccaccttaggtcgagtattacgaatgaaagaaaactggcaaattcttgatctcggaagtggctctggtgaaatgctatgtacttgggctcacgattacaatattacaggtattggcatcgatataagcccgctgtttactctacaagcaaaatctagagcagaagagttaggcgtcagccatcgagtgcattttatccatcatgatgcctcagattatattagtgataaaaaatgtgatatagcagcatgcataggagcaacttggattgctggtggtgtaattgaaactatcgagctactagcaaaaagtattaaaacaggtgggcttattcttatcggagaaccatattggcggcaaattccaacaacacaagagatagcacaagcttgtggtgcttcatccatatcagattttttaactttatctgagcttgttgtctctttcgacaatcaaggatacgatctagtcgaaatggtactggcagatcaagagggttgggatagatatgaagctgctaaatggatgactatgcgccgttggcttgacaaaaatagtgccgatgattttgctcaagaaattcgaacagaattgactatagcccctaaacgtcatgttagttttacacgagaatacttaggctggggggtatttgtattaattgctcgataa

SEQ ID NO: 300754 - DNA, 726 bp, Proteus mirabilis
atgtcttgctatatctcatctttagtaaaaaaacttacactattctcaacaatcaaaacatactcatggttacatttcgctatcgacaatttatatagagaagactatctgttaaaagtagaccgtcatttggctataagctcagggataaaagagcaacttatagcaagaggtataaaagaagaaaaaatagcattaatctttaatcctattaatgaaaacaaaaacattataaaaagaagccatggtagccataagaattttatttatgtaggtagaattatggcttatgggcaaaaaaacctaacagaattgatccaatctctatctctggttcaaaaagaatggacccttcatctgattggaaatggtaacaaaaatgagcttgaacaattgcaaagaatcattaatacccaaagaatacataatcgtgttatatttcatggatggcagaatgacccttggaattttatagaaactaagattaaaaaagtggatgctttatttttaacctcaactcttgagggctttggtatggttttaggggaagctatctcaagaggcattttttgtattagctctgactgtctatcaggcccatccgatattataaatagagataatggatttttatatactcctggtaacattgatgaattagcagataaaataaaaaaactatattattttgaatatcccaactatataacaataaaagcatcatag

SEQ ID NO: 300755 - DNA, 141 bp, Proteus mirabilis
atgttagatatagataaaatgttagccattattgaaggttatcgtgctagcgatggacaacatattggggcatttgacccgaaaacgggtaagcaacttaaaccggcagatccgaaacgcaatatcaaaaaatatttataa

SEQ ID NO: 300756 - DNA, 258 bp, Proteus mirabilis
atgggattgaaattaagagtttattggttcgataaaaagacagaagactttattggtgaagaatattccaaagattttggagatgacgattttttaattggagaaacggttaatccaaaaaatgagaatattatcaataatggtgagtttgacttggaaaaagaatggatagatacaattcaaaagcatataactcataaaattgaacaaaataagtatgattattttattgcttttgcttaccgagataagtggtaa

SEQ ID NO: 300757 - DNA, 291 bp, Proteus mirabilis; identical to SEQ ID NO: 297883

SEQ ID NO: 300758 - DNA, 201 bp, Proteus mirabilis
atgttagttagtgaaatggctaaagacatagaggcccttcaaacacgtactcttgctttagagtatataattcaagtaatgattaggaatatgtctgatattgaaaaagaaaaacttattagtgaattaaataaagtatcgcatgatagtcctgtaactatcgaggcgtttggtatcattcagtcacatttacataattag

SEQ ID NO: 300759 - DNA, 138 bp, Proteus mirabilis
atgatacttcctccagacattgatattcagaaaggggataaggtgcttgtcgatggcgtttggttgcgcgttcatgaaccgaaccctgttaaacccgctgatattattatctgctatcagtctcaactgagggcgtga

SEQ ID NO: 300760 - DNA, 579 bp, Proteus mirabilis
atgtttaagaaggcgttattgagtttaactgcaggtgcattattatttaatgctagttcagcattagcggctgattatcaaattgataaacaagggcagcatgcttttgtgcaatttcgtatccaacacttaggttatagctggttatacggcacatttaaagattttgatggaagcttcacttacgataaagaagatccttcaaaagataaagtcgatgttgtgattaaaacgggtagtttagatactaatcacgctgaacgtgacaaacacttacgtagtgctgatttttttaacgtcagtaaatatcctgaagctaagtttgtctcaaccaaagtgactcgtgatggtgaaaattatacggtgacgggtgatttaacacttaatggcgttacaaaaccaatttcactaaatgcaaaattaattggtgaaggtactgatccgtggaaagggtatcgcgctggttttgaagcaacaggtaaagttaatctgaaagagtttaactttaaatcagatttaggaccaaaatcgcaagaagcagaattaatcatctctgttgaaggcgtgaaaaaaaattaa

SEQ ID NO: 300761 - DNA, 504 bp, Proteus mirabilis
atgttacatcaagatatgatcaataaactcaatgaacagctgaatcttgagttttattcagctaacctttacctgcagatgagcgcttggtgcgatgataaaggatttgatggtgctgccaaatttttaaaagcacattcccgtgaagaaatggagcatatgcaacgcttatttgattatttaagtgatacaggtgctatgcctttgttagggactattgaagcaccacccgctgaatttttatctttatctgatttatttactaaaacttatgagcacgagaagtttattacagctgaaattaataaacttgctcacctagcaatgacaacacaagattactcaacatttaacttcttacaatggtatgttgctgaacaacatgaagaagagaagttatttaaatctattctggataaacttgctatggtcggtgatggtggtaaggcattgttcttgttagataaagacttaagtgctctttctacatccgcacatatttaa

SEQ ID NO: 300762 - DNA, 699 bp, Proteus mirabilis
atgtctataaaattaagctatgatatttgtaaaactgtccaatatatgcatgtgaacgttataaataagagtaaaaaattaaaagaactacgaaatgaaataaaatcactatataatctatcacaaccttttcaaaattcatgtgttaatactcatactttttataaaccacaaaatagcatcatagcctcaatagcaaatatcaataatagaattaataaaaatcaacacgcacttacaggaatagaatcaaaattaaaagaaaaatacaatgatataaaatcaattaatgatttaattaaaaatagatataaatcaggtttagttacaaatgagcatgactataaaaacatgaaaaatgttttaactaacaattttaaaagtgaaataaatgatttaaatcaacaaaaagaaatactaaaaattagattaaatgaaaatgaaaatacacttgcatattttaacaataaatcagattttctttcatatcctaatcaagaaactctcaattttttgttctatactgaagttttccccaacagaatcgaaagagaatcaataccaaaagaaaaaatcaatattgattgtatcaacaatatgataaacatccataaaaagagtttgtttatcagttcagagaacaaagaaaaaataaacacatataaagaatttttaaaaaaaataaatatacctttctaa

SEQ ID NO: 300763 - DNA, 561 bp, Proteus mirabilis
atgaaaaagttattattatctgcaattattacttcagcaatggccataattgctacacctgccctagcagaagatactggtacaccagcacccacagaagttacagttaatggtggtactattaactttgaaggttctgtcgttaatgctgcttgtggtgttgatagtagttcaagtaaccaaactgttcgtttgggtcaattccgtgtcgctgaattcactaaaaaaggtgatgaaacaggacgtattccttttagcattaaattaaataactgcgatattactgtttcatcattggcagcaattacctttaacggtacagcttctgatggtgatgcaactgcattcgcattacaaggcagtggcgcagcaaccaatgtagcgttaaaaattaccgattcaagcagcaaaaatgttgttccaggacaaccttcttcaactcaaaaattaatcgaaggtgaaaaccaattaaattataacgcttctcttatttccactgatgatacagtgaaggcaggtagcgcaaacgttacaactaactttatggtgacttactcttaa

SEQ ID NO: 300764 - DNA, 510 bp, Proteus mirabilis
atgagaattgaatgttatagttggtcagatgttagtgaacaaattctgcagcaagcaatagccttacagaattcagcttttgaggatatgaagggtaatttttatcaggttgatataccttacaagttggtactggcaattgatcataatcaggttatcggacatgtagctgtttatttacgagatgtttacctagattcatttcctgaaaccattggtatattgagttgtgtagtggtggctcacaaataccgaggaaagggtgttgctgcatcattaataaaaagggctcatgctatactgaaagaatattttgttaatttttctattttatttgctgtttctcatgcttattatctctcctctggatatattccgatgaaaaatctcacccgttttattgagaataatgagaagaaagaatttatatatgacggtggtatggtgtgtgaattaggtagtcaaaattggaatgtaaatatattagaattaaatggggaagttgtataa

SEQ ID NO: 300765 - DNA, 138 bp, Proteus mirabilis
atgatacttcctccagacattgatattcagaaaggggataaggtgcttgtcgatggcgtttggttgcgcgttcatgagccgaaccctgttaaacccgctgatattattatctgctatcagtctcaactgagggcgtga

SEQ ID NO: 300766 - DNA, 513 bp, Proteus mirabilis
gtgcgttacctttatggcgatgaatttagccttcagtgggaacccttatgggaaatcgataaattatatatcggtgactatgtttgtattggtgctgaagcggttattttgatggggggcaatcatactcatcgtatggattggttttctctttatccatttttagacaatattaaagaagcctatattggtaaaggtgatacttatattcacgatggtgtatggataggtatgcgggcaatgattatgcctggcgttactattggtgaaggggctattatcgcagcaaatagtgtagtgacaaaagatgttgctccttatagtatcgttggtggaataccggctaagcatgttaaataccgctttgaaccaaaagtgatagaacaacttttatctttaaatatttatagttggccagagaaaaagtttgccgcattaaaaccttatttatgccaagcttcaattgataagctgttaactgctcatacgcaatataaccaagatatgaattag

SEQ ID NO: 300767 - DNA, 435 bp, Proteus mirabilis
atgacaaaaactgtattagttcccatcgattttactgagcttggtttattggataaagttgtcactcatctcaaagcattagcgatggccgataaactaaatatccactttttatctgttattcctagctatgagtcctttgtcggatttgcttttggcagccaagaccgtcttgccaatgataagcaacgtattgaaattgcattatctacgttaaatgatagtttatctcatattgaaattcccaatagcacatcccaatcttatatttccgtaggtaacccacgcgaccgtattttagagaccgcaaaaaaaatccaagctgatctgattgtgataggctcacgtaaccctggaatgaaaacctacttactaggctcgacagcttcttctgttgttagctatgcagaatcttctgtattagttgttcgataa

SEQ ID NO: 300768 - DNA, 228 bp, Proteus mirabilis
atggataaatcaagacagcagtttgaagagtggcgcagtaagaataaatcatcaacgataaatctattcgatgtatggcaagcatcacgcgactcactcgtattagacctaccagaaagagaaaagaataaaggaaattatgattttttcactgatggatataatagtggaatatcagcatgtgaaatttcattattagataacggagtgaaaataaaaaatgaataa

SEQ ID NO: 300769 - DNA, 147 bp, Proteus mirabilis
atgccaacaccttgctatatttccattgaagggaaaacacaaggtaacatcacggcagatcctgtcagtaatatattacccacattattgatgccagaaggcataacggcgatgaaaaggttcaaatatgctaatgacaatgattaa

SEQ ID NO: 300770 - DNA, 207 bp, Proteus mirabilis
gtgccagcagataccaattttcttgattggatacaacggcaacctgaatggcgacagcgtcaagttttcggagaaacgcgattcagactaatgaaagagggcggtatgcatccttctgagttttataccgataagggagagtttatttcactagagcgacttagagagatagatgggcatgcatttagagaggctggatatagctaa

SEQ ID NO: 300771 - DNA, 189 bp, Proteus mirabilis; identical to SEQ ID NO: 299239

SEQ ID NO: 300772 - DNA, 141 bp, Proteus mirabilis
atgaaattaactagctttttaaagtcgggtatctatttattattaaaagtaggttttcgcgaaaaagaagtatactctatcttttcaaaagaagatttgggtcaaaaatatttttttaataatgcaaataaatatgaatag

SEQ ID NO: 300773 - DNA, 459 bp, Proteus mirabilis
atgggggacgaaaagagcttagcgcatacgcgatggaactgtaagtatcatgtcgtttttgcaccaaaatatcggcgacaggccttttacggcgagaaacgcagggcagtaggcagcatactcagaaagctgtgtgagtggaaaaatgtgaatatcctggaagcggagtgctgtccggatcatatacatatgcttttggagagcccgccaaagttgagtgtttcaggttttctgggttacctgaagggtaagagtagcctgatgctgtacgaacagtttggcgatttaaagtttaagtatagaaacagagcgttttggtgccggggtttttatgtggacacagtgggtaagaatacctcgcgaatacgggaatacataaaacaccaattggaagaagataagatgggagagcaactgtcgatcccgtatcccggtagcccgtttacgggcagtaagtaa

SEQ ID NO: 300774 - DNA, 1311 bp, Proteus mirabilis
atgcaagaattttctctagaattgatttcagagcaaatccattacggaaaaacaaaagggtactttcaagaagtattatcctcatataataatggaaactatcgatcctcagtcgttatgctttggtcagtagcaatatgtgacatcgtttacaagcttcagagcttaatagatttatacgatgatgcggcagcaaaggaaattcttcaagaagttaccacaatccaaaatgaagactacaagtcatcagcatgggaaataaaacttcttgatgatgttcatggtaagactttcttactagatacctctgagtatgaaggcttacgttatctccaaaaacaaaggcatctttctgcgcatccggttcttaattcagagagggaacttcattcaccaaacaaagaaactgtgcgctctctcctgagaaacactttggaagggttgcttattaagccaccattttatactcaacgcataatgaaggaattattggaagaccttgcagagtcatccgatgttcttaatagcagagaaaaagtaaaaaagtatattgaaagtaggtatcttagtagaacgagacggtcagtagagataaatatttttcgttctttgtggaagctagtttttaaactagataatgaggaatgtgaaaaaaatcgaaaaataaatctgcatgctttagaggttctatcctctcggaatatacctgcaataccagcagaagttcaaggcgacaatgactattacagcaatatagcatcaaccggaacaccactatcttatcttgttttttatctttcaaaaaaccaccagatttatccattattaagcgacgatgcgcgcctaaagatagagcattgcatcaacactgatgatgtaggtaaaacagttggttggtttataaaatctgatttaaatgtgcatggaaatgatgttgaagattggataaagagtgatgatcatcctacatttattccggggcaatttgacgtcttattagaaatatcagattcagaggagtggcagaaaaaattctgccgcatcgtgactgcgtactattcagttagctatagctatgatcaagcagacgctcggtttcaggtcgcaattcaaaagtatataggcttatttgatcgcgactcacttagtcatttggtaagacaaatcgagaacaatggacaatgttatgctcggggtagagcacgagaagactatgttgtgatcaaggcgcgtatagacgagctatttggtgatgactttgattatgaaggcgtaccttcttttcggcgtagagtggtaacggcggagtga

SEQ ID NO: 300775 - DNA, 996 bp, Proteus mirabilis
ttgaatttaaagacaaaacacaaaaatttcttggatgtaacctcctacgcaccacttgcttatggagtggtttatttagcaaatattttgatattcagcctgatttatgtatttatattcaccaatgacttcaaaggtgattcaataagttatgtgcaatcgttatattttagtgtcatcacagtcaccacattaggttttggtgatttgactccgagtcttgatgctaccccacttcttctcgtagtaactgcgcaagttgttttgggagttattactattggtttattcttgaattccatatctcacaagctgggtgaacgaaaagactttgcccaaagaaaatttgaagaagaagttgaaaagaataccctgaaaaagctactaacaattttaaagccagcggttgtcaactatatggaagttctctccgaaacctataaggtgacaacaactagagtaacagatgacttcgtaaaattagttcctaaaaatctattttctcaagaatattatgatcaaatatccctgcaagatttcttttcaaacgagactaggtatgggaaaaatgtaataacttggggagactttattgaacaagagaataataagttctctgcacagatagacgactatttgaataaatttgccacgtcactacccattgatttaattgagttacttgttggtttgaaaaaccataattttctaaatcattggaggctagctaaacaaatgatccagttagagagagagcaagggttcaagattcctcgcatcaacatgttaactattgaacacagcagtgttgaagtgcctgagaaaccgaattcaattagagacttccatgagaaactgctaaacctaatcgctctgctagatgaaaatacatcaggagagcacattcttatgactgttgatttaaggaagggggtctctgccccctcaattggctctgctattgccgacattattaaatttggtccatctgagtag

SEQ ID NO: 300776 - DNA, 1584 bp, Proteus mirabilis
gtgcttaaatatgcattacaaaaggattcaaacactttaagacatatagactctgtagaaaatggcttaaaatgcaattgtgtatgtgctggctgcggagaccgccttattgccaaaaataatggagttagtggcacaatacatcattttgctcattactctaaaaacgaaaataatatttgtttaatgacccaacttcacatagtagcacaacactttttccttgaatctcagtccctttttatcccccctgtatcctttcaatacaagggacaagtactgaaccaaagtgaagcacttgcaaatgtatataatgcagacttagaaactcgtattgggcaatatgttgcagatgtgtttttggaaaccaatattggcaacatagtaattgaagtttttgtcactcatagaaatcaatcagataaaacaaagtattaccaagaaaataaaattccttctattgagtttgatttaagtacttatcttaatcgtagtattgaagaagctctttttgatttaaaaaacaacaaagtgccttacaagtggctttatgagtggtgccgagatcagcttgtagataaacatgaaatattactagcacaaaaaaacgaaaaaattgaaaaaaaacgtattcgtagtgcaaaagacacagcaagaaaattcatcaaaggcaaccatattcttttgccaagccttacccaaaagtttgagtgtataattgacggttatacatataaagacgaggtcagcatttattctcgatcagaacagcaagtagacaatgttgtccaagttaaactgacggaagaatttcttttacttaaagcgtcgataggtaacagctatatttgggtagtattattattaaaggattatttaccaaaagagattgataaccttgatggtagtgtaattattcgtactccagcaacatctgaaaataatcgcgcaacatggacttggttaaaataccctaaattaattcaaaaaattaaaaaatatgaacaaaatttctttgatgaatccaacttaaaagcccaaaaggcaaaaacaacagaagacgcagtaaaacaagcaacaaccaatgctaaatcttatctaacttcaaaaaatcacttattcaaaagagactatcccaaatggtcaaaatggatgataaagaataagttatttcaatatagcccttctaagaaacaccccaatttacctcatgcacttacttatatccgaagctacccttgtctttggccatttgaaacatgggatattttagccttgagtctcttagctgaaatagtcgacaataaacctaaaaatacgcaaatactctacgagactttattcaatgagctaatagagcatacagggctacataaagattttttcgatattgagcagcacattgccccacatgctgttgctgttgataaaaaatcgattgtactacgttctgaaattatcgaagaggcacttaggccatatgccaatatgggagctatcaattgctttaaagatggatttaaacgtttaggttcgctaatggaagctattaatttggcccctaactattattttggtcgctaa

SEQ ID NO: 300777 - DNA, 648 bp, Proteus mirabilis
atggaataccaattcaaatcatatagtaaaggcagcaagaaaaaatcattaccttcttacatctttgttatcctgtactgctcttggttagcttatctatttttgtcgctttatttaggcgataacattgtattatttgaatggtttcctaaatggacgattattattgtttttgctattttcacagggattattgggggaatatggcaccctttctttcgcccatcaaagtatgttatcagtgattattattggggggcttttcttggccttatgataattattccaacttttaatgtgcttgcttatttatcattagaccaaacaattcactaccaaacacaatatcatatcgtctcgccagggcctgaacgtcttaaagcccctcaatgtgaatatggtatacggataaaagaaatttatacaggggaatgggttttttggtgtattagagatccaaaatcgaaaaccaaggaaaatacgggaaccgtatgggttacagcaaaaacagggcctattggtgcagatattgttgattatcagttttaccctatgtcccagtttttcgaactcacgctgccagtaaaatgcacccgtggaggcttccacactaatcaggcaggccggaatattcgcgacggtctgtag

SEQ ID NO: 300778 - DNA, 486 bp, Proteus mirabilis
atgtcattaaatcctaatatagatgtttgcggctcttttgttgatataatagaacctgaaactaagcaatatctatcaacaagaaaagtacccttagaacaaaatactatttatcaatattcaaaaaaaagaagtcccatgaaccatccttctgtagttttcagaaaagaaatcattattaataacaattattatcctctatttaaaaaatcacaggattatgctttatggagtaagttactggtaaataatgttaattttcaaaatatacctgaggttctagtccatatgcgtggcggtgactcattaatgaatcgcaggggtattggttatttaatcaatgaaattaaagtaatttcatatcagagaagtattggttttttaaataacatagaatttataagaaatattctattaagaacagcttttagaatagcaccaaattctataaaaaaaatattgtataaaatagtgaatagaaaataa

SEQ ID NO: 300779 - DNA, 1347 bp, Proteus mirabilis
atggctataaccgtcagatcacggcaagttggcggcacattaagctggacaccagatgagaaaaataccgttgaatttgaatttaaaaaagataatcaacatcgtgattcacgtgttggctattcaaaatcagctgaacttgttaaagggaaaaaaccacaaagtagttttactgattatgagctaacgcattatgccttaacccatgatggtatttatgattttggtactatgaatacctatgttcagcgcgatgaaagccgcaatccatcacgtaaaatggattatgatgatacaactgttcgtaaccaaaccgtctttatgtttggtgatcatatgttaagtgtcggcggtcaatatcgctatgaagagctgaaagatgaaggcaataagcttaaaggtaataataagctagatcgctatagttgggcgctgtttgctgaagatgagtggacattgacaaacgacttcgctttaaccgccggtttacggatggataaagatgaaaactttggtactcactggacaccgcgagtttatggtgtttggcatttagctgatgaatggacattaaaaggtggggtatctactggatatcgttcaccggatttacgtcaagcgacagctacttggggacaagggactggcggtggtcgttatgatgcagttatttacggtaatcctgacttaaaaccagaaaaatcggtgacagaggaaattggtattatttgggataatcgtgataacttaacggcaagtttgacgatttataatactgattttaaagataaaataacagaagttcgtcgttgcgatagtcgttcagacaaagcaccgggtatgcgcgattgtacattagctgatggtgttggtaatagtggcgacccttatgattttgtaagtgatagaactaacgttgataaagccaatatgcgcggtgttgaagttactgctaactggattatttccccagaatggaatttagcagcaaactacacgttcacagatacggaacaaaagagtggtgatttcaaaggtaagcctctgaataagcaaccgcgccatatggcaaacgcgaccttaaattgggaaaccacgcctgaaatggaaacttgggcacgcattaatttccgtggtaagacatcagaatatttatcacgtacttcaatgtctaagagcacaccttcatacgcctttgttgatgtaggtactagctatagtctaacgaagcaactaaatctgatcggtggcgtctataatgtttttgatcgtcgcatcgaaagagataattacggttcaaccttagaaggccgtcgttataacatcggattaaactacaacttctag

SEQ ID NO: 300780 - DNA, 717 bp, Proteus mirabilis
atggtagtgttaaagaaaaataaaattgcgcttggcgttgttgctgctcttgcatcaagttttgtgatgacagcttccgcagaagatcctgaaaggttactggtgacaaccgcttcgggatttaaacagactgttgaagatgctccagcttctgtttcagttgtaactcgtgaacaattagaaacaaaatcatatcgtgatgtgactgatgcgctaaaagatgttccgggggtgctagtgacggggggcggtagcagctctgatattagtattcgtggtatggatcctaagtataccatgatcttagtcgatggtaagcgtgttgcatctcgtgaaacgcgtcctaatagtgataactcaggtattgaacaaggttggttacctcctttacccgcgattgagcgtattgaggtagtaagaggcccaatgtcttctttatatggctctgatgccatgggaggcgttatcaatattattacgcgtaaagcgcaaaaagaatggaactttagtttacgtggtgacacaacgttgactgagcgtaaaaatgaaggaaatacaggacaaggtagtttctatgctgcaggtccattgattgataatgtgttaggtctaaagctgcaagggcaatattctcaccgtggtgaagatagacgtgttgatggctataaccgtcagatcacggcaagttggcggcacattaagctggacaccagatga

SEQ ID NO: 300781 - DNA, 1053 bp, Proteus mirabilis
atgaaaaaaatactaataataggatttgaactaggtggccttggtggtacagaaaccgtttgtagaaaatttcatgatttaatatccgataaagcaaaggttaacttcttgttttttaaacaggataaaaaaacagttgataatgtttggttggataacacaattcataaaacaatagaatgtcatgttcgaaacaccccattacggcgtttttctttttcattcatgctttctagagaaattgcccgaacaaagcctgatattattatcgcaatcgatgctattagttgttacattgctaatacagctaaaaaaataacgctgataaaaccaataatatattcttggatacatttatcattgttttcagcgtataaagcaaagtttgtgttaaaggcagaaaaacatctttcaattagtaatggaaattcagattaccttatagaaaatggtgttaataaaaataatataaatactattttcaacccctttactcgaagcaatatagtaataaatagaggtattgagtgtaatttcttatttatggggagagtattggcaaatgaaggaaaaaaccttaatgaaatgtttaatgctctatctctagttaaaggcatatggaaattacacattattggtgatggtgatgatgtacagcaattaaaagagttgtctaataaactaaatatagaaaaaaatattatctggcatggttgggttagaaatccttggaactatatctctaaccatattcattcagtatcagcattgttactaacatcaacaaatgaaggctttcctatggtcttaggagaagctatttcccatggaatctattgtattagttcagattgcaaaacaggtacaactgatattattaatgataataatggttctatatataaacttggcaatatagacgaattatcttgtaaattacaagaaatcgttgataaaaaagaattacctcctcatgatatgattattcaatcaattaatcacatttatgatgaagaatataaaaacaatatcattaaagtattaaaaatataa

SEQ ID NO: 300782 - DNA, 462 bp, Proteus mirabilis; identical to SEQ ID NO: 300354

SEQ ID NO: 300783 - DNA, 270 bp, Proteus mirabilis
atgcgcatggacaaattaaccaatgctacctacggaacagctggcttaactgccttttttgcaagtctctcactttatgaatggggctttgtaataggaatgggatttagcatgcttcttggactggcaacttatctgatgacacggcgagaacagcgaaaacgaacagcattatttgctgaattggttcatcgaaattgttctagtgatccgcgagaaatcgaaaaaatagtcggtgagatgctgactaaagctaaaaaggacatctaa

SEQ ID NO: 300784 - DNA, 888 bp, Proteus mirabilis
atgtcaatactcattgaaatacagaatgattgcattaattcaaaagttcaactatctgatttattaagaaaatgtttatatttggctcataaaataaaaaatgaaaattttataagatgggttaatgatgaacttaatggatataaaaatacagatgaaatccctgaatacagaatacttaattgtgtagttaaaggggattttacggatggttataatatttggaaaaattacccaatagatataactaaatttccagagcccgttcaaaaaaattatggtgtaatgcgtgttgcgaatagtgtctcatctattgaggagttaacttcacatgattctattatgatggaaaggccatgggatacacacattgtgagcttaatatctaaaggttttacacatcaagatgttatgagaatttggagtgagtcgccggctcatttatatacagctattcttgatggaattaaaaccagaatattacaattcacattagaagtagaaagtaaaatttcaaatattgaggatatcaaattgtctaatttgaatgatgaacaaaaggaaaaaatagcacatatatttaataccaatatttatggtaatgctaatgttgctaatgccagcgaaaattttaatcaaaatttacaagttcaatctcatgatttaatagataaactactttctgaattattagagataaaaaagcagggaaaagacactcaaattattgatgatataattccacatgttgagtcgatgaaaagtgttaaagaccaaactggtgttatgacaaaactagtcgaaataatgactattgctggtggttctgcatctgttctatctgcaataacaccttatgtatctcaacttaaagaactatttatgtga

SEQ ID NO: 300785 - DNA, 852 bp, Proteus mirabilis
atgagtaataaattaaccggctatgtgtgggatgcatgtgctgtttcaggtgttaagggtaccaagttaatgatcatggtacgcctagccgattattcgagcgatgaaggggttgcttatcccagtgttgaaaccatcagtcgtcaaattggtgcgggaattagcacaattcgcaatgcatgtaatgaacttgagcgtgatgattggttagttaaaaagcaacgtagaaatggcaatcgtaatgcttcaaatttatattttttaaatgtcgataaattggaaaaaatcgcattagaagagaacgccaaattaagaaaacaacgtgaaaggctatcaaattttcaccgtccagattctgaccgttcagattctgaccgtacagaaaacagtaaaaatgtacgttttgaccctccagaatctggcgttcaaggtggttttcaccctccagaatctggaggcgatccacaagtaaattcaaaacatgatccacaagtaaattcaaaacatgatccacaagaattactcgaggggaaaaaatcgaaaaataaattcgatccgaaattggctaaaccgtcaaatgtgagtgatgaggtttggcaggattggattaacttcaggaaagaaattaaaaaaccgctgacagaaaccatgtgcaagcaacaagcaaaaaaattatcgctttgcaccgatgccaacgctgtgatttgtaattcaattgccaacggttggcaggggctatttcctgaaagatccgtagtacaaactcaaaaagtaaattctcatactgggtttagcgaaaaagattaccagtctcaagatcctcattggttcgtgggaggtggaaatgtctga

SEQ ID NO: 300786 - DNA, 1488 bp, Proteus mirabilis
atggatataaaagactggctcccagaattccaagtttcagcagaaacagatcgtgatttacagacttatttttttaagctaccagcaattaaggaaattattgaaagtagagcttggttggttcttggaagaaaaggtactggtaaaacagcaatttatgaacaccttaggaaaagtaattcaaatgacatcaatggattcaattcaatatgtctaaactttagcgattatccgtggccagcacatcaactttacaaagactcgatggctggagagctttctgcttatcaaaagagttggatgtatcttttttatattaaagcattgtcgaaacttattgatataaaaaataaaaatggagtacctttaaataaagacctaaaatgggcagataaatatattaaaactatatttggtagccccgacccaactcttaaagaagttttgttttcaaaaatagctagattgaaaaccataaaaggccctagtgctgacatcaatgaaatatcactagacataggtgaaatttcattagaggaagttgctgaaaatacccacctaaagcagaaactaaaaactaatgcctttactctactttcttattttgaaaaaatttttaaagacaatgtagataatgaaaaaataatgattgcacttgaccaattagatgaaaattggctagaagggcaaatcgaagagtatagtaaggttttgataaacctgctaaatgtttgtcgaaatatatcgtctgatgaactcctcagtgacaaattaaaagttgttccttttctacgaactgacatttatcaatccttgaaattcaatgataaaaataaattattgcaagacagtgctattaccatttcatgggatgaaaataatctcaatgatatgtattatgagcgaataaaaaaatataaacctcaagagctacaattagctgaggaaaaagaccgttcagggaaagtatttgaggtttcatttgttagacaaggcacccctccttttaaatatatatgtcgccgttctttctttagacctagagatattattgtctactttaataaaattagaatgtgtcataaaaataacaactctggtctttacagttctaacgaactttatgaagctgatcgtgaagcgtctataagtgtatacaatgaggtaattgatgaatggtccaaccaatttccaaaaattgaaaatttactaactgttcttcaaacaatccaagtagaaactttcgattttaatgatttttcagagaagtgtcgtgatgaatttaataatattactgaaggaatgattcgccaatatatcaactttttatttgacaattcactgattggacaaaaaaaacaaggtagatgggaatatataagtagtatgcctaatctcaaaatcaacctacaaaacgaatttaggacacaccatgctttaaaatatagattacatttaatagaaagtagaccgagtcaaaatatttag

SEQ ID NO: 300787 - DNA, 1035 bp, Proteus mirabilis
atgagaataagaaaaacaaagcttgccatcggtattgttgctgttattgctgttgtatcactagcaatgatcggcaaaaaagagaatgccaataagcaatttctctctgtagcaacggcctcaacaggaggaacttattacccgatgggagtcggtttagccaatgtttggagcacccacctcaaggatagaggaatacaagtcacagggcagtcctctgctggctcaattgaaaatatctatttaatgcaacaaaacgaagctcagctttctattctacaaagtctattagctgtggaagcttacgaaggtgtacgtaattttgaaggcaaaccagaaaaaaatctacgttctatatcaatgctttggccaaatgtagagcactttgtcttaatgaatgacaaagtaaaaacaggaacattggatgatattcgtgccaccagcttctctgtcgggccacaagccagtggcactgaacaatcgaccattatcattcttaaaggtgtgaatttaactaaaaaagagatcactcctgaatatcttggttatggagataccgtttcagcaatgcgtgatggacgccttgatgggggagcattacctgccggtgttcccgcctctgcggttaccgatatgtatgccagtggtgttaatgccaaattacttgaagtgactgataagcaacttgatgatattaatcatattgctaactcttggtttcgctttgaaataccagcaaatacctaccctcgccaagcagaaaaagtaaacaccattgcacaacctaatatcttaatgacaaccacaagtattgatgaccagttagtttatgaattgactaaaaccatgtttgaaaacttaccagaagttcatcaagtacatagtgctgcaaaatacatcaccaccgaaaatgcgttaaaaggtgtttctgtgccattacaccttggagcttatcgttattacaaagaaattggattagatatccctgactatttaattccacctgaagctcaaacgcaaactaataataaataa

SEQ ID NO: 300788 - DNA, 1881 bp, Proteus mirabilis
atggagacggtagagaaaaagagtattgcagggcaacaaactgctatacaaacagatttttcaacacgtaatgcccttgctcgtatcattcgctgtctttttgcagaaaaattattggatgataataaactgcaagttttcaatgatgaaaataacgttaagtacccgctttctgatgggatacatatccttcaatttaatcaaacgaccgtttttcctgcaaataccgttattaatcgcggtgatattatccttaaatcaatggatgggcgccaccgaatggtgcaatcccatgaagaactcatggagatactgaaaaacgaacttagtttcacccctacaacggagggaataacaaaattcaataaagatgtagcaaacagtatccataatgatcgattagctagagcacatcggtcaaagtggcgggatatgatttctaatgagatggcacaagagggaacatcttgttttattgaatggataacacgtcattacagtcggcgtgatggtgcaacttttctcgatcagtggggcgctcttgaaggtcattcttattacccaacttggaagtctagacccggtttaagcgatgatgatattgtcgcactatcagctgaatttggtgcacgagttaatctgcgtatcgcagccatacaaaccgatatggtttattgtgaaaagatgccccatattcaggatatccatcaatggttttcatcggcttttccaaccgtttggaataaatggtgtgagtggcttacaagtcaacatcaaaacccacaaaaatggttacctattcctctgcatccttggcatcttgaacactggatcattgagcatttctcaaaagaaatagatgaaggcattcttctaccattaggccctcaacttgagaccgcggcatccatgtcgtttagaaccatgcttcctaccgcatctaaatcaccttttatcaaattacctgttgctatctggatgactagcgaaatgcgcagccttcaagccaaatctattcatatggggccacgtattagtacgattattgaggatattttgcgggtggataaggattttgatggcaagctggactttttccgagaagaagtggcgtggcatttccgtcataacgtgcgtatggatgacgctgaaggtaagtttctctcggttgtatttcgtgatacgcaagcatgggaaagaaacgataatttaatcgctatcacagttgcatcattatttactgagctcccacataaaccccaaccccttattagcgagctgatcgcattatcaggcgacttacctgaaacatggtttcgtaattataccaaagtcatattgaaacccgttttagcgatgtatttaatttatggcattgcccttgaggcacaccaacaaaatacgcaagttttgtttgatgattccggtcgtgcggtcaccatgcttattcgtgattttggtgatggacgcagttgggctcctgcactgcgccagcaaggttatgagcttcaaccttatatctggcccggcattttacccacggtgtttgaagatgatattgaacctgtcagaaccttcgttgtagatgcttgtcttgtcagccatttacatgaaattgcgctttgtttaactcaactttatgacatccctgatacccgcatatggactgtgatcggcgaagagcttgaacttgtgtttaaagcacttcaacccagagtagaggcggatttttggcacaaagagcgtgaacattttctccaccacccttggtatacccgctcattaatgagcatgcatttacagcaatatactgattaccgtcttcagcatggacttaacaatccgttagctggtgaacaagtagataactctaagatctga

SEQ ID NO: 300789 - DNA, 417 bp, Proteus mirabilis
atgaaaaatgaaactaatattcgccttggcagacattgtttattcctgatgcacgtccatttggtctttgtcacaaaataccggcgaaaaatatttgatcaggatgccattgaaaaattgcgaggctactttgccagtgtttgtgctgattttgatgttgaacgggttgaaatggatggggaacgggatcacgttcatttactgattaattacccgccaaaactggcgatatctaatctggttaacagccttaaaggggtatcgagtcgattacttcgacgtgatcgtcctgatattgcccaacgtgattactacaagggggttctttggtcgccgagttatttcgcggggagttgtggtggcgcaccaatatctattatccgccagtacattgagcaacaagaaacaccgagttag

SEQ ID NO: 300790 - DNA, 210 bp, Proteus mirabilis
atgtcgttatgtcgatgggtagcccaagcctgtggggcattggtggtcttagcttctgcttactgtgctcaaaaggcagtggatgaagcattacaacaatgccctgaactcagtaatgataaccgtcaaaccgcacgcttaggcgcggctttcacttgtatcgtaggcggtgtagtggataaaagtatacaagccctttttaaaccctaa

SEQ ID NO: 300791 - DNA, 450 bp, Proteus mirabilis
atgtttaagaaaattggtttattcatgatgagtgcggtgattattccttccgcaagcgcactttatttacccggtgaagttcaaccagaccgttatacctattatttaacccccgaatttgctcaacaattaaaagtcgaaaatgataaacgggaagggaaatggcgattgggcttaccggcaggacaattagtctcagaaaccaattggcaaaaagcggcaaacaaacctgcgcccaaagcaattacttgcatcagtagtatttattttaatgaaggagcacaagctaattggttaaaaatagggtgtgtggacaaccaaggccttgaatatagtgcttcacgtcaatggccatcaaaatcgatagccactaaggtctgtaaagtgggtgagcctcaatgcggatcatttttagtattagaatcagatacatggttaggtcctcaatga

SEQ ID NO: 300792 - DNA, 219 bp, Proteus mirabilis
atgtcttcgttaaatagaagtattgcaagtgtattaggaacacttgcaacactgtatctcgcttatcaagcccaagcacgttgtgaagtaaatatgtcacacaatgataccccaaccagcgtacagcgtgctgtacgactgataatgtcctttatcactgtggtcattattggggggttatctgacgccatcattaaagccaccttctcttctttataa

SEQ ID NO: 300793 - DNA, 687 bp, Proteus mirabilis
atgtcatcatctcaacatcggcatgaccgtttggcacaacggttggcctttattattacccagttgtttaaaggagaaatcttatccttaaaaggattagcacaagaatttaatgtgtcagtacgcactttacaacgtgactttaatgaacggcttatttatctcgatttggactataaagcaggatgttattggttagcaaaatcacaacgtttttttagaaccgataaagacattctacaatttgcgtcgatgacaagcatggtgccgttctttccttcactggatagaaagcttatttcggtgttattggacactgaagaagcaccgccttatctgatttatcatgaggctcctcagcattcgccctcgttgtttggggcgtttgcagtattaactcaagccattattgataaacgctgtattcagttcttgtattgcgacaccacgataaaaggtattgcaccgtacaaactgatttattttgacggtcattggtatttttgcggtgtgaaggtgaaaaataaaaccatacaggttttttatcttaaagaaatgagtgatgtgtttgtcactcaacacacttttattaaacaacaggaggtagagcaattaatacagcaaccgcagtttattacggcacttcctcattttcactatatcaaaacactcatgatgtcttcttaa

SEQ ID NO: 300794 - DNA, 732 bp, Proteus mirabilis
atggcgaactatcgtattgatgcagacttatcttttattgggcaatgcagtaatgaagatttatcattactgctatcggtattaacacacgatattaaagacggtgaaaaacgttggtctgaaacgttaaccaacccccctgaatatcaactcttttatcctgaccatcaaaagtattggcctgccatttgtgcagaattgcaaacttatggtgctaacagtttagtgagtttatttcgtggtaataaaggtgtgttgtatcgtgaaatattaacggatgtctgtgataagttggaggtgaattacgctaaaaatagtgaaacagaaatcattgaattaaatcttttattaaaagtttttgagaaaagcttagataaaatgacagaggaggaattaaaaaaattagctcaagagttacaattaaatctgaccaaccctaccccgcaactgatattaattgccatacaagctgccattaaaacatccggttttgcagctttagaattagtgacgttatcggccatcagtgtcattaacgccttaggcggtatcgcgacatttgggactcttttcgcggctcagcgagcattggcatttatcgcaggaccgattggattagcgctaagctcagcttggttattatctgatattgcaggccctgcctatcgtgtcacggtgccagcgtgcattatcgtggcttatttacgtcaaaaacacctttcttgcgactaa

SEQ ID NO: 300795 - DNA, 291 bp, Proteus mirabilis
atgcttaatcgttttgcttctccgcttgtacaactgaaatctttctttgacacatggaatattagagtacatgaaagaaaagagttgttaattataaaaatgaaaaaggcttgggcacaggaaaagtatagagagaagataaaagataaaaaaatcatcaatgcttatattcccattgatactaaagagaagttagatatgatggcgaaaagagataacaaaaaaatgaatgagtttttaatctatttaattgaaaaagagtatgttggaagaggacataaagaaaggtga

SEQ ID NO: 300796 - DNA, 660 bp, Proteus mirabilis
atgagtaaaaagaaaagaaacagtaaacataaaaacagaagcgagttgaaagtttctaatgaaatagagagaaggttttattcaggaatgattattgatgagtttaattatacgcattggaaagatgcgccaagaggggaaaaagaaatcaacgatgcgatattaaaagaaatacctgatgaggtaaaaaggaaagagtttattagacatgctaaagtgagatttaatgaaactaatattacttcagatgcttatgattggttaaaggaagagcgttgttattgctttatcttttatactatctctgaggttttaacaaaaaggcaaatagaaaaaataattagttatcgtaaaaacaataattggaatgaatatgatattaatcgtgatggaaatgaggtgtattatagaatattgagttttgaattaacgccgtcaactaaagatgaatatatagagtcaattaaaattttcatatcaaaagttgcgagagaacgagaagaaaaaattaaacttattaatgaactaaaacaaagatggttgttaattgaaaataatgactatttaagttggcttgatgagaaagataaagagcaaatagaatgggcaaggaattaccttaaaaaatataatgatagattccttttctttgatgcttaa

SEQ ID NO: 300797 - DNA, 957 bp, Proteus mirabilis
atgactcatgatgataaaaatctattgctactatcctcaattagacaaggtaaaaatactattatcacagtagatattgatgatcgtagttttcttactgaactcattaaaaatgtaaattatttattatctaagaaattagaaaacaaacctgccttcctatgtaaaaaagcaggtggtatctcacaaattataacatccaaacaaggcacctcttttctagatacattaaagttggcttatagcctttactataataaagaattaaaataccaaaaattacaccctgcgattgaagtgttattacgtattatagataaatataaaataacaggtcacagtgaaatatcatcactagtcgatagtagaaaatctttatccacgttactcaaccatgcttataatgaatttataaaagaggtaaattcaaaagaatacctaaaatctcaacggtgcttttatcaaaatgccaatagaatattttcacgcagcaagaaatatattgataatctatttgatcgtcattctaaattactggttattcgtattgacttatcttatcaaacaaataaaaaatatttaatcactaaaaatttattaacagagcatcgaaaaaaactttataaagcgattaatcaacacccccttttcaaacagtgtgtaggatatatgattaaattggaatatggcagaaataaaggttttcattaccatacgctattcttctttaatgggcagaaagtttataaggatattgtcattgctaaaatgattggtgagtattgggctgacatcattacagaagggaatgggttatattttaattgtaattaccaaaaagagcgatatagagaattagggataggaatgataaatagaaaagaacaacacttacgaactggattaatcaagactattcattatttatgtaaagttgataaaaatagctatacctga

SEQ ID NO: 300798 - DNA, 210 bp, Proteus mirabilis
atgaatacccaatctatttctttattagacgatgaattagttgatatgaaatttattactcaatttactaagttaacagataaatggttttataaactcattaaagacggtcagtttcctaaacccattaaactaggacgaagttcacgttggtacaaacacgaagtagaaaattggctaaaagaacaaattgctaaatcaagaaaataa

SEQ ID NO: 300799 - DNA, 888 bp, Proteus mirabilis
gtgcaacacaatagtaaacttgaagaattaagccaagcacaaaaagaacgactcgctcatattgatttcactttattattcaaaggtgaagctgggcgtagttatttaaccgagcgctttagcgtagcgccgtctgtggcaacacaagattttgcgcggtacaaagcgttggctcctaacaacgttatgtatgacgaaaagcgcagagtgcacttgaagacgagcacattccagccgttgtttgattatgacattgttcgaacgcttgcgacgataagccaaggtttcggtgatggctttcttggcaaggttaggccacctatggcttgtgaagcaccatttcatctcaataagccgaaattggaagtggtagcggcgattagtgaagccatacataaacgcgcggtgattaatattgagtacacctcattgtcgagtggtcatgggagcaggcaaatagttcctcataccttgattgacaatggcttgagatggcatgtccgagcattcgatagaaagcatagagaatttagggattttgttttaaccagaataagtgaagttgagttgttagaagatgaggttaacgacgaagttgagactcttcagtgggataagcaatggaaccgaatcgttgaactagagctgatacctcatccaaaactagcacatccagaagctgtattgatagactacgcaatggaaaacaataggttgcgtgtagagataagagctgcgttcgctggatatttactgcgtttatggaatatcgattgttcaaagaatagcaagagcaatgggcgagagttccatttagcgcttaaaaatccagaagcactatacggcgttgacaatgctgcactcgctcctggatatagcgaatcgtga

SEQ ID NO: 300800 - DNA, 600 bp, Proteus mirabilis
atgaatataaaagaatatttaggcgatcttatcggaggcagtttattgataactgaatctagaataatcgcagaatcgctactgaaaaaacttccagaagatgagtggaagtcgctgatcgttgagcaaaatgttcttcagaaaaaatccggtcggacggctattcgttatgccagaacaatccgttggcgtattgaagtcctgggtgatgagtttatgactgatcttttagccgcgagtgaacgtgcctatgtccaaatgctgatgatgtcattactcattcattctccggttgtcgctgattttatgcgacataccttagccgaggctcgtcgcacctataaacccgctttaaccgctgatgcatggtctgagttttatgacacgagagtgcgggcatatgccgaacttggcggtttttctgactcaactgtcaaaaaaatgggtaacaacgcaattaaggcattggttgatagtggctacctgagtgatagcaggacaaagaaaatacaacctgtttacctaatgccagaagttaaagactggttagttcgtctgggccgggaagatttgattgaggtaatggagtgcacaatatga

SEQ ID NO: 300801 - DNA, 285 bp, Proteus mirabilis
atgaaggctctccagaccaggcttgatcttatacaggaacgaattgcaagccctaagtttttgaaaaacgatggcttgggcaatgaaattggattttgggtatttgactatccagccaagtatgaactgcttgtacgagagcaccttaagcacgttgacgaaaaactcaacaagcgtggttaccgctttgtccatctcaatatttttgaagtcttgatggttaggaaaatggatgaatggtttaacggatctataacgatatgtttcggtattagagtctgctaa

SEQ ID NO: 300802 - DNA, 537 bp, Proteus mirabilis
gtggtttgtagccaacgatttttaaccagcttaccaaccgaggctgacggccaagtgcgccgggtcgccgaaaagtttgccttactggccagcgcaggcctgttagccattcaagccaaagtactcgattggccagctcaaagtgtcgaagccgcttgtttaagcctgcttaaccaatggatactcgcccgcggtggtgtggtcgccaatgaagaccaacaagccattcgccaagtacgcagttttattgagcaacatggcgaaagccgctttacgcccaaacaaaccggttacagcagccaagtacgccaacgcgccgattggcttgactctacaggcctacaaaccctttacctgttttatccaaccggctggcgcgaagccaccgaaggcctaagcccagatcgcgccgccaaagcactgatggccgcaggctaccttgtccccgatggcaaccgaccacagcgcaaagtcagcctacccgacaacacccgcccacgcatgtattgtgttaaaggcagcatcttggatgactaa

SEQ ID NO: 300803 - DNA, 201 bp, Proteus mirabilis
atgactgataccgttctgacaattaaagaagtagctgagtatttgaaggtaaatgaaagaactgtttaccgtctagcagcggcacataaaattcctgcttttaaagttggcaatgcttggcgctttaaacaatccgatcttgaagaatggatcagtacgcaagcagctcaaggaaaaggggtgttggatggtaataactga

SEQ ID NO: 300804 - DNA, 2895 bp, Proteus mirabilis
atggtaataactgattatcaagcaaaatactttgcgcaggaattaaccattcgccacgctgaaaatggcgttgataaattgtctcaatctctttttgatgccagtgttgatctcaatccgcaccaaattcatgcggcactttttgcgctcaacaacccgttaagcaaaggtgttgtactcgctgatgaagtgggcttagggaaaactattgaagcaggcttagtactatcacagtattgggcagagcgtaaacgccgcatattgatcatctgcccggcgtcattgcgacgccagtgggcgcaggaattgggcgataagtttaatttaccaacgcaagtgcttgatgcaaaaacgtggcgcattagtgttaacaatggtcaaactaacccgctagctaatcactgcgtttctattatgtcctatcactatgctgcgagaatggaaacgcagctaatgctagagccatgggatattgtcgtcatcgacgaagcgcacaagctacgtaatgcacatcgtagcagcaataaaatgggtcaaacgctacgccgcgcattagatggcagtaaaaagctattacttactgcaacacccttacaaaactcgctcatggaattgtatggactttcaaccattatcgacgatcaaatcttcggcgatgagcgaagcttcaaacaacactttgtcaataacgaaagtgcgctagggcatttaaagaaacgacttaccgggtttattcagcgtaccttgcgcaaagatgtactcgaatacgtccgctatacccaacgtcaaacactcaccgtaccgtttacaccctctaatgctgagatggcactttacgaaagtattagtgccttattggaaaaggacgagagctatgcactacccaagagccaacgtcatttaaccggccttatactgagaaagctattagcatctagttcgcacgcagtgctcaacacactcgaaactataaagcgccgattggttgacttgaaagtacaggctaaatcggacctcgatattatcagtgagcttgttgagagtgatgatttaggagaagagcacagcgagtatgtagaagaaacacaaagcaatacccctgagagtgatattgactttgagttactcaatgctgaaatagccgagcttgagcattatatcgagcaggctaaatccattaccaccgacagtaaaacccaagccttgctaacggcgcttaatcaagggtttgccaaaatggaggagatgggtgcgccgcgtaaagtcattatttttaccgaatcgaagcgcacgcaagaatacttagctcgtttcctcgaggcgaatggctttgctgataaattagtcacttttagtggcagcaataaccatccagaagcaaccaaagtttatcagcagtggttagctgaaaaccaaggtagtgataaggttagtggttcaccgcaaattgaccgccgtaccgccctaattgattacttccgccatcatgccgaagttatgatcgcaaccgaagcggctgcagaaggggttaacttacagttctgttcgttactgattaactatgacttaccatggaacccacaacgggtagaacaacgtattggccgttgtcaccgctatgggcagcaatttgatgttgtggtgatcaacttcctcaacgaagccaacaaagccgatcagcgtgttttagagctactaacagaaaaattccatctgttcgatggcgtgtttggtgcatcggacgatgtgctaggcagtatcgaatctggtattgattttgaaaaacgcatccaaaatatatacgagacttgtcggcaaccggcggaaatagaagcagcttttgatcaattgcaaaaagagctagaagccgacattaaccaaaaaatgcgcgagacccagcaactgctgctggaaaatttcgatgaagatattcacgacttactgaaaattcagcttgatgccgcgcagcaacgcctcgataaagtaggccgttggttttggcaactcagtacgcatgagcttgcagctatcgcagacattgacccaagcaaccatagttttacgcttaatcagagcatcaatcaggctcctacaggtagctaccaacttgtacgccgaggacagcaaagcggcagtattgaaaccggcaaactagccaatgcccatgtttatcgtatcacccacccgctgggtgaatgggtgatcagcaacgcgcttcaacgtgaattacctattgccagcgtaatttttgattacagcaaccaccaaacaaaaatcagtatgctagaacccttagtgggttcgttaggtgtactaagcctacagaaatttagtgttgaatcattggagcgtagcgaagaccatttactgttcgcagcgcaagatgaacatggtcacccgttaccaagtgaagtcgtgcaaaagctgatgcagcttagtgcctgtgtgcaaagtgtagtcagtgagcaagaacttgccgccttatatcctggctatcaaaatgcgctgcagcaagcgttacagcagtcgagactaggcatcgaaaagcaagttaacgatcgtaatctcagcttcttcgagcaagaagtaaacaagttagattcttgggcagacgatttaaaagaagggcttgaacaatccataaaagagcttgataagcaaatcaagcaagtacgccgcgaagccaaaatagccccaacgctagaagagaaacttgccctgcaaaaacagcagcgccagttagaaagtcagcgcaataaaagccgccgcgaactttttgataaacaagatgaagtggacgaaaagcgcgaacagcttattgaaagcttagaaggcaaactgaataaaaaaaccagccaagagaccctatttaccattgggtggacggttcaatga

SEQ ID NO: 300805 - DNA, 930 bp, Proteus mirabilis
atgagccgcaaaccagtccctaaagtcgcttttaccaagccccctacaagctttagcgatcaaatacgcttgttgcaacagcgtggcctagtgattagtgatggccctaaagctgagttttacctggcacagctgaactactatcgttttgcggcttattgtttgccttatgagcaagatcacgccagtcatgcgtttatcgcaggcacccagtttgaacaaatcctaaacctatatgtgttcgaccgtgaactacgtttgttggtgctagatgccatagagcgttttgaagtgtcattgcacacacaaattgcgtatcagttgagccaaaaataccaaacggcgcaccctcatttaaaaccagagctttttggtgatttattagaatacgccagcagccttggcaaactcacgggtgaggtaaagcgcagtcgtgaagagtttattaaacacctgactcaaaaataccaagagccactaccgcctatttgggcctgtgttgagttgttaaccatggggcaactttcccgttggtacagtaatatcaagctgcgtgccgaccgccaagtaataagtaaaagctacggcctagatgaaaaaactctgacctcattctgtgaacatttatcactagtgcgtaatttaagcgcccaccattctaggttgtggaaccgcgactttataaaaaccacggtactgccacgccatggcgaaccggcactgatccaaagcttgcaaaacttgcccgatagcgaccggcgtttgcgaaagatttataacaccttggtgatgttgggctacctcatggatgtgatcagtggtgaacatcactggaagcaacgactcatccaattgattaatcatcaccaaatagacattgaccgcatgggctttccagccgactggcaagcgcggcctatttggcaataa

SEQ ID NO: 300806 - DNA, 1836 bp, Proteus mirabilis
ttggcagcattacaaccacaatttcttgccccattaaaggaactgctacagcagcgttttgtgccacatttaccgccattacttgggcaaggtggacaggaagataaacctaaaaagcaaatttccagggcttttagcgcattcgtactacagcaaaaattcgatttagacgtagtgaccgcaacaaaagctgtagtggatgactacgaagatcatggtcttgatgccatttattaccacgaagctgatcagacgttgtaccttgtacagtccaaaatgaaagtagatgcccaattcacattgggtgaagctcaagcctttatagaggggattaaattacttttaaataagcaatttaatcgcttcaatcagaacgtacaaaaccttcaagcacagattgaaacggcactagatgaatgcgagcacattcaactgctgatagcatacacaggtagtggcattacaatgcaagcacagaactacttgcagcctgccatacaagagcttattgatgaaggtgaagagcaaatcgaacctggttatcaagagttcactgccaccgatgttgagcaggctcttcgcagtgaacatgcggttgatacggtaaacgagcgtgtcgccgtatataagtttcgagtgcaagaacaaccacgaaaagtcgtatttggtatcgccaaactaaccgatttaattgctttgcacactactcatgatcgtaaactctacgagaaaaatattcgctattttattggtgcaggtagacgcggtgtaaataaggctattaaagatacccttttacatgagcctgaaaattttatttatcttaacaatggtattactctggttggcaatgcagtaaaaccaaaagggaatattagaggccacacaggtagcaagcatgttgcagtcgatggcctatctgtcgttaacggtgcacaaaccatcgccagtgctgcgcaatttatgcgtgaaaatcctgatgccgatatcagccaagctcaagtgatggtaaccattatcaacacgggtaacgatgcatttcacaagcaagtaaccaaagcgcgtaacctgcaaaaccctgttgatttagcaaacttcgcggccctagatgatactcaagaacgtctacgccaagagatgaaaatgttcggtgtcgaatacctctatcgcccacaacaaagcgctgcagcgggtattcgcagcattactatagaaacgttggcaaaagccttggcctgtatgcaagcagatgtgcgcgtgccttatcaactaaaagcagagccgagtagatttataaaccaagaaagtgtcgagtatcaggctattttcaacccagatttgcaaggggtcatggcaattaatgccgtcaatatttacttagccatccaagctttatgtacagctgcggaacgcagcagcccaagcccggaaaaactggtttaccgccattttacctactgtataaccacgttattaatggcgcagtttaaaaacacaattaccgccgttgaaatcaccgagcaagaagcattcgaaagattaattagccgagcctttgatgaacttcgtcagaagttctccgatagttttaggacattagcattcggcagtgcgccgcacgcctattttaaacgccttagcgatacagcacggttaatgcaaacggtgtgggtcagccatttaaacttggcagaaaacccagctgtgatagctaaacaacggctgcaaccgaatgacccatacaaccggaatttattcagttacttagccaaacaagcgcaacgccgacaagagcaaaacgctcaagctgccaatcggcaagtacagcaggcgtag

SEQ ID NO: 300807 - DNA, 1689 bp, Proteus mirabilis
atgagcaaaactaaattagaactgacctggataggtaaaaacgagcgcaaaaagctagagccgcgcattttattagaagacccaagtaagtcttaccatgccagcccaaaagtcaccgaaaacgatatttttgataataagctgatttttggcgataacttattgacgctgaaggcactagagcaagattatgcagggcaagtgaagtgtgtctatatagacccaccattcaataccgggagtgcgtttgaacactatgatgatggtgttgaacattcattgtggctgtccttaatgaaagatcgcttaagtattatttataatttgttaaaagatgacggttgtatttttgtccacctcgatgacaacgaattggattatttaaaggtattaatggatgagatctttggtagaagtaactttctgagtcgaataacaattgaagcaagagctccttctgcatttagtactgtgaataaaggcgtatttaaagcttctgaatatatcctttggtttgctaaggataaaaccagatttgaagaaaatagggtccgaactaaaaggatgcctgactatgcttatagtaagtggttagaaaatccgaatgacgatcctagcctgtggtcatttaaatccattcaagatgcttttgaagagatagccaagcctcgtagcagaagaccagatactctattagaggcatttaacaagtttattgtagagaatgcagggcaagttactcgcctagcaagtattagtgactctaaagcgggagcatcgattgttgagctcaagaaagaatcgttgaaaaataaaggtaaagtattccatatgcctcgtgaagggctcgatgatgtatatgttgtcgatgggcagcagttaatattttattccaagaacgtgacagaaattgatggccaattaagtgcctcaactcctctaacgaacatttggactgatattgcatgggaaggaattgctggcgaaggatctgtaaagtttaatcaaggtaaaaagcctgagagattaattaaaagatgtctggaattatcaactgcacctggtgatttggtgttggattccttcggtggttcaggaacaactggcgcagtcgcccataaaatggggcgtcgttggatcatggtggagctaggcgagcattgccatactcacatcatcccgcgcttacaaaaagtgattgatggcgaagatctgagtggtatctcgaaagcagttaattggcaaggtggtggtggttttcgttattacaaacttgctccgactttaattgtgaaagacaagtttggcttggacgtgatcaataaagaatataaccctgaaatgcttgctgaggcggtttgtaagctggaaggttttacctatgcgccatcggaagtgaattggtgggatcacggttattcaaccgagacggatcatatttatgtcaccacacaaagcttatcggtagataaattagaagcgctgtcagaagaagttggcagtgaccgaactttactgattatgtgtggtgcatttcgctgcgagccaggtcgttttgcgaatttaaccttgaaaaaactgccaaaagccattttgaataagtgccaatttggtcaggacgattattcgttaaatgtggcaaacctaactgacgatgcgtctgccgatgacgatgcagcgcaagattaa

SEQ ID NO: 300808 - DNA, 2739 bp, Proteus mirabilis
atgaccatggatttatcaaacttaaaacccgagcaattacgcgccatcaacaatgttattggccgtttaagtttacgccagccacagcaagactcgctgcgtgcgctggcggtggcaattagtgcttctgagcacaaactacttaacccaaaacgcgatgtgccggaattattagaaaccttaaaagcgcagtttcctaagctcagtgattttgaacgtgactttccttcactgtgttttgccttggcaacaggggtcggtaaaacccgtttgatgggggcttttattacctatttgtatcaggtgcacggcattcgcaattattttgtgttggcacctaacctgactatttatgaaaagctgatcagcgatttctcgcccgcctcaccgaagtacgtgtttaaaggcattaccgattttgtgctagcaccgccagaagtgatcaccggtgataactatgagagccgcggcgcacaagtcatgggcgatctatttggttcggttcggatcaatgtgtttaacatcgcgaaaattaacaccgaagtacgtggaggcaaagccccgcgtattaagcgtttagcggaaaccctaggcgaaagctactttgagtatctatcgaacttacctgacttagtgctgctgatggacgaatcgcatcgctatcgtgccgatgccggtatgcgtgcgctcaatgagcttaatccactattcgcattagagctaacggccacaccatttaccgaatcaagtcgtggccctgtgcactttaaaaatgtggtgattgattacccattggcctgtgccatggatgatggttttgttaaagagccggccgttgttactcagcgtaactttgatgccagccaatatgataaagacgaactagaaaccattaagttaatggacggtattcgtttacatgagcaaaccaaggtggatttaatcacttatgcacatgaaaacgatgccaagttagttaagccttttatgttggtgattgcccgtgataccacgcatgcagcagagcttttaaccaaacttgaaacagtgtttgacggccgctaccgtggcaaagtcattcaagtggatagcagtaaaaaagaagaagaaactattcaagcactgctcaatgttgagcatgtcgatgaaccaaccgagatcgtcattcacgttaacatgctgaaagaaggttgggacgttactaacctgtacaccattgtgccactacgtgcagccaacgccagaaccctaattgaacagtcaattggccgtggtttgcgtttaccttatggcaaacgtacaggtgttgaagccgtcgatacgctgagcattgttgcgcacgacaaattccaagaaattgttgatgaggctaacgacccgaataacccactgcgcctgaaaacacgcgtattagatcgcccagaagacgatgtaaccaaacaaagtgtgcaggttaaatcgaacctagagcagcaactgactggttcaggtgtaaccgcaaccggtgcagacggtaaccgtgaggtacaagaacctaaagccacttataccacgcctaaccaacaaaccgttgcccgcgctgcattgaacgtgatcaagcaatatcaaacacgccctaccgatgcaccgaccagcaaagcattgttaacgactgaggtaaaagcacagatcaccgaacaagtaaaagctcagttaacccaagagcaacgagagctatttactgaagaatcggtggatattgcggcgattgttgagcaagtcacccagctcacggtggataacaccatagatattccgcgtattattgtttcaccatcaggtgaagtacgtaccggctattacccgttcgatttggacattgctgccattaaaggtttaaaacctatcgaccgaactctgattcaacaaagcctgcaagacaatcaccaaaccattcgtggcgaaggcgattcgggcaactacgagccggtgaaacaaaactatattttgaagaagctgttcgattacgacgatattccttacgacgagcaagctgaacttttgtttgacctagccactcaagctgtcaatacactggccgctgaaaacgacgatgatgtggttgagaacattctgcaaaaccagagtgatgcgattgcgaagttaattcatgcgcaactgaacaaccacttctttgaagaagcaaccgagtacgtcgtcgatgtacgcagtggctttagtaccttacgtgactgcgcttacaccatagcgcaagaccagccggtgcaaagctaccgtgatacagtacgcgatgtcagtcgcatcaaacaaatgctctttggcggctttagccgttgtctatacccactgcaaaagtttgattcagacactgagcgccgttttgcggtgattttagaacgcgactgcgagaagtggtttaagcctgccaaaagccaattcaagatgtactacaaacgcggtagcgagcatcctgaatacgtgccggatttcgttgctgaaaccgccgactatgtattgatgattgaaactaaaagtactcaacatcaaaaccaagacggcagttggaatgaggaagtcaccgaaaaagcccgcagtggtgtgaagtggtgtagtcatgccagcgaataccttgcacagcacggtggcaagccctggaaatacttactcattccgcatgatgctgtgaaagaagctaattcgttggtttacttcacccagcagtttgctaaagctgagtaa

SEQ ID NO: 300809 - DNA, 339 bp, Proteus mirabilis
atgcaatttatgatgcgacttgcccccattacctttccaatcgccatgctggcaggccttggttggtgtattggcattgccttactcgaacagccttatggtataggctacgcacttactcggcattgcctgatggtattcgtggtgctcgctccttggctgatgctaaaacccatgttctatgtgattgtcagtttaggacgcaaactgggactcatcccgcctgcacgcccaacgcacagcttggggtatgaagaatcactctattggttcagagtattggcctttttcgatggcaaacgcagtcgcatgccgaaaaggcccatcaggcgaaactag

SEQ ID NO: 300810 - DNA, 330 bp, Proteus mirabilis
atggggccagatacgctgaaccgtgccatttctaaactctttggtcgcgagcctaggcgcaaaaaacagccaccgaataaaatgggcaagcttgaacacttcaccgtacacgatttgcgtcgcacctttcgcagccttgccgcctctttgggcattgcaggcaacgtagccgaacactgccttaaccataagttaaaaggcgttgagggcatctacgaccgccacgattactttgaagagcgcagtattgcccatcaaaccgtggctgatgtgatcgaaccactggtgaactttgagcactcttcacagcacaacacaggagggcattaa

SEQ ID NO: 300811 - DNA, 846 bp, Proteus mirabilis
atgggaaaactcacagctaaacaggttattgcatacagcaaagccgacccaaaaaaatattcagatggtgaaggtctatacttttgcgtccgcaaacaaggctcgccttactggatgatccgctacaccacagccaaaggaagacgagaagcaaccttggggcaatttcctttaatgtcgttggcagacgccagaattgccaccgcatactttcgaaaggaagtacgtgacggcatagatcctcttctagaaaaacagaaaatcgagttacctgacattgagaccgtggatcaactgttccatgactggtatcgaaccgatctgagtagacgactaaagcatcccaagattccgtatcgggtttacactaaagacataagccctgtcattggcattaagtgtattgctgaggtgaccgcacgagacgtgcgcgaagtattagagcgcattcgagaaagtaactgccctaccattgccaacgataccttgatgtacatgaagcagttgtttcgacatgcgataaagctcgacttaacgctgaacaacccagccgcagcatttaccgtggacgatgccggtggcgtggagtccagtaaagacaggatgctcagcaaagaggaaattaattacgcctttagcgtatttaatacccatatcaatagctttggccgcgacaactacctcgcttgctgtctgtttttggtgttgggcgtgcgcaaaagcgaattgtgcgaagccatgtggcgtgaaatggatttaaccacaggcgtgtgggatctgcccaaagaacgcagcaaaaccggcgtgcccattagcacccccttaccgcgccaagccattgcctga

SEQ ID NO: 300812 - DNA, 330 bp, Proteus mirabilis
atgatttgtggggaagagatatatagtatttattgcttgccatttgatgaagcaataggtggagatatagtatatcagaatgtaatcgccaataagaatttagcatccgaacgaatctccttgtcaaatacggattttggtgaggaatttttttgggatactaatgatatgaaaaaggtctatgtattaattggtgataatagtcagctatatgctgctgattttttagaatatcttaaaaaaacgtttactttcctatgtttaaatttattcagtgagttatttgttacctgctttgattataacccatacaccaaagcaggtaactaa

SEQ ID NO: 300813 - DNA, 138 bp, Proteus mirabilis
atgatattgattaaattacccgcaaaagcaggctttgctctgcgtcattcgccgccggaacaacaacgcgcttttcttgctgtgattgacagttggcctagtaatgtggggcaaagtatccaagcctattctgaatag

SEQ ID NO: 300814 - DNA, 585 bp, Proteus mirabilis
atgcgtataacagcgacggcttccccatgcctaaaatcggggatgatttctgtttttattacgaatttaggtaaatataacgaaggtgaactagttggtgagtggcttgagcttccggcaacctcaaaagagatcgaacactgtttaatgcggattggtattgatggtattcactatgaagagtatttcttgacagactatgaatcctccattgatggcctttcttcttacatttcagaatacagtcttttagatgagttgaacgagttagccacccaattagccatgttatcgcctgatgaaattgacctttatcaggcggcaattgaaatcggttcttcagcgagttcaatccatgatttaattcatttagcggataatttagattctttccagcaattagcgggggtcaataatgaatatgatttaggttattactggatagaagaaagtggttgttatgatttagcccaacttcgtcatttatcccattactttgactatgaacgctatggacgtgatgtttgtcttgaacaaggggggatttttcacagtggaggatatgtttatcatacggatgggtag

SEQ ID NO: 300815 - DNA, 753 bp, Proteus mirabilis
atgcgttatgccgtacaaagcggtttaatcgactataaccccgcgcaagatatggctggcgcagttgcgacaggcaaacgagttcatagagcggcattagagcttaaacgcctacctgagttcttacaacgcattgatgattataagggaagacctttaactaaacttgcagtcaaacttaccttgttagtcttcattcgttctagtgaactgcgctttgctcgttgggatgaaatcgattttgagaatgcaatgtggacgatccccgctgaacgtgaagcgatagaaggggttaagcattcccatcgcggatcaaaaatgcgtactactcacttagtgcctttaagccgacaagccattgagatcttaaaacagatctatcaattcagcggcaactacgagctaatctttattggtgatcataatcctagaaaaccgatgagtgaaaatacggtaaacaacgcattacgtgtgatgggttatgatactaagacagaagtatgtggacatggtttcagaacgatggcgtgtagctcgttgattgaatcagggctatggtcgaaggatgcagtagaaaggcaaatgagccatcaagaacggaactcagtaagggcggcttatattcataaagctgagcatattgaggaacgacggcttatggtgcagtggtgggcggattatttggatgctaatcgggaacaaacgatttcgccattcgactttgccaagtttaataatccaaggaatcattaa

SEQ ID NO: 300816 - DNA, 507 bp, Proteus mirabilis
atggcactttccgatactaaggttcgttctgcaaaatctgaagataaagcatataagctgacagatggtaacggactatttcttctggttcatcctaatggctctaaatattggcgcttccgttatcgctttggcggtaaagaaaagatgctagcatttggcgtttaccctgatgtctccctagcgaatgctcgtgaaaaacgagatgaagcaagaaagtttgtcgccagtggggtagaccctagtgagaaacgcaaagaagttaaagaagagcaacaaaaagaattcaatacctttgagaaggttgctcgtgattggcatgcaactaataagaagtggtctgaaggtcatagccatcgagtcctcaaaagccttgaggacaacatctttgttgctattggtaaacgtaatattgccgaactaaaaactcgtgatctactcgaacccattaaagccgtagagatgtctggacgtcttgaggtggggcacgattacagcaacgagtga

SEQ ID NO: 300817 - DNA, 750 bp, Proteus mirabilis
atgctaatgacaatgattaaatcacttatttttatcccttatctattattaagtggatgtggcgagtatatcaatatatatcttaataataaattccccgtcaatatgaataatgatggcaaaaaaatcacggtttattcaactatttcccctgaaacagtagtggaagttattggtacttatacatctaataagtgtgaacgttctcattttaatgcttcttatactaaagtcacttattcctctttaacaaaaaaagtggagatagagcgtaaaataactgaggataataaaactgcgacctacactgtgcctattgatggagggggatggtgtaattggaagctagtagaaataaaactagcgccagtctctaatattcataagatatatacgcgaattagtgaaattattccaattaccgatgataagcattcaaaaatagagctgtttatcactttagctcctgtcatagtggaaaaatataatggtaaatcaatctattactcatcatcaataatggagggtgaacaaaatctatccaataaatcaaatggggaaatctattttaattataaagttgaacctaaactaaccacgattatttcaaaggataataaagctattttccctaacggcaatattaaaacactgagtggatcgacttatagtaaaatgattggttttaatgaaataatcgagaatagtgatgaaaaagcgtttacttcttttgttcgatatattgattaa

SEQ ID NO: 300818 - DNA, 1650 bp, Proteus mirabilis
atgacaaacacagttattaagtacgttttagaccgattatatgatttaggtatcaaagatatttttggtgttgctggtgattacgccttccctattgaagacactgtttgcaacaaccaacaacaacgttggattggtaactgtaatgaattaaatgcggcatatgctgcagatggctatgcccgaattaaaggtatggcagcattatccactacctttggcgtaggtgaattaagtgcgattaacgctattgccggtgcctatgctgaaaatttaccgattttccatttagttggcatgccagcaagtggcgtacaaaaaagtaaacgccttgtgcatcatactttaggtaatggtgattttgatgttttttatcagattgctcagcgccttgcttgcgctcatactattttaacacccgaaaattgtgtggaagaaatggagcgcgtaatagatgtggcattaaaagagcgtcgtcctgtttatattggtataccttcagattatgctaatagccaagtagtagcgccgttatctgttaccgcaccacaaaagccaacaagtgataaagcaacattagaaaaagcagtatcagcaatcattgagaaactcacccacagcaataatgtctgtgtattaccaggctttttatctgcacgtttagggttaacagataaaatccagcattttattgataaaacaggtttaccttatgccactatgtttatggataaaagcatattaagtgaatctaacgcgcaatatgttggtatgtatgacggacaattaatgacaccagaggtcagagaatttgttgaaagtagtgaatatatattagggatcggtacattaatgactgactttaatacaggcagcttcactgctaatatgaaatcagaacaattaatcagtattatgccagattatgttgaaattgattctgtgatctactcctgcgtttatatgacagatattctttctgaattaacccaacgactaccaaataaaacttatcataaaataacagcgaaaggattaggtgaagcggttgcatctgataatgataaaattacagcacaatatctctatcctcgtttagaaaaattctttaagcctaatgatattattattgcagaaacaggaacctcatccatgggattaggcttcgctttattacctgaaggtgcacaatttcataatcaaacactatggggctctattggttgggcaacaccggctgcattaggcgctgcgttagcggcaccagaaaaacgcattattttaattaccggtgaaggctctcatcaattaacagtacaagaaattagtcaatttgttcgtttcggtttaaaacctattattctagtattaaataacgatggttatttaatagagagattattatgtgattaccccgaagcttattataatgatttagctcagtggaactatcatcagttaccgcaagcctttggtgcaacagattggtatagtgaaaaagtaactacagcaagtggactagataatgcgttaaataaagccgcactaacaaatagcgcatcttatattgagatagtcacagagcgatatgaggcctctgaattagcgcaaaaattaaaagaatcaaaaagttcattatattcattctaa

SEQ ID NO: 300819 - DNA, 945 bp, Proteus mirabilis
atgtttggatcttctaacgtgatcttgagaaataagcgcttatccagttatcaattagcacgacttcacacttttgaagcaacgggacggcatttatcattcgctttagccgcagaggaattgtccttgacgcctagcgcgatcagccatcgtattaatacactagagaaagaattagggataaagctatttaatcgctttcatcggcgtattgaattaaccgaagaaggtgaacgtatttattgggcattgaaaaaaacacttgaagatattaatcaagagattttagatatctataatcaagaaatatctggcgtattaacggtgtattctcgcccttctattgcgcaatgttggcttgtacctcgtatttctgattttactcaacgctatccttctattgaattaaacttacttactggcaatgacgatattaattttcgtggttatggtatcgatctcgctatctatttcgatgataaacacctgaaaaatctctattgtgaagatttaatctcagaatcaattattcctgtttgtagccctgaatatgctgctcgccatgaattagtaggtaatatccatcaccttgctaattgcactttgttacatgatagacaagcttggagtaataactctgattttgatgaatggcgtgcttggagtgaatatatgggattaggattatttccaaataaaagtaatatttgttttgatcgctctgatttagctgttattgctgccgttaatcattccggtgtcgcaatggggcgtaaacgcttaattcaaaaacaactcgcaaataatgaattaatagtcccttttgataattgtgagtttttttgtgcacaacgctattatctggttacccgcgatgaaaagagtaacgctaaagtacagctttttattcaatggctgaaaaaacagatcttacaagggatgtga

SEQ ID NO: 300820 - DNA, 612 bp, Proteus mirabilis
atgatgactaatattacactcgataatataaaacttgctgtacaacgtatcgcgattgcctgtgaacagtctcaaaatagactatgtgaagcagatagccaacttggtgacggtgatttaggggtaaccatgcaaaaaggatggcgacaaattgctaacgatgcccaagattggcctgacgatttaagcaaagcgctttttcaatgcagtaaatcattacaaaaagcctgtgcgtcttcttttggtactttgcaagcaacggcttttatggcaatggccaaatattgcaaagaaaaccacctgcaagaaatagcgcttactgatatttccccactattgacggtcgcataccaaagcatgatggcgagaggaaaaggggaattagggcaaaagtcagtattagatattctttatcatttatctgaagatctagcgtcaatctcatctctgactgaactaaaacccaccgctttaaaaagtattaataatacgctaaatgaatttcgccctaagcctaatttattgggacgtgcccgtatgttcccagaaaaatcgataggattagacgatcccggaatgttagcgattaacgttattgttgaagcaatttga

SEQ ID NO: 300821 - DNA, 2109 bp, Proteus mirabilis
atgagaacgcaaagtcattctcatatcattgaattgactcatgtatcccaacattatggtgataccaaagcacttgatgatgtgacattgactattcctgccggaaaaatggtcggcttaataggcccggatggtgtcggaaaatcgagtttaatttctcttatttcaggagccagagaaattcagcaagggcaagtgatagtacttaatggtgatatgaatgatgttaatcaccggcgagctgtttgccccaaaattgcctatatgccacaaggattaggtaaaaatctttatcacacactttctgtttttgaaaacgtcgatttctttggtcgcttatttggtcaatccaaacaagagcgagaagagcgcatcaatgatttacttgaaagtacggggttagcgccttttaaggatagacctgcgggtaaactatctggtggtatgaagcaaaaactggggctttgctgtgcattaattcatgatccacaattgctgatcctcgatgaacccaccacaggggttgacccattatcacgggcgcaattttgggagttaattaatcgtattcgtaaacgtcaaaccaatatgagcgtattggttgcgacggcttatatggaagaggctgaacgctttgattggctggttgcaatggatgcaggtaaggttttagccacaggtcatgcggaagaattaaaggcgcaaacggcgacagatgaattagaagctgcttttattgagcttttaccggaagaaaaacgcaaaaaccatcaaaaagtgattattcctccacgggataaaagtgatgacgatattatcgccattgaggccaaagaattaacaatgcgctttggtcagtttgttgctgttgatcatgtcagttttcgtattcctaaaggcgaaatttttggttttctaggctcgaatggttgtggtaaatccaccaccatgaaaatgcttacaggtttacttgaggcaagtgaagggcgcgcttggttatttgggcaagaggttgatccaaaagatatcgaaacccgtaaacgcgttggttatatgtcgcaagcattctcactgtatagcgaattaacggttcgacaaaatttagagctacatgccaaactctttcatatcccagaacaggatattcctcaacgtatcaaagaaatgagtgagcgttttaatttgaccgatgtggaagatatgatgcctgatggtttacctttaggtattcgacaacgcttatcgttagcggtggcagtgatccacaaaccagaaatgctgatccttgatgagcccacctctggggttgaccctatcgctcgagatatgttctggaagctgatggttgatctctcaagacgtgacggtgtcactatttttatctctacccactttatgaatgaagcggcgcgctgtgacagaatgtctctgatgcatgccggaaaagtgctagtgacagatactccggctaatttagtgaaaaatagtcaatttgatacactagaagaagtatttattgattatttgaaaaaagcatccggtgaaacagaagcgcccgatattgaagataaacagctacaattgcccgcctctagtgaagaaagtgcggaaaaagcgttaaaacaacgatttagtttacgccgtttatttagttatagcattcgtgaagggatggaattacgccgtgacccagtacgccttaccttagcattactaggcacggtaatattgatgtttattatgggttacggcatcagtatggatgttgaaaacctacgctttgccattatggatagagatcaaacagggctaagtcaggcttatagtcaaaacctatcaggctctcgctattttattgaaaaagcgccgattaccgattataaccaacttgagcgtcgtctccgcagtggtgatattactgttgcgattgaaattccgcctaattttgttcgagatgttgctaaaggacataaagtaaaaataggggtttggattgatggcgcgatgccaaatcgtgcagaaactgtccgtgggtatattcaggcaatgcatctaacttggatgttagatatggccatgcgtcaacctaccaatatggttgatcaataa

SEQ ID NO: 300822 - DNA, 294 bp, Proteus mirabilis
atgaaagatggaaaacctgttccagcattaaaagcgggtggtcatcttgatcctgaaaataaaggtgttcacttagggccttataacaaagaagggcatttaggtgatctacctggtttggttgccaatagtaaaggtgacgctgattatgccgttcttgctcctagactgactaagcttgatcaaattaaagataaagccttaatggttcacgttgggggagataactactcagataacccagaagcgcttggcggtggtggtgctagaatggcatgtggtgtgattaaataa

SEQ ID NO: 300823 - DNA, 390 bp, Proteus mirabilis; identical to SEQ ID NO: 297871

SEQ ID NO: 300824 - DNA, 843 bp, Proteus mirabilis
gtgtataagagacaggtatttatttcattatcttgctatgctcatcaagatgttattttacattctgattcattatcagatgcaaaagtatctattaatgatgacacagggaaaacacaaattgaagtgataaatactaatcaagatggtaccgcccatatctattataatcgtcttgatgttggtaattttggtttatcattaaaaaataatgctgaagcagaattaattattaatgaggttgtttctaaagatgtttcaattctaagaggtgagcttgagttacaaggaaaaaaggcgacagtggttatagctaatcctaatggaatttcttgtcgtgattgttctttctctggaattaatgatattaaactaattgcaggtagcagtacagggaaattttctaagacattcactatagcagatataggttctagtgttgtttttgatatgagaaataaattagataaaaatgaatatagtcatattcatcgcaattataaagatatttcatctggaatgataaatattatctctaataatgtagacttgattgacggtgatttaaatgctgaatatattcgttttgatatagggttaagtgagtttaatcttggagctaaaaatgattataataaatacagccattttttgttaaggacagaggcaggaataaatagtcgatatttaataataaaagcaaaacagggtaacgtttataatgatggtaatataaatactttgtcactaaatcatgagtcttatagcttaattaatgcaggaaacatagatataaatcaagatgataatttatatagaacagcttatgatgggacgaaataa

SEQ ID NO: 300825 - DNA, 351 bp, Proteus mirabilis
atgaacatttatcaacgtgggcagagtacagcattaaggatgttgaaaaaatatggcgtttcctatcaggctaagcgtgatggtaagcattgggttgatgatgaggggcaggaacactttgagccagaaacgttattttctgttgtcggggtaaaaacgcaatataaaccttacgaaatcgatggcacgcttattctctctacggatattaaaatgatacttcctccagatattgatattcagaaaggggataaggtgcttgtcgatggcgtttggttgcgcgttcatgaaccgaaccctgttaaacccgctgatattattatctgctatcagtctcaactgagggcgtga

SEQ ID NO: 300826 - DNA, 402 bp, Proteus mirabilis
atgaatcagtcgacaattaatactgaaatacgaaagctggtggcgagcattggcaaggatttaaatcttaaaatcgcatggcccaatcttccttttaatgatattaacgatccctatcttcaactccatgtcatgccagcagaaacggataacatcgggttatctctggatatgcctgtttatcgtggtgttatccaaattaacgtagttgggaaagtagggggtggggacgctaagatatcaactattgctgatgacgttaaaaacagattagaaaatggattaacattaggggagggtatctacattaacggagagcctagccagttccctccaatttcagacgaaacaaattacaccattcctattcgtgcatcatatcgatgtaacgcaatccgataa

SEQ ID NO: 300827 - DNA, 654 bp, Proteus mirabilis
atggcctataacattcctaatggctcacgagtctacgtggcaagtaaatatggtaaagaagtagaatttactacagcaagcaacgccgcagaggcggttcttaccgtggctgcatctagcggcgtgaaagctggcgatattgttcaagtaatatctggctggaaaagaatgtctggcgtgtatcgagtgaaggctgcggcagaaactagtgtcactctcgagggggtcgataccacggacacagaaagattcccagcaggcggagggaagggaacattaaaaaccatccaagagtgggaggtcatgccgcaggtaatgacgctatccaccgaaggcggtgagcagcaaacacaagaaattcaatttcttgaagatgagcaagcggaaactattgatacatataaatcgggtatcgttcaggtctatacttttgctcatgacgctcaattaccaattcgtaagttactgatgaagctggatgatacaaaacagttaacagccatacgattttataacaaacgagcaggtgaagatcgctattactctgcaagtgtttcatttcagcgcgtgccgaacacagccatcaatgaggttgagaatgtatcagctcgcttttctctcaagtcagatatgcaaatctacgcgacagcataa

SEQ ID NO: 300828 - DNA, 306 bp, Proteus mirabilis
atgcctaagtttactttgattcctgaaccaagatttaaagcagatgtaaaaatccctgtcgctggtaaagaaaagccagagatagtgacgtttacatttaatcacatgccaatgagcaagttggaagagttgaaagacgaaaaggttgatgacttcttcaagaaaatcatagctgattgggctatcgaagagccatataacgaagataatctcaatttattgttcgataattacccagcagcggcaggcgctataacgacagcttattatcatgagcttttgggtaatcgcgaaaaaaactcttaa

SEQ ID NO: 300829 - DNA, 1017 bp, Proteus mirabilis
atgactacaactatgcaaaatcctcttgatgattttttcacaagagttcgcaagcttgacaaaaagctagcaactggtttgaaagaatatttacctgaatggtgggataactctttggtctcttcggagggggtgagtcaacaagttatatttggtcttgcaaaaatagctaatataaatcttagtacggtagaagatcgcaactccgaattagagttcaataagtctctttgtaaatataagcatgcttctaacaaatgcgttgatgacttacaagcggcaacagcaatcgttcatggtatggctaaaattgcagctagaggaatgactaaaaagtatctaggtattgacacggctagtcatttacgtgagaaaattttaaataatggcaataaatgggtcgactttaagtctttgcttgagtattcatggtctataggtgttcctgttctttatatgccaaaacttccagtatcaaaaaaaatggatgctgtagtcgttatgttagcggaaaggccagttatcgctctgacaaaaaaacataagcatgctagtaatttgctatttagcttggctcatgagttgggtcatatacaactaggtcatttggatgaaaattcattaattattgatgaaaaaatcaatgaagatgacactgaaaatccgttagagttagaagcgaatcattatgcaatagagctattaactggtaatgggaagaatgggttttggagtgaacggcctgttagtggcgaacaactggctagagaagcgaaaagaatagggttggagaaaaatatagaccctggtcatgtggctttaaattatgcaaaagtcatgactaagcgtgggtacaaaacatcttttggcatagcaaataatgcgctaaatataatgtatccaaaggttgactggaatgaatatgtgagagaattgtttatttctaacattgatgaatatgaattatcatcagataaatttgagttactatgtaaaataaactccattgaggcttaa

SEQ ID NO: 300830 - DNA, 660 bp, Proteus mirabilis
gtgtctgtattacttgataatgatgtggttctaaaattagctcaattaggcttgcttgcagatggatgttctttgctttcacaagaatatgggcaattgattgttttagatactctttattatcaattgagcggtaacaacatgaaaaaaaagtacggtgatggaatcattgatttgattaaggctttcatcagcactggagtgttaaagatttttgataggaaaataactgattcaagacttatagaattacaaaatactcatgatgatttagatgaaggtgaaatgcgtctacttcaagggttaatcgatgatcaggaacttctattttctggtgataagaggttcattaaagaaatatcaaaaactggcattatagaagaaaaaaaattaacaaacagatttgtatgcatagagcaaataatatgttttttgattaatagaattggaatcgaattggttaatgagaaagccacttctgcgtttagtgttgctgagattgataaggctttaagaaactgtatcgggaatggaagaaatatagaacatgtttattttagtacatcgtcatatattaacgaactgccatcaaatctattatccaacgctcaacattgggtgctacatgaatatcaaagtgtaaaagaaaccatagactaa

SEQ ID NO: 300831 - DNA, 207 bp, Proteus mirabilis
atgttaatgggagaattaattaaactaacaagaagtcagcgtatattaaatggatctattattatagatgaagattatggtatttcttttatactaccttccccttatgatgaaatcgcagattatatagaacatattccattagatctaagaataagtgaaatctatgtgtctgactattctttttgggtatcgaataaaaaatag

SEQ ID NO: 300832 - DNA, 432 bp, Proteus mirabilis
atgaacctaactagttttttaaagacgggtacctatttatcattaaaagtaggtgccagtgaaaaagacgtatactctgtcttttcaaaagaagatttgggtcaaaagtattattttgataatgcaaataaacatgaagggttctcatatttttatgatgcattagaaataatgataattaattcagtagtgtactctataggatttgatttggctcgttgccctgtatttatattgaatgatttatctatatgtagtgaaacaagttttgagcttataatgaggtatcttgatgttgcagatataggttggtcttttgaaaataaatactgtaatggccgtgagttgacaatcaaaacagaggggaacgttttacttggatgtgtttacgataaaggcaattattggttatcaaaaattaaagtgttttaa

SEQ ID NO: 300833 - DNA, 480 bp, Proteus mirabilis
atggctaacattatatacatgaccctaactggggaacaacaaggattaatatctaaagggtgttcaacatatgattcaattggaaataaataccaaaaaggtcatgaggatgaaatacttgtattagctattagacattcgatatctcgagcccaaaactctcatcatcatccattcgaaatagtaaaacccatcgataaatcatcgccactgctaggtgtcgccatatctaataatgagttaatagattgcaaactagaattttttagaactagtcaaaatggcgctcaagaaaagtactacagtatatcattacaacaggccaccataaaaaatataacttatgattatcctaattcaatatctcataatgacagacaaccggaagaaatcatattgttagattatagagatatcacatggaggcatttagcggcatccacatcaggatatagtattagagaagaaagtatctactaa

SEQ ID NO: 300834 - DNA, 438 bp, Proteus mirabilis
atgtttagtataaacaatgaaataaataatataaagttttctattattgatatacacgatttctctattgatagtgaacaatactctgaatatgataaatcatttacttttaatatagaattaacccttaaaaacggtttttttaatgtttttaattgtgaattttattattttgaattaagtgattttgtcgataatattttagatattataaacaacgttagtcataaatgtttattcacagatgagagaaacataattaacatttcctttaaaaaaataaaaaactctagcgacatttcagttcactacaagttatttgaatacttcgatagtgactgctatataactggaatatttattatttctaaagaaaaactatatgacattataaatgatataaaaccttatctattagagaagaaagcatctacttag

SEQ ID NO: 300835 - DNA, 717 bp, Proteus mirabilis
atggatgatgatataaatattagaccttttgattataatgatattggtagagtctatgactttaaatcaccattagttgaaggagagtattttgctctagaattaactgacactataccatcagggtcagtacctgtcgtcgatgaagattccggaatgtgcataggctatctatatggcatatctggagtttatgatgtttatgatgcaactggtgaatatttaggtaaatatgaactacctttagtatcaccattaattgatcctttagatataattttacttgggggatggtttgttaaaaatggagcgaagctcactactttacttaaaggaggtggtacatctttagtcaaagcaggaactattaaattaacagatcatttaatttcacttttacgtggacgactaaaaataggattatcacctagaactttaaaattcacacctaaagccgcatctcacatggctgaagcagaaagatatgttccaataacaattattgaaaaagcaataagatatggtcagagagggatagacactaaaggtagatctgctttaatacttaaaagatatattatcaaaataaaaaagtatcgttactcatcaaaaataaaaaatcttaatggtaaaaatataaatgaagtaaaagaatatactttagaagttgttgttgatgaaaaaacatggaccgttactcattttatgtataaatag

SEQ ID NO: 300836 - DNA, 534 bp, Proteus mirabilis
atggagccaatcacccgcttaatcgatcgcatgttatcttttgcattacttgatcctcgaattgaggctgtggtattaacaggctcagtgggtcgtaataagaagatagacagctattctgatattgatatagagcttattggtcacggtgcgactgagctagcaaaaaaccaacattggctatcacaatttggtaaacacctcgtctctttagcaacagaatgtgaagatccgaacggcattcgctggccaatctatttgcacgtattagctcaaggccgaaaaatggatattttgatggcagagcctgaaagaattatcaatatgaaacaaaatggtctaagtccagtttatcaacgaggctatcgtgttttacttgataaaacaggtttatgtgaccaacttccagaaattagcactgtgactcccccagctctttccatagagcaagctgatgccttggctcaagagttttggtttgaagccacacaaatcgctatagctatcttacgtaatgaaattttggttcgctga

SEQ ID NO: 300837 - DNA, 294 bp, Proteus mirabilis; identical to SEQ ID NO: 295186

SEQ ID NO: 300838 - DNA, 459 bp, Proteus mirabilis; identical to SEQ ID NO: 296276

SEQ ID NO: 300839 - DNA, 1332 bp, Proteus mirabilis
atgcagcccagaaactttgatgatattcgttttacctcagtacatcgtcgagtgatgttatggggaagtggcggcccttttcttgatggttatgtattagtcattattggtgtggcgctcgaacaattaacacctatattacagcttgatacgcgatggattggtttgcttggtgcggcaacattagcagggctttttattggtacctcactttttggctatatttgtgacaaagtagggcgccgtaaaatgttcctcgttgatattgtggctattgcggtgatttctattgcgaccatgtttgtttcaacaccaatagggttgttagtgatgcgcttccttattgggattgtgattggcgctgactatcctattgcaacttcgatgatcaccgaattttccaataaaaagcaacgtgcctttgccgttggatttattgctgctatgtggtatatcggtgcgacatgtgccaatttagtgggttatcttttatatgatgtccaagatggctggcgttggatgttaggcagtgcttttattccttgcgttattattctaattggtcgctttgatctccctgaatcaccgctttggttaatacgccaagggcgtattaaagagtgtaatgaaatgatgatcaaactctttggcgagcctgtggtctttgaagcagaagatgctaaaacgacccgttttatcgaattatttaataaacgccacttctcatttgtgctctttgttgccgtaatttggacctgccaagtgatcccgatgtttgccatttatacctttggccctcaaattgtcggtttattaggatgggatacaggaagaagtgcggcattaggcaatgtcgtgatcagtctattttttatgttgggttgtattcctgcgatgttttggttaaaccaaacggggcgacgcccactgttaattggtagttttgcgatgatgactttagcattattcacgctggcgatattcccgaatttaccgattttattcgttatcttagcgtttgctacctacgcttttttctcgggaggacctggaattttacagtggctttatccgaatgaattatttccaaccgatatccgagcatcggcggtgggggttattatgtcgataagccgtattgggacggttatttccacctgtgcgcttcccgcttttattgccacttatgggatcaataccacaatgctggtgggggcggctatttctctgtttgggatgatggtatcagtactgtttgcaccagaaacgaagggattaacgttaaagcagacatcaacaatgcctatgcgacgtggtaaaaaatctctttaa

SEQ ID NO: 300840 - DNA, 429 bp, Proteus mirabilis
atgtcaaaagagataagcgaattacagtttagtcttcactatgcctcagaaacagacagtgaaaagaatacctccgccattttaacggcgaatatccatacgactgatggtgaaactcaacaactgacacaattaatttgcacgacatcttccgcaggtaaaaaacaatatcgaatcggcttgcaaaaaattagtgatgctggtgctccattgctggtggcgattgaatcctattggcgtaaaaacacacaagagagttgtgtttatttgttagagaaagcgaagcgatttattcaaggacacttacaacaaacgaatacatggatatctatgtatggtcttgtgattgtttctaatgcgtcacttgaagagcagttgcctgaggctttattaacattaattcattcaaaatatgctagtctttcttga

SEQ ID NO: 300841 - DNA, 522 bp, Proteus mirabilis; identical to SEQ ID NO: 297230

SEQ ID NO: 300842 - DNA, 183 bp, Proteus mirabilis
atgaatattgataaatacaaactttgtttatctcaatcgcaagctggaattgcacattatctcaaggatgagaacggatggcgcgaagcaaacgaaacattaaaaaaggcatacggagtacaacatgaacgcaaagcagaaacacgcaaaacatcagatattcgcactattgcgagagtctaa

SEQ ID NO: 300843 - DNA, 177 bp, Proteus mirabilis
atgaacgcaaagcagaaacacgcaaaacatcagatattcgcactattgcgagagtctaaaatgacaaatgagcaaatcgacgacttagtttttcaatggaaaatgaaagtatcgatggagcgtacaaacctcattcagcatgaaataaacacacgcaaggagcgcgcgtttatctaa

SEQ ID NO: 300844 - DNA, 255 bp, Proteus mirabilis
atgttaacgaatacatacggactcagaaacgactggtacgaacgccaaatggaacgagaagcgtttgttaattctcaggaagataaaatatcagttgatgaggttatggatagcctgcccgaagaactgttatgtatggatttagcaaggaagttaaatcctgtatttgaaattagtccccaagcactggatgcggttttagccggaattagaacagctattcagatcgggatagataaagaggttttaggatga

SEQ ID NO: 300845 - DNA, 819 bp, Proteus mirabilis
atgaagcccggtatctattacgacatttcaaatgaggactatcaccatggattagggatcagtaaatctcagttggatttaataagcaaaatgccagccgaatatatttggagcaaggaagctcctgttgatgaagaaaaaataaaggcattggatttcgggactgctatccattgtcttttgttagaaccagatgaatacagtaagcgatacaagataggccctgatgtaaatcgtagaacaaacgcagggaagcaagaggaaaaggaatttctcgaaatgtgtgaaaaggaaggtatcacacctattactcatggcgataacaggaagttaatgctcatgagagatagtgcaatggcgcaccctatcgcaagatggtgcttagaagctaacggagtagctgaaagtagcatttattggaatgatgaagatacggatattctttgtcgttgcaggccagataaactcattcaagagcaccactggattattgatgtaaaaagctctgccgatattcagcgattcgatcgctccatgtacgaatatcgttaccacgtacaggactctttttattcagatggatataaatcattaacaggcgaagctcctgtctttgtctttcttgttgtaagcacgactatcgactgcggtagataccccgttagagttttcaatttagaccaacaagcaaaagatattggtcgaacaacctacaaacaaaatttaagaacgtatgcagaatgcctaaaaacggacgaatgggcaggcatacgcacattatcactgccctactgggctaaggaattaagggatgagtaa

SEQ ID NO: 300846 - DNA, 807 bp, Proteus mirabilis
atgagtaacccaccattagctcaagctgacttgcaaaaaacacaaggtacaaaggtaaaagaaaaaaccaaagatcagttgttggttgagtgtatcaataaaccaagtatgaaagctcagctagcagccgcacttcctcgtcatatgacgccggatagaatgatccgaatagtgtcaacggaaatcagaaaaacaccagaattagccaactgtgatatgcaaagttttatcggagctgttgtgcagtgttcacaattgggattggagccgggtaacgcacttggtcatgcatacctgctcccgtttggaaatggaaaatccaagtcaggacaatcaaatgtgcagttaattattggttatcgagggatgattgatctagctcgtcgttcaggccagatagtaagcatttcagccagaacagtgaggcagggcgatagcttccattttgagtatggattgaatgaaaacttaacgcacataccgggtgaaaatgaagactcgcccattacacacgtttacgctgtcgcaaggttgaaagatggcggtgtccagtttgaagttatgacgcataaccaaattgagaaagtcagagcattaagcaaggccagtcaaaatggaccttgggtttctcactgggaagaaatggcgaagaaaaccgttatccgtcgcttgtttaaatacctacccgtctctatcgaaatgcaaaaagcggtcattttagacgaaaaggcagaggctaatgtcgatcaggaaaacgcctcagtatttgaaggtgagtttgaggaggtaggtactgatggcaattaa

SEQ ID NO: 300847 - DNA, 429 bp, Proteus mirabilis
atggcaattaacacaataacagtaagtggaaacttaggcaaagattgcgaacagcgatggacgccaaatggtaaagcggttgcatcttttagcttgccagtgaaacaaggttacggagaacacgaaaaagtatcttgggttatctgcaagatgtttggttctaaagctgaaaagctacctccgcacctaaccaaaggaataaaggttatggtaactggtgagttcgtcatggaagaatggacaagccagaacggtgagaaaaaatcagcgccagtaattatcgttgatcaattagattttggcggtaacagtggcaatcaggcaggaagccagaagtcacagtctcaaggatggggacaaccacagcaaccgcaagcacagagtagtcagccaccaatggatttcgatgactctgatatcccgttttga

SEQ ID NO: 300848 - DNA, 132 bp, Proteus mirabilis
atggaaaatgaaaatattgataaatatatttctattaactcaattactccagccgatttaaaattaaaacttagcattcctataaaaaaagttgctgaaattattgataaggatgctgatgatataaaataa

SEQ ID NO: 300849 - DNA, 273 bp, Proteus mirabilis
atgagtaagaaaaaatcacctattcctggagtgaaaccctataatggacccgcaggaggatggggggcattaaaagcaacagctatcgcggtacgcactcaaatggatgcttttattgcacctaaaacattgcttaatactaatcagcctgatggttttgattgccccggctgtgcatggccagacaaagagcatcattctactttccaattttgtgaaaatggagctaaagcggtcacatgggaagcaacaaaaaaaaagagtcacacctga

SEQ ID NO: 300850 - DNA, 1458 bp, Proteus mirabilis
atgctaacactttctaccatcgatatgcttttagcgataaacgaagggcagcttatagaagaagtgattatcactttattagcttctcctcaattagctgttttttttgaaaaacacccaagattaaaaaaagcattactaaaagacatttatcaatggaaaaaaagcttacaagaaaaagtgaaagaaacactggtgccgaccatcatcgcagatgaatttgcactttatcagcaaacgcaatcattatgtaatgctgtttttaatcagcaagtggacaatattcttacagaactaaatcagcttgattcttcatttgttatagaagcaacacaactaataaaaacaaataaacctttttctccagctcaacaagctctatttattcaacgctggcgcattagtttaatatttcaagtcacgacattacataaagcactgtttgaacaagagcaagagcagttacttgcagaactacaagaacgcttagcattaagtggcagtttaagtaatacattttctgaaaatgaacgggctgcaggccgtttatgggatatgagcaaaggcgttattaccaaaaccccctatgatgagaaaattattcaacgttatagtgattttctaaatcaacaacctgaattacataaattggccagcttactggggcgaagtaaaacggcgaaatcgcttcctgaagagagtgtgatttttgaatcaataacaattgttgaaaaagcaccggataccacgccagaacaagtaaatggtataggcttaagtgatgatattttacgtttattacctgctgaactagctttattaggcataaatgaagttgagtatgagttttatcgtaaactcattgaaaaacagctcaatacttatcgtttacagggtgatagttggcaggaacgcacagtattacgcccagtcactcatcaccttgatgaagaacggccaagaggcccttttatcatttgtatcgacacttctggctctatggggggatttaatgagcaatgtgctaaagcctttggtttagcactaatgaaaatagcactagaggataaccgtgcctgtcatgtcatgctgttttcaacagaaatgatccattaccaattatcttcttctgatggattacaagaacttgttaaatttttgaatcaaacatttagaggtggaactgatttagcatcttgtttaaatgaggtagcagataagcttaatacccccacatggaaagacgctgatgctgttgttatttctgactttgttgcccaaaggttacccgaaaacctaatcaataaaatcaaaaaagtccaacagcaacagcataatcgcttccatgcggttaccctatccaattatggtaaacccagtattatgaaaattttcgaccacatatggcgttttgatactgggttaaaaagtcgattactacgacgttggcgtcaataa

SEQ ID NO: 300851 - DNA, 1647 bp, Proteus mirabilis
atgtttaggtttcgtaaattaaagatatccaccagtctctatttattactgatgatgttttgtgtgatgcaagttatttccagtgggatctcactgggaattattcatttaaacaacaatcagatcactagaattgatttagatactgctaagcgagatgaattaggattaagttgggtatctttagtacaagcacgtaatgcaataaatcgcgttgcgataggaatgaaaactgaacagtcaacagattatatccaatctattgaatcaatcgcattatcacgtttggaaacagcaaatactcattttcaaaatttccttacagatattaatcaagaggttattccacaagaagaaaaagagatttttaataccgtaaaaaatgattatcacgttctttatagtgcactagttgaattacatggcatgttaaaaaaaggcgattttcaagggtttttagatcaacctacggaacgctatcaaactgcgatggaaaattcatttaatacctatatgaattacgttcaatatgaagtggctgattcgattgaacaaggacatcatttttataccatcgctattttaatgtttattggcgcaatcaccatggtaattgtggtgtcaatcgcctctcatcgctggttaagttttaatattattaaacctttcgcaagtttaagccgttactttaatgatgtcgcaacaggcaaattaaatcgtgaaattctggtttttaccgatgacgaaataggtgacatttttagacggttacgtgagatgcgtggtgagttggcgcgctctattcgtattgttcgtgataacagtcaggcgatgtattcgggtattcaagaaatttccaaaggtaataccgatttatcctcgcgcacagaacaacaagctgcttctttggaagagacggctgcgagtatggagcaattaacggcgacagttaaacaaaatgcggataacgcgttacaagcgagtaagttggcggaatctgcatctgaaactgcactacgaggcggtgaaattactcacagtgtggttgaaatgatggatgctattactcaaagttctcaaaagataggcgccattattagtgtcattgatggtattgcttttcaaaccaatatcttagcgcttaatgctgcggtagaagcggcgcgagcgggtgaacaaggacgcggtttctcagttgttgcaggagaggtgcgtaatcttgctcagcgtagtgctgaagcggctaaagaaattaaaacacttattgacgagtctgtgtctcgagtctctcagggatctcgattagtaaatgatgcggggcaaacgatggaggagcttgtcacatctgtaaataaagtcactgagttaatggccgaaattgcctcggcttcagacgaacaaagtagaggtattcaccaagttgctgatgctgttagtcagatggatcaggtgacacaacaaaacgctgctttggtggagcaatcagcatctgctgccacagcattagaagatcaggctaacaaccttgttaatgctgtatcggcattcgaattgcctgacacggatgaagacggatcttctcactccttagaaggtaatgggttgaagaaagcagataaaaaatcattttttaaaaagacccattaa

SEQ ID NO: 300852 - DNA, 1053 bp, Proteus mirabilis
atgaataaaataacggtactctgtgttgatgattcggcgttaatgcgccagatcatgcgagaaataattaatagtcaccatgatatggaggtcgttgattgtgcgccagatccgatagtcgctcgtgacttaataaaaaagtttaatccacaggtattgacgttagatgttgaaatgccacgcatggatggtattgattttttggaaaaattaatgcgcttacgccctatgccagtggtgatggtttcatcactcacagccaaaggttcagaagtgacattaaaagcattagaactgggggcagttgattttgtcactaaacctcagttaggtctacgtgaaggaatgttggcctacagtgaacttattgcagaaaaaatccgagcagcggctcaggcaagaattagtcgtcatgaaacgaaaacattaccgtctaagtcgttatcatttactcccatgatttcgagtgaaaagttaatcgctgttggtgcttcaacagggggcacggaggccattcgtcattttttagagccattacctattaccagccctgcagtattaataacccaacatatgccggcgggttttacccactcatttgcagagcggttaaaccgtttatgccaaatcagtgtgaaagaagctgaagatggagaacgggttttacctggacacgcctacatcgcaccgggtgattatcatatggagcttcgtcgtaatggtgctaattaccagatccatataaataaagatcctgcggtaaatcggcatcgaccttctgttgatgtgctatttaattcggttgctaaatatgcgggacgtaatgctattggtgtcattttaacagggatgggcagtgatggtgctacaggtttattagcaatgcgtcgtgcaggtagctacacatttgcacaagatgaagcaagttgcgtcgtctttgggatgcctcgttccgcggtcgaattgggagccgtagatgaggtaaaaagtataagctcaatgagtaaagccgtgctgatgaaaatcagcacaacacaatcattgcgtatctga

SEQ ID NO: 300853 - DNA, 363 bp, Proteus mirabilis
atggatattcgcgatctcaaactcttcttacatcttgctgaaagttgccatttcaccaagactgcgcaagccatgcatgtcagtccatccacgctttcacgtcagatccagcgtcttgaagaacaactagggcatccactttttttgcgtgataaccgccaagtcacactgactgatgcaggggaacaacttaaacgttatgctcaacacaccttattgcaatataagcaactcaaacatacgctaaaccagaacagtcccagcttgtctggagagctacgtctattttgttcagtcactgcagcttatagtcaccttccgccgatccttgaccgttttcgtgcggaaaatcccttagtctag

SEQ ID NO: 300854 - DNA, 1638 bp, Proteus mirabilis
atgaaaacgaattatatttttgtgaccggcggggtcgtatcctctctgggtaaaggcattgccgcagcctctttagcggctatactagaagcccgtggactcaatgtcaccatgatgaagttagatccgtatattaacgtcgatccaggtacgatgagcccaattcaacacggagaagtcttcgtcactgacgatggagctgaaactgatcttgacttaggccattacgagcgctttattcgcacgaaaatgacgcgtcgtaataactttacgaccggccgtgtatactcagaagtgctacgcaaagagcgtcgtggtgactatcttggtgctactatccaagttattcctcatatcactaatgaaatcaaagaacgcatcatccgtggcggtgaaggtcatgatgtcgtgttagttgaagttggtggtactgtcggtgatatcgaatcacttcctttcttagaagctatccgtcaaatggcggcggaagtagggcgtgagcatactttctatctgcacttaacattagtgccttatttagcggcttcgggtgaagtaaaaaccaaaccaacgcaacactctgtaaaagagttactctcgattggtattcaaccagatgcattaatttgtcgctcagatcgcgttattccagctaatgaacgcgccaaaattgcactgttttgtaatgttcccgagaaagcggttatctcattaaaagatgtcgattccatttataaaatccctgcactcttgaaatcgcaaggattagatgattatatctgtaaacgattcagcttagattgcccagtggcaaatctgtctgaatgggaacaggttatctacgaagaagccaaccctgaaggcgaagttaccattggtatggttggtaaatatgttgaattaccagatgcctataaatcagtgattgaagcattaaaacatggtggtttcaaaagccgtgttgcggtaaatatcaaattaattgattctcaagatgtggaaactcgtggtgtagaaatcctaaaagggttagacgcaatcttagttccaggtggttttggtgaacgtggtgttgagggcaaaattatggctgctcgatatgcacgtgaaaataaaatcccttatttaggcatctgtttaggtatgcaggtggctatgattgaatttgcacgcaatgttgccaatatggaagatgctaactccacagagtttgcacctgattgtaaatacccagttattgcgcttattactgaatggcgtgatgagaatggcaatcttgaagtgcgtacagaaaatagtgacttaggtggaacaatgcgccttggtgcacaaccttgtcatttaagtggcgatagtttagtgcgtactctgtatggtaaaaataccattacagagcgtcatcgtcatcgttatgaagtgaataatctactgttaaaacgtatcgaagatgcgggtttacgtattgcaggtcgttcagttgataacaagctggtggaaattattgaaaatccaaatcatccttggtttgttgcttgtcaattccaccctgagtttacctcaacgccacgtgacggccatccgttatttgctggctttgtgaaagcagcctttgactaccaaaaaggcttgctaaaatag

SEQ ID NO: 300855 - DNA, 1302 bp, Proteus mirabilis
atgtccaaaatcgttaaagtacttggtcgtgaaattatcgattctcgtggcaacccaacagttgaagctgaagttcacttagaaggtggttttgttggtatggcggcggctccatcaggcgcatcaacaggttctcgtgaagctttagaattacgtgatggcgataagtcacgtttcttaggtaaaggtgttctgaaagcggttgaagctgttaatggaccaatcgctaaagctcttttgggtcaagatgctaaagaccaagctaatatcgataaaatcatgatcgatttagatggtactgaaaacaaatcaaactttggtgcaaacgcaatcctagctgtttctttagcaaacgcaaaagcagctgctgcagcgaaaggtatgcctttgtatgagcatatttctgatctgaacggtactcacggtcaatactcaatgcctttaccaatgatgaatatcatcaatggtggtgagcatgctgataacaacgttgatatccaagagtttatgatccaacctgttggcgcgcctactctgaaagaagcggttcgtatgggttctgaaatcttccatcacttagcaaaagtgctgaaagcaaaaggcatgaacaccgcggtaggtgatgaaggtggttatgcgccaaacttagaatctaatgcggctgcattagtggctatcaaagaagcagtagaagctgcgggttatgttttaggtaaagatgtaactctggctatggactgtgctgcatctgaattctataacaatgagactggtaactacgaactgaaaggcgaaggtaaaactttcacttcacaagaattcactcattacttagaagagctgactaaacagtatccaatcgtttctatcgaagatggcttaaacgaatctgactgggatggtttcgcataccaaactaaagtacttggtgacaaaatccaactggttggtgacgacctgtttgtaactaatactaagatcctaaaagaaggtatcgataaaggtattgctaactctatcctgatcaaattcaaccaaatcggttcactgacagaaacgttagctgctatcaaaatggcgaaagacgcaggttatactgctatcatctctcaccgctctggtgaaacagaagatgcaactatcgctgatttagcagtaggtacagcagcaggtcaaatcaaaacaggttctatgagccgttctgaccgtgttgctaaatataaccagctgatccgtatcgaagaagcattaggtagcaaagcacctttcaatggtctgaaagaagttaaaggccaagcataa

SEQ ID NO: 300856 - DNA, 1383 bp, Proteus mirabilis
atggatgcgtccaatttagccccatcggcgaaatcaagcccgataaacaaacgagggttaattattttagcaatcgacgttgtactactgctgttattgctagaatttttaccctacgatccaaaagctaatgcaggtttagcgttaatggtgtttgtgggtgtgttatggctgacagaagctattcacgtaactattacagcgttgtttattccaatccttgcggtagtgctcgggttaatgaacaccaatgaatcgctaaaatcttttgctaatccgattattttcttattcttcggaggatttgcattagcaacagcgcttcatattcaaggattagatcgcttaatcgctaaccgcttattgatgattgctaaaggcaagctctccattgctgtcttgttactttttggggtaacggcattactctcaatgtggatcagtaacacggcaactgcggcaatgatgttaccgttagtgttaggcattttatctaacttagatattcgttcagaacgtaatactttcgtcttcgtactattaggtgttgcttatagtgccagtatcggtggtttaggtacgttggtgggtagcccgccaaatgcaattgctgctgctcaactaaatttagattttattacttggatgaagtacggtgttccaatcatgttagtgctattgcctatcatgtttattgtgatgtatctgatgctacgtcctaacctaaaacataagtttgatctgaaattagaagtgttagagtggaataacaaacgtgttattaccatgattatcttcttagtaacggtattttgctggatctttagctcctttatcagtagcgctttcggtggtgtgaaagatttagataccgtcattgcagtcagtgccgctattgttattggggtgacgggtgtcgcaagttggagccaaattcaggaaaatacagagtggggcgtattaatgctgtttggtggtggtttaacactgagcgcaattttacaatcttctggtgcaagtttggttatggctgattttatgaaagatacttttggtaacagccattggtttgtcattattcttgccgtaacaacctttattattgttttaactgaattcaccagtaataccgccagcgctgcgttacttgttcctatctttgcaacggtggcacaagctttaggtatgcctgttatggcgttaacgatgattattggtatcggtgcatcatgtgcctttatgttaccagtggcaacgccacccaatgctattgtatttggctccggatatattaaacagacagagatggtacgtgtaggtggggtacttaaccttgtgtgtatcttagttatctctctctttgcttggttcttctggttataa

SEQ ID NO: 300857 - DNA, 1365 bp, Proteus mirabilis
atgaatattttagctttaaaagaattgcttcgctctgaagtaggaaacttgaaaggttattgtactcaccagaagctacctgacttttgtcgccaattaggattaccgatacctgaggatagtggagataagcgtgaacgattacattctgctttcgactcacttgatgatgcagctctaccgagatttgcagaaaatttattaacacaacaaattttaaattcaggagttcgtaaccaaatccaagatttgttgtgggaggatgaactaaatattgaaatctctaagagacatcgtcgagaattggcgctagctttacaaccattaaaactcttttacaactgggaaaattttaagcaactaattaacgatatctttactattcctgctgatttaagttcaatgttcttaatgcctgaaacaggtattttggctgaaattgaacgacgttttgttaaatatccagaacattctgatgtagaatggttatttgataaattgggtgtcgttgaactatcccatccacgtttccgccgatggctagaagggttagtatctgcggatgtgcaaattgatcttgaaacacaattagctactgttacagctattaacagtgttttgagaacatgtggagctgaactaagtcatacctcaaatgcagagggttatcctgtttttagcttgatatccttgcgggtatcatgtgtacgtcccaagaatattatttttgcctcccttgctaagcctgatattcgtttgagtaattctctcgataatgaaattgaaattctttcagacccagatgaggtattaatctatgatagaccattaggttctgagggattaagttggcgagatctgcaaatatggtgggctgatttaactaatgaaaaggacggcgaacaggcaaaaaaaacgctttaccgtcgattactacaaagtttacctgaaacatcaccaccacaaaaaatattttttagagaatttttccaccaatttggccaattagtttatgacctaccagtgttactacctgaggtttggttacattgggatcccaaaactgtttacgaacgaggagctcaagcattgcttaatcatcgtatggattttcttatgctatttcctaatggtggtagggttgtgatagaaatcgatgggattcagcattatgcggatgatatgcatatagcaagtagaagtagatatgctgatttggtcgcaggtgatcgtagtttaaaattagctggttatgatgtgtatcgtttcgcgggcattgagcttcagaggaaagatgcttcctataaagtaaaaaatttctttgatgctttatttaaacgctatggaatcaaaatcaattgttaa

SEQ ID NO: 300858 - DNA, 1674 bp, Proteus mirabilis
atgacgatagaatggcaaccttctgaaggtattacaccgacacaggagttaatggatattatcctgtgtgatcaatccatttctgtacttgccggtgcaggagcgggtaaaactgaacttttagctcaaaaatcaaattacttgctgcagaccggaaagtgtatgtggcctaaacgcatattatgtctttcttataaaaaagaggctcaggaaaatattaaagagcgagttaacaaaagatgtgggcaaagaggtgagcgttttgattcgtatactttcgatgctttttgtaagagtattgttgaccgttttaaggatgttttatctgagagtagaagacctttaaataattatgacttagtgttcaatgaaaaatacagtaatggtaagaataagttatcttttaatttaatcagaaatctggctatagagattttaaaatatagagcggatattgttgacctattttcttttacctatccgtatgtttttattgatgagtttcaagatacgtgttctgatcagtatgagttaattaaaattctttttaaggatagaggaacaaaattgctagctgtgggtgatataaaccagagcatcatgttatgggctggcgctaaaaaaacagtatttgaagagtatgaaagagaatttaaaaccacaagaaaattactggtgcaaaattttagggctagtgatgaaattcaggaagtattgagatgctttattcactttgtacaaaatgatgccaattttgcgccaataactaagaatgtcaataattgcactatccattgttatgatgatgagattgctgaggctgatagtattgctgataaaatagaaacttttatcgcttccggcattaaagaaaaagagatttgtgtgctgaccaaacagcagtcagaacaatatacgaaaaagctccgagataagttaacgatgaaagggattagaaatcttgatatgtctgaattacaagatgccttaaaagaaccattagggcgaatatttgctgctctattcaaggtttatacgtcacgttcatcatcaagctatactgagctatgtgatttatacctttctttacataaggttacccgtgatgatgaaaaagaagactcgttgattaaaaagctgtcagataaaatagcggcaaatagagaaatattgggtgactcgccctcccctgagttattgatatcttgtatcaacaatattataaatttttttggtttgcaaaaaatgagggggcgatggaatcaatataaatccaatgactactgggatcaggtctggctccgtcttgaacgacacttgcgctacacaataggcacaacgcattctcttaaagaagctgcgctgatgttccaggcagaaaactccatacaaattatgaatgtacataaatgtaaagggctagaatataaggtggttatttttctcggcttagaggatcaagctttttggaactataataaagaaaaatttgaaaatgattgcgttttctatgttgcgttatctagagcgaaagagaaaatattagtcacgacagcgaaacatagagaacatagaataaataatcgatatgacaatagaaaatctaactatcagatggttatgccaacgtattcatttttgataactcattgcaagttcaaattgataaagtaa

SEQ ID NO: 300859 - DNA, 2025 bp, Proteus mirabilis
atgcaacttaagaaaattttcatctccggttttaaaagcatttcgaatcaaaatcctcaaaccatttatcttgacagtgaactgactacatttattggccataacggtactggaaaaagtacggctatggaagcactaaataaactgttctcggtagatcattcactacgtggtatatcaataaatgatttccataatgcgaatgatgagaaagatgaaaagagcaaaagtttaacaatagaagcttggtttagcttccctaagccagatggaagcaaggtttctatccctcctttaattgagcacctaaccattgataaatctgatggaaccattctttttagggtacgattagagagtaaactttcctttgaaacaaaccctatgggagatattgacgaagacgtctgggtggttaacaccagtgatgatgtgcttgaggagagcagtaaacagaagctttccgctgcagtaagaaatgccattcaggtcagttatgttccagccaatcgagatcctttattacaattaaagtattcatcgaaggcggtgcttggtcgcttgctaaaggcgattgagtgggttgaaggtagtcaggaagtcatagaggagcaagcggctcaactaaatacattgacgaagagcaatcctgcaatgaatgagattgcgacggcaattaacgacagttgggggaatatctacaaggggcgttatttgtcccaagcatcgcttagttttccacttgctaatatcgatgaaatactgaagctgattcagcttcagtttaatccggatgaaagtggcaacacggtaaatgtagaccgattaagcgatggacaaaaatcattggtctatttttctcttatcaaggcgatgtttgatattgataagaagactagggagctgatttcctcaggagaagtttctaattttaatcctgaaaagatgaggttgccgatttttagtatgatatccttggaagaacctgaaaaccatctttctcctcattacttaggcagaataattaaattggtgaaagattacggttgtaatgaattgtgtcaggttattatttcttcccattcttcttccattttaagccgaatcgagcctgagcaaatacgccatttcagactagatagggattcaaaaagcacggtagtgagtgcgttaattctgccggaaaaagaagatgagctttctaagtttattaaagaagctgtaaaagcgtatccagagatctatttttctaaactggttatatttggtgagggagatagtgaggaaattataatacctaaggtgcttgagctacactcaacggaaattgacagtcattccatatctattgttcctcttggcggacgccatgtgaatcatttttggcgtctgttgaggtctttacaggtcccatttattactttgctggattttgatattgataggaatggtggtggttttggacgacttaaatatgctattgaacaattagctgagtttgatggaagtggtagcacctatatccataaagatattgctgagcatatgccatcatggaatgacaaacagaacccaataaagttcacacttaaatacaaagatggtgcgacaataaatattgttgatgaattagaaaagtgcaatgtttatttttcttccccgctagatattgactatgcaatgattgaagctttccctgatgttttttgtgagaaagatgaagtttatggtgaaagaggtccgcaaagtaccaagaaaaaagaagatgaagatgagctaataaaagcagtattgaaaaaaggaaactctggcattcgttatgaattttcagctgatcatctaaaatattttctgtggtatcgctatcgttttttatccaataaaagtaaacctgcatcacatattagaatgttttctaaaattgaagaaaagtatacgtcagaagaaataaaagcaaaattgcctccagagctcattaggattgctgaaaaaacagtaacattattggcggaggttattgaatga

SEQ ID NO: 300860 - DNA, 150 bp, Proteus mirabilis
gtgaaaaaagcccgttttactgaaactcaaatcgttaatattttaaaactcgctgattctggtatgaaagtggaagatatttgtcgccaaaatgggatcagcaatgccacttattatatctatggactacctccgttttgcaagtactga

SEQ ID NO: 300861 - DNA, 2523 bp, Proteus mirabilis
atgatgaatagtatgatatttgaactcaatcagttaaggcaagtcgtattattgacaatgagtattagtgtgttttctgcttatgctacagaattcaatatcgatgtgttagatgcagaagatatacaaaatatcgatatgagccaattttccattgctggctatgttccccctggtgattatgtattaacagtttttgttaatggacaacgtttaggtgcacctcgcgatatcacggttctagagcaaaaaacgcaaacacaagctatctgtatacctgctgacttacttgattctattggtttaaaagagtctgtaaaaccaaaagtgactgtataccctaatagtcaatgccttgatctttctgttttgaaaggaatgcaaacagttattgatctcccaacactatcactcaaaataacgatcccccaattatggatggaatatagagatccttattggactcctcctgcattatgggaagaaggaattaatggtgctttccttgattacagcgctaatgtttcaatcaccgaagaaaaagagggggataaacgtacttatttgtccactaatggtactgcgggtattaatttaggtgtttggcgctttcgtggtgattatagtgccatctatcaaaaaaagcggggtggcagacaatcacaagaaatacacgattttgattttagccgtctttatggttttacctccttgaaaaaattggcttcaattttaactattggagaaaattatttttactcagatgtttttgaatcatggcaatacagcggtatttcattagaaagtgatgatcgcatgctacctcccaaattagtggggtatgcaccagagatcacaggtgtagcagataccaatgcaacagtgattgttcgtagccaaaatcgagtgctccttgaaacaacagtaccccctggaccatttcgtattcaaactttagatagtggtgttcgagggatactcgatatcacaatccgtgaagaaaatggagaagagaaaaaatttagtatcagtactgcctcattaccttatttaactcgccctggccgtctgatctataaattagtgatgggtaaaactcgttatgatggacatcatttaacaggtaaacccgtattcagtggtgaattctcctatggtctatctaatgcttggtcgttatatgggggaacacaatttaacagcgattatcaggcaacggcgattggtataggacgggatctattttcttttggggcattatcacttgatattactcagtcttttgcacgttttactgataaaaaaataaaagggcgttcttatcgtcttaattatgcaaaatcttttgatgcactacgcacggatattacttttgctgggtatcgatttgctgctagagattatcgcacattaactcagtttatggatcaacgtcgtactggttatgatattcgctctccaaaagagaactatcaaatttatataaacaagtattttgataattttaatatatcactaaattatcaatatagtacctattggcaagataaacctcaaacacaatatggtttatacgcaagtactaatatcagtattccaatgttatctcagcaaaatgcgaatatatctttatcagcaaccagaactgaacgagatagtggttatcaagatgatgctattaatctgtatttaacaataccattatataaaggccatagcatttcattttctgaatcatattctcgtattggtaaaagtaatcaatatagccatagagcaagttatagtggttatagtgatcgcgataattatagtctgaatgtgggctatagtcatggagaagaaattgatagccaatcaagtatcagtggttattattctcgcgacttttctcaagctaacttatctgctaacgcaagttatgtaccacaacaatatcgtagtgttggtgcatcaattaacagtggtattacagctacaactcaaggtattgcgttgcatcgttcagctaatggtgatactcgtttaatgattgaaacaccaggggttggtgatgtacctctagatagtggcgttatcaaaactaattactttggacttgcagttattcctaatgttaatagttatcgtaaatctacggtttctattaataccagtcagctacctgaaaatatagaaacgctagaatcaacaactgatattaccttgactaaaggggcgatagggtatcgcagtttatcagtaatgaaaggggaaaagttgtttgccattatatccctaaatgatggtaagaaaccgccttttggggcaagtgtacgtaatgcggataatcgtgagttgggtattgttggtgaagatggtgtgacatggctagtaggcatttcatcaaaagaaaaactatctgtttattgggcagggaaaaaacaatgtgagttgtcacttcctgaagatttagcatcgccaactagcatgttattgctaccttgctcttcacctactatatcaaaaattacagaaaattaa

SEQ ID NO: 300862 - DNA, 969 bp, Proteus mirabilis
atgacagatactaataaaaaaaagttaacaatcaatgatatagccaaactttgtggtgtgggcaaatcgactgtttcaagagtacttaatcaagatcctatggttaatgaagaaacaaggaaaaaagttaactcaattattgagaaatataaattcacaccgtcaaaatctgcacgagcaatgcgggggtactctaatcgttcttttggtattatcgtcactcgccttgattcttatgcggaaaatcaagcggttagtgccatattaccgatcctttatcaaaacaacattgaccctattattttagaaagccaatttagccaagccaaagtagaagaaaacttaaaaatgctcgcccaccagaaaatcgatggcgtaatattatttgcattttcagggatcaatgcggctaacttagcaagttggaaacaaaaaatggttgttatagcaagaccactagaaggttttgtttccatttgtcatgacgatgaacgagctgttaacgctttaatgcattatttccatcgagacaaacattatcaacatataagttttatcgggatccaaattaatgatgaaacaacgggtttattacgttatcaaacttatcttcaatattgccagcaacatcaattaatatctcaagctcaacttggtgaacttaattatcaaagtggctatttacttgccaaacaagcattagcaagcaagcctcaagctattttatgtgcgaccgactctctggcctttggtgtacaaaaatatttagccgaacagaaaatagatcatattgaggtggcctgcatcggtcgtaatgatctactcacctttttatttcctcaaactaaattctatcgattaggttttagagaaagtggacaagaagctgctaacatattgatacaaatgctagaaaaaaatattcctgcacaaaaaatcattatatcaagtcatgacttaaacccatga

SEQ ID NO: 300863 - DNA, 354 bp, Proteus mirabilis
atgattatcgcttattcaacagcccctaatgaaactgtcgcccatgaaatagctcaccatcttatacaggcgaagcttgcagcttgtattaacgtccttcctaatatcaaatctatctatcattggaataatgaaattgttgaagataatgaggtacttatgatgatcaaaagcgagagttcaaaacaacagattttgattgatacactagtaaaaatgcacccttacgatacaccagaagtcattattgtccctatagaaaatgggtttcatggttatctagaatggatacatcaaagcctaaattctgtctcttatacacatctgacgctgccgacgatactccttgtgtag

SEQ ID NO: 300864 - DNA, 390 bp, Proteus mirabilis
atgttaaaattaaataaaattcatcatgtggcgattatttgttctgattataagatcagcaaacatttttattgtcaaatactggggcttaccctattaaatgaaaaataccgtgaagaaatacaatcttggaaagcagagcttgcgttaggtacagtctaccaaattgaattatttagcttcccagatgcgccagcacgcttaagttacccagaagctcgtggtctacgccatgtggcatttgcagtggacgatcttgatgcttcagttgcttatttacaacaaaacaatattcaatgcgagccaatacgtctagatcctagtagccaaaaacgttttaccttttttcaagatcccgatggcttacctttagagctttattcaatatag

SEQ ID NO: 300865 - DNA, 303 bp, Proteus mirabilis
atgataaaggttgtagcagaagattttattaaatcaggatcaatagaaacggtcttaccactttaccaagaattggtgaaagctagccaacaagaagcgctttgcattagctatgatttatttgttgatgagaaagatcccggtcactttatttttattgaatcatggccaaataaagaagcactagatattcattgtaatagtgaacattttcgtcgcatcattccgatgattagacaatatacaaaagcagagtcaaaaatcactttagtcaatagtgtatttgataaaaatatagattaa

SEQ ID NO: 300866 - DNA, 714 bp, Proteus mirabilis
atgaataatcaatcaaaaaaatatgacagaacatatcactatcctttttcaccaggcacaacaagcgatgatcgtattaatgccaattggtggcaagatatctgcaaaataaagcatcttattcatactgaaaaattagatggtgaaaataattgcttaaatcgaatgggggtttttgctcgctctcatgcgactccgacacaatctgcatggacagtacaactacgccagcgttggcaatccatcagaaatgatttaggtaatttagatatttttggtgaaaatctttatgccattcattctattgaataccaacatttggaagagtatttctatgtttttgccatacgttgtcaggataaatggctaagttgggaagaagtgcaattttatgccactttatttgatttacccaccgtaccggaaatctcgctaccaaaatcggaaaataaaatagagtttgaaaagaatattattttacacgcacaaaagcatagctcttttcaatcacgagatgtgttaaccaagaaaccaagtgcgatggaaggcattgtcacacgagatgctcaagcattttcattagatgaattttcacatcgggtgtttaaatatgtgagaaaagatcatgttaaaacagatgtgcattggaaacgtaattggaaaagagcgccactaatttgggaaaaaacacaggagtctcatgatgcttcataa

SEQ ID NO: 300867 - DNA, 144 bp, Proteus mirabilis; identical to SEQ ID NO: 293753

SEQ ID NO: 300868 - DNA, 792 bp, Proteus mirabilis; identical to SEQ ID NO: 293754

SEQ ID NO: 300869 - DNA, 3261 bp, Proteus mirabilis
gtgtctgaaaaaatagacttttattcaggtaaaaacatttacatttcaaatgtaataattaatgaatcaaatgaaaaaagtttatcagcattagagaatattaaaataaaacgcgatgagtctttatttttcaacctaatgccaaattttagagatgaacaatatatttcagcgtttttatttaatatggggctttggaaaagtaagaataatataagcttgatggctggtaaagatattgttagtcagggaataaaatattatagtaacaaagaaataacttttaatgcaggacaagatatttttcttgcctccaaattaataaaagaagccgctccttttttcagtgatatttattacccccaactacaatctaaattattttcagataataaccttattttaaatgccgcgcgtgatattgatttaagttcaacagtattaaattcaaaagataaaatcattgtattagcgggtagaaatataaaactgggtgcaaatgcttattccgccatcaaagatccccacgaagatgcgcaagacattcaatatgccaccacatccattatgggaaataaaggtatttctattgcatcatcaggctcactcacaacagaaggaagttcacttaaatcagagggggatattgctatttccagtggtggcaatatccaattgggatcagtaagaacacattttcgtaaagagtcggactcagagttagaagaacttcgtaaacaagtcagtactgaaattaatagcggtaatcatctaacactattatctgagggcagtattttatttcaggcctctcaattggctgctaataaaaagatggatattgctgctaaaggtggatttctttatgcacaggcaatggaagaatccagttactatgaagaagaaaagaaaaaatgtaattggtggacactgtgtgcgactaaaaagaaatataccaaaacatttaataacacaacgaataaagttaccgagtttattgctaatgacgatattaatttaattgctaaagatgatatcactttagaagcaagcaaattagagacagcaaagaatgccaaattaaccagtaaaacaggaggcattaattttaaagcggtgaaagatactgcttttaaacaagttattactcgttcaaaagatatatatatcactcaacgtaatcagggatacaccaagggaacatggctattacctgaactctatattggcggaaagctgactatcgatgcgccaaaaggcatatctgcagatattaaagccaaaaaagagcaatctttagagcaggcattaactgccttaagtaacacaccagaatatgcttggcttaatgcgctccaacgtcaagaaaatattaattggaatttagtgaaagacacttattccagttgggatgataaaacccagcagttaaatccagttgttggtgcggttattgccatcgcggtaggggttgcaacttatggtacggcaacagctgcctcaataggaggaatggcaagtaatgccactattgctgcaggagcctctgcgggggttgcgtcaacggcatcagttgcggcacaagccggttttgcttctttagtttcgcaagctgcggtctctttagctgaaaatcaaggcaatatttctaaaacatttggcgccttaagtcgcagtgatacggtgaaatccattgtcaccagtatgaccgttgcaggcgccttgcaaggtcttgaccaatttatgggttgggatcaagcaatacaggggggaacattaccgacaacaggcaagttgcttgcgacggataatgccacatggactcaagttgctcaacgcgttgcctcacagtcagtagtgagttctacactgggcacagccattcaaggtggcagttttattgataattttaaaactgcgctattaagccatatcggcagtcaatttcacgctgaaggtgccaatctcattggtgataacggtgcgatattagggcatgcaggaaaggttttaagccattctgttgttgcaggagtgagtgctgaaattgcaggaggcagtgtaacaggtgcagtagccggcgccttggcagcagaaatagcggcaatatcgctacaaagtaaattatttgagcctagttatttaaatgaaactgacagacaagttgcattaattcaagaggcactacatggcaatgaaggaaaaacacagctcactaaattaattggtgcactgacaggcgctattgtgactcgtaagcctgagggcgtattttctgcggctaattctgcggagttagtttatcgacataattacagcgaacatatgctttcaaagctagcactagaaaataataaggacataattgcagcgtcaaaaggtgatgttgcagcagcagaaagagttgtaaatcgacaaaatgcagggatgattgcgattgctcttggtttaggaggaagtgcgagcattattggtggtcacactgttattgcagcaacaccagaacttattgctattacgcaagctgcatttagtacatgtaaagctaattgggtttattgtgctaatcagctaggtattaatatcgctgggatatcagctccagaagctgcaatcgctggtgtcaccgttggtactggttataaagtattagctagttcagaagaaagtgctaaagctttctctagcatgttagctaatagttcaaagtctttaatgacttcaggaaaattaaatataactgctataaaaccgatagtagaacaagaaaaattattaataactaccaacaaaaaagctattgaaataatcaataacggggagtttataatatattcaggagtaactacgaatggatataaagtatctaatggagccaaaaccgtagtttttaaaaatgaattagaacatcctattgttcaatctaggattaatattaaagtgggagatgttgaatcaggttggttgcatgtacaaaaacgtcatttttcaggagcgcaaaatgctagccaatttacgcttagtgaacaggaaattaaagatatattattaagtcctgctgtcattaagattcctattaataaaacgagagaatcatataataaaaacaccaatagtattgatattttgtatgaaagagtgattcagcttgataaaaatataggaattgataaatttagtaaacagccaactaacataattactatgctcacagataaaaatggaaatttaataactactacccctggggaaataaagtga

SEQ ID NO: 300870 - DNA, 2922 bp, Proteus mirabilis
atgaaaaatatcgtaatacctacctcgttaagctgcttttttttacttttttcccattcaacatggtctgaaaccaatatttcacaaaccaaacaacgaattatcgaccaacgtaattattggttagatgaaatcaaaaatggtgttatcacaactagccctcaaaaaggatcgagaaccgccgaattagatagaataatcagcaataattatcaagccattaccggcgaacgtagagaacttgccgaagcagataagtcacagtctcatacttatgtgtttaatacctatgctaatattttatttggtgataaggctagatcgatcaactttagcgatattcaagcttatcaagatctcaataaattacatagcacaggcacctatgcttatgatacaaacaaaaaaagagtacgctcgatagattttatcttaaaagaactttttttacgtggccgaccttatcaagtacttgataaagaaggtcattatcttgataactacaccactataacaggctcatcttatcccagtggtcatacgtggaacggatacaaacaagctgcagtgttatccatcttattccctgaaaagggcagtgaaatgtttgccagagcaatagaatatggtgaaagtcgagttattgtcggggcacacttcgcaacagataccattgcatccagaataggcaattattacctgctgtcacaaatgcttgcagatgatgacaccacccgcacttttgtagagcttgccaaagaagtccgccaaaatgttgctaaccaatgcaaaaatccacattgcttaacgacctcgacaacaatcactaacgatgaaacaggttattacgcaaccaaagatccagagcctgcgccacgcattacccctaatgaaataccaacatctgccaacgctttactgcgtttacgctttgcctatttaaccaaagagcaacgacaatctatcttagcgagtaccgcctacccgagtaattcattggctggctgggctgcaaacaaagatgatccaaacgccaattggggattaattaatctcccgaaagcctataatggccctacttatttctacaatcattttattgttaatcaaataactaatgaatttgactttgctgaatttggtcaacttgatgaatggaaaaatgatattagtgggcctggcaaattaatcaaacaaggtaatggcaccttgatcttatcaggcaataaccattttgctggcgttgaagttaatcagggtcatttactgctcactggtgaaaaccactatgcaaaaaattcttccattaatggtggtacattgcttcttgaaggaacactaaacactttactagatgtcaacaaaggagcattgctattaaatggtgggagcgttgattctcaagtcaatatcaataacaaagggatactttctggtaaaggaaaaattaataagctggccgtttattcaggaggcatcgtatcaccgggtcattcaataggtacaattaatatcgatgatactgttatttttaattctggtagcaactaccatgttgaaataaattcacaaggtgatagcgataaaataatcagtttgggtaccgcgacactgaatggtggaatggttaatgtatcgcttgaaaatagccaaaatctgctaacaaaagatgatgttcaaagtttatataacacaaaatataccattttaacggcagatcacggtgttaatggtcaatttactgatgtaaatccaaactatctttttttaggtaccacactgtcctacgataaaaattcagtaatactaaatgtcggaagaaataacaccgccttttcaagtgtggctaaaacaaaaaaccaactatcaatcgccaatgcgatagacgcattacccttgggacatcctatttatgacagcattataagaatggatacagggaatgatgcccgctctgcctataatcaattaacaggtcaaattcatgcggatatcttatctaaccaactcaacaatagccggcaaataaaagaaacactcctctctcagattaaaaatgcagaaataattaatagagagaaagaaagtgcagataacaaaggtcatgtttgggctaaaattctctctcattgggaaaagacttccaatgatggcaatgcaaatagctatgatgcttccacctatggcgtactattaggtgcagatcaacgggttagtcacgataaaatgctgcttggtattgcaacaggggtcaccaaaacctcactatctggtgataacagtcacgcaaatagcgaaaattaccacttatcactctatggtggttatgattttgacacaatcgcgttacgtgctggtgcatctaatacctttcatcgtatccatacaacaaaaacggtcaactatggtgtgcagtcagataaaaataaggcgaattacaatgggaacactagccaactctttattgaagcagcttatcccatcaccctctcagatacacaattagagccttttgttaatcttgaatatgccaaaacaaaaaacgccaccattaacgagcaaggtggacgagcagccttacaagcccattcgcaaactctagagtcaaccacctccattacagggctacgtttaaataaccaatggaaatttaacagtaaatcaacggtttctctctatggtgagctaggctggcgacaccaatataacgatgtagaacgagggatccatttacgtttcacacaaacccagcctacatttatagcaaatagtgttgatgctgctcgagatgcactggtggtaaaagctggaacaactatccaaatcaatgagacatcaaaagtctcaattggatacagcggactagtggcaagaaatcagcacgataatggtattgatatgaaactctctatcgcgttctaa

SEQ ID NO: 300871 - DNA, 1380 bp, Proteus mirabilis
atgtcagataatgtcatctcctctatcggcaccaatcaaactggtgttaataaccgtgttcaattacgcaaaacattgacgctaatgcaagtcgtcatgatggggttggcatttttacaacctatgacgatttttgatactttcggtattgtatcaggcataaccaatggtcatgtggcaacatcatatgctattgcgttaaccgctattttatttaccgcagtgagctacgggaaattagtcaagcgtttcccttcagcaggctctgcttatacttatgcacaaaaatccatgagtccacatgttggttttatggttgggtggtcttcattattagactacttatttatgccaatgataaatatcttattggctaaaatttatttacaagccatattcccaggcgttgatccgtggatctttgttgttgcgttagtcgcgttaatgacattttttaatctacgcggaattaacgttgtggctaacttaaataccgttattgttgttattcaagtagctgtaatggtggtatttgttggtttattaattcatggcgtatataacggcgaaggtacaggggagttatggactttccgcccatttgcgtcagtagatgctgaattaatcccaatgataaccggcgcgacaattttgtgcttctcgttcttagggtttgatggcattagtaccttatctgaagaaacacccaatgccggtaatgtgataccaaaagcgattttcttaactgcgttaatcggtggtttaatttttatcgctgtttcttattttttacaattatatttcccagatatttcacgttttaaaaatccagaagagtcacaacctgagattatgctgtatgtagcaggggccttgttccagtctattatcttagtgttttcttgtgtgacggtattagcatcgggtatggcggctcacgcaggtgttgcgcgtctgctatatgtgatgggacgtgatggtgtattccctgaaaaagcgtttggttatgttcatcccaaatggcgtacaccggcatttaacgtactgttagttggctttttagcgctaggggcgatcttttttgatttagtcactgctacagcgttaattaactttggtgcgttagtggcatttacctttgtcaatttatctgttatttcgcagttctacattcgtgagcgtcgtaataaagggttaatggatcatattaactatcttatattaccgattattggtgccgcgacaatgggggtactgtgggtaaaccttgaaccaggctctatggaattaggactgatttggggggcaattggtatactttatatggtgtggatcactcgtcgattccgtcgacctatgcctcaaatgccagagaaataa

SEQ ID NO: 300872 - DNA, 2190 bp, Proteus mirabilis
atgaagtattggaaattttacattgtcgttgtgatagtggggattgttgctggtggttgtgcgcttattaatgcacaagcgaaaagaattaacacactgacagaaaacaacaaagaacttactaccgcactcgaagagcagaaggatatcaatactgactatcaagtacgcatagaacgactaaatcaacttgatacaaggcgcacacaggagcttgttaatgcaaagaataaaattaatcgcttgcgtaatcttagcgagcgtaatcctgagcgggtgtacatcaaagcggagtgtccaaaaagcaccagtaatcccaccaccagcatggatgatgcaaccaccgcccgacctactgacaccgctatccgaaattattggttactcaaagaacgaattgcacagacagagcaaatgccgggtgatattatcgaaattgctgataattattacgcggataatcaaattggtggacgtctaacacatattgattatgcctctcaaacattaaccttagatcgcaatatcgacacacccaaaagtggtaaatcaagcgtcatactcatcaatgctcaaggtgatccgcaatcttatgaagtggtgagctatcccgcatctaatcaaataaagctggatactttgccgttagggttacaagaaggcggaatttggacattaacacttccgtctttacgtcggcgattatttcgtgccatcagcttgactgataacggagatggcagttttacggttatcgctgtgcaacacgcgccagaaaaagaggctgttgttgataaaggggctaaatttgaaccaaaacctgatacgccactgggtggatttattccaccggttgaaaacctttctgtggatatcgaatcagataaaagtgcatggcaagtagaagccagttggaatacaccttattccagtcgaggggtagattttttattaaaactaaccactggtgatcgcattgtcggcaccgcctcaaccacggatacgatatatcgttttggtggtttgcctcaggggaattatgttttatccgtcctgcctcaaaatgatcggaaacaaaaaggcgaggtggccacaacttcatttgcgattaatccaccattaccacccagttatattgaggttgagtcgggctattttagtttagggattattccgcgatctggtggtcaaaatagcttacgagcacagtatgagttttggttttcagaaaaacagatcacggatattcgtgatgtggaaaatcgtgctgagtatttaggtattagctctatgtgggttatacaaggacgtaacctaaaggcaggccatacctattatatttatgttcgcagtataaacgctgtagggtattcagaatttgttgaaggaatagggcaaccagaaagccacactagcgaaatactagataatttagataaagaattacaggaaacgcaagcatggcagaagcttaatgaaaaagttgaatggaatgaaaatacaataaaaagggtaggttataatgaatataatttatctcaaaagtttgaaaaatacagtaaacagacagagaaaacgattaatgagatccgaactcagatagaaaatacggaagctgatattattactcaaaaggaagcaatttcttctatcaaacaagctcaatcaagttatcaacaacaagtccaagctaaaattaatcagcagtcaggtattctcaatcaaaagatgaatgcacaatttacacaatcaggaggatatgctcggcattcaataaatattactatcgtccataatggaattagatataatgcagctggttttattgttagtgccgaaatcaaaaataaaaaaataaactcttatattggatttaatgccaataactttgcattttataatccccaaaataaccgaatggaactgtttatgtctgctaaaaacggacaattttttattcgagaagcattaattgataaagccatgatcagaaaaatcgtgttatcagaggctattacttccaataatttttctcccgaaaagtcaggttttattcttgatgtgaaaaataacaaattagaaatatatggtggtaatgggggaacaacattaaccaatcaaaatttatatgtaaaagacgaaactgggtataacgttgttattattggtgatatcacaaatgagcgataa

SEQ ID NO: 300873 - DNA, 159 bp, Proteus mirabilis
atgtcatggaaacctttaatcatcgttattagctttatcctcgtattgctcattacagtcgctggtggaatttatctctcaattgataattcatgtactaaagaccaagttagtttagaaaagcgctgtcagattgctctctcacatcatcggtactaa

SEQ ID NO: 300874 - DNA, 390 bp, Proteus mirabilis
atgaatagaataaaagaagtcgcactaccagatgacttatggacgcctggtgagtttttatgtagagaattcccctacaatgattataaccacgtaattatatcgtacgacatcgagggtgatagatataaaattgacaaattaatcagtaaatatctagaagatgatagcaatcatttaataaaaataggaaatgtaaataccgtactatactggcaatcgcttttttctgggaatgacaaagagtcactattagaagatatccgtacaaaattaattgagcttttgggagaaatctttgtgaatgaagatgatctttccagaaccaatgttgacgtattctgcatggttggaaatataaaggcattttcttttaaaataaaagcataa

SEQ ID NO: 300875 - DNA, 819 bp, Proteus mirabilis
atgcttactattacggcactactagaaaataagacaagcgatcccgctcttagccattatcctggcctttcactgctattagaagacactgaaagcgaaagtaaaattttatttgatactggtaaagatctcacttttatcaataatgctaaaaaaatggcgattgatttgacgtcattaacgacaattgttatttcccatgggcactatgatcattttggtggattaactcatttaaatgaagatttctttattactaagccacatattattgcccatcctgatttattttcagtacgttattcagcactttttatggggcgccagtctattaaatttaagcgccttactccattttttaaccgacagcagctagaacagcagttttcatttcagttaacagcgacacctaaagctatcgataaaagatttatctattctggccaagtgacagagcgtcaaatacataaacgttatggcgttattgtcagtgaaagtagcgaaacggatgattatgtacttgatgatagttttctaatttggcaaggtcagcaaggactggtgattatcacgggatgtagccattctggtattgatgcgattattcgccatgcgaaaaaaataacaggaaatgacaagatccaagctattgtcggagggctacatcttcgctgtgcctcactggcggcgttaaaaagagcgaaaaaagcaataggtcaccatgttgaggtttatggttgccattgtaccggtgcgcttggccgtagctatcttaatgccaaagattttaatacagggcaaagattattttttaaatga

SEQ ID NO: 300876 - DNA, 861 bp, Proteus mirabilis
atgaacatgaaaattaaaaaaatattaaataacagtgttgtgatctctctggatgaagcagaaaaagaaattatcgtcatgggaaaagggattgcctacgccaaaaaagtaggtgatgagataacatctgaacaaataaccaaaaaatttatcttaagtcctaaaaattgtccgcagagagtgctcgatcttttatcgaatattacgttagattacgtagaaattgcggacaatattattcagtatgcaaaagaaaaaatgatcttagatacacaagatagtatctatattgcattgattgaccatattcaagccagcattgaacggtataaagaagggacttttataagaaataaaatattgtgggagataaaaaatttttatagtgaagagtttgatattggtctttatggcttaaaattaattaatgatagatttaacatttcaatgccagaagatgaagcaggatttattgcattacatatcgccagtattagaacaaacgataatattcagcaaacctacaaagtgacccactttatccaaagcattactaatatagtcaaatattatttaaatatagagtacgacataggatcgttaaattatcgtcgttttgtgactcaccttcgctatttctccatccgattattttcacaacctgaaaatgatcacgaacctttagaaaatgagttactcgatataataaaagacaagtaccatcaaccttatatgtgctgtttgaaaataagtaaatttattaaagataaatataattgcaccttagatgacaatgaaattttatatctaataatccatattgcaaaaattgcagaggataataaaaagatgaataaataa

SEQ ID NO: 300877 - DNA, 825 bp, Proteus mirabilis
atgatctatgctgatttacatgttcacacaaaccatagtgatggtgtttgtgaaataaaagatgtccttgaaaatgcatttagaaacggcattaagactattgcgatcaccgatcacgatactaccaatcattacgacgaaatttaccgagaaggggagcgtcttggattaaatatcgtcaaaggtgttgaaatgagttgttatgactttgacgtttataaaaaagtccatgtagtgggactttggcttaacgaaaaaacgcccaacgttgacaagctgtgtgataacactcttaactgtcgtgatcagtttcaccgagaattaatattatctctcaatcaacaaggctacgatatttgttatgaagatgcgaaaaagttctcaaaatataatatcgtttttaaaatgaatatattccaagcattgagagaaaaatatccagaggaaatgaccaaagagcgttataaacaactttttggctctaaaacaaaaatagaaacagacttaaaaatggggtatatccctgttgatgaaggaattgctgctatcttacaagacggtggtattcctatacttgctcacccatgtgtctatgacaactatgatgaaatagaaaaatatgtccagtttggattgaaaggattagagataagtcattctagaatgaaacctatcgactatgaactgacccaaaactatgctaataaatttggtttgctaaaaagtggcggtagtgacttccatgatcctgcgttacttaaatttggcaattttggcctaaatcaaacacaatttgagaccttaaaaaaggacgcaaataaataa

SEQ ID NO: 300878 - DNA, 1659 bp, Proteus mirabilis
atgtcattttcaacaggtataaatagcttaagcggcataaaaataaataacgtaaaattatttatttttatacttgcgctactattttcagttgactcaaagtctgaggaggagttttattataacccctatttcttatcagataacccggagtctgtcgctgatctatcttcttttgagaaaggattagaagtacctgaaggtaattatctggttgatatttacttaaatgacatattcttaaaaacccaatatatcaattttattgagaataaagggcagctatcaccatgtatcacaaaagcagagctaaaaagttggaatgttaatttaaatctcataacggatgaacaaaataaagataaaaataatgttgaacagaaaaatgagctcgatgaacattgtcagtcacttacttcattaatttctcaagccacagcaaattttgatgttggttcacaaaagctcaatctcactatacctcaagtatatttagtcaatcagtctcgaggctttattccaccagagttatgggatgatggtattgtggctggatttattacctatattttaaatgggagtaaaactcgcaacgatggtagcccagatacttattttactcatctcaatttacaaagtgggatcaatcttgggccatggcgtcttcgtgataactctatttattcttatgattctattaataaatcaagttggaaacatctgaatacttatatagaacgtggtattaataaattatattctcgtcttattattggtgatagctacacacaaagtgaagttttcgacagcatcaactttagaggctttcaactgtcatctgatgaagttatgttaccggatagccaaagaggttttgctccgattattcgaggtgttgcccggactaatgccgaggttactatacagcaaaatggttatgtgatttaccgtaactcttttccaccgggtccttttgttattgatgatctctattcaacaagtaacagtggcgatttagaggtaaccattaccgagtctgatggttcaacacaaacctttactgtgccatattcatcagtccctttattacaaagggaagggcataccaaatattcagtgactgtaggtagttaccgttcgggtaatgatgagcaggagcggccttattttttacaaggatcagtgatccacggcttacctgcgggttggaccatttatggaggaacccagttatccaaaaattaccaagcggcaagtattggggtaggtaaaaatattgggcgttttggggctttatcatttgatattaccgaagcgagatcaatactacccgatgactctacacaccgtgggcaatcgatacgtattctttataataaatctatcaatgaattaggcacaagggtgcaacttgccggttataaatatgcgacgagtggtttttatactttagcagagactacttataaaaaaatgagaggaaattatatacaaacggaggatggtgttgttgaagttagtggattgccacaaagttactacgatcttatttataataaaaggcaaaggatacaactcaatattactcaaaaaataggtgatcaatctacgtctgtctcttatacacatctgacgctgccgacgatactccttgtgtag

SEQ ID NO: 300879 - DNA, 774 bp, Proteus mirabilis
atgctagtactgttgcaatatatacaatcttatttaatcgatatttttttgctcattgctagattatttcctatttttatgtttattccattcctcaatagtcgagttctcaatagtcaattattaaaatatattattattttttatatagcattaggaataaaacctagcatcacgataacaggggttttaagagagacttgggctattgttctaattagtgagttaattataggtctagttatcggcttgctacttgccacgccattttggatagcttctgcgtttggagaattcgttgataatcaaagaggagcaagcataggagatacaattaatcctactacaggtattgaatcgtcagaatttgcgtcattaaccggattgttttgtatggcctattttttagctacaggtgggctcgttgttttaatgagtaccataaaagagagttacgatgtttttcctattgggtatattaataaaaatatcggttacgattttatcggtcattggctaaatgatatggttaaagtggcgattattttggtttctcctgtattaattaccatgttcttaagtgaagttgcattaggggtttattcattattttgtcctcaattaaatgcattttctctctctctttgtatcaaaggtattatcgcttttttagtattactgctcttttttacctcagcaatgacgaatgaattatatcatttttttaacagtagatacttttattctatttttatgagtatttatcatggctga

SEQ ID NO: 300880 - DNA, 201 bp, Proteus mirabilis
atgttttcactgtccggtattatgaaagtctggcaaggacaatacagcgctgggggggggttacaacaatctcgtccatcggggaaatttaatcgcgaacaaaatctacgttttcaagggcagtatttcgacaaagacaaatttgtcgggaacaaatttgaacagcgcttgcgctggcccgtagggcgagtatcaggatga

SEQ ID NO: 300881 - DNA, 831 bp, Proteus mirabilis
atgagtatgaagattaatagtgataatgtatctaatcactatcaaactacaatcaataatgctgatgaaggtgagggtattattgatagaaataagttatataaagaggtagcacctagcttaagtaaattaacaggaatagacagagttaatctaaagcctgttttatctgaaccagagcatataactaaaccagatcttaaacagatattagattcattagaagtagataatgataatgatatttacgatcatgttaaaatagaaagaacggggatttttaactttgtttcagacgatatgatgaaattaatagatctcattgttaaatatttagaaacaatgataaaaaaatttgaagcatccagagaaatgggtgtgatgctaatgaacattgaattggatatagccgataaagtaaaagataatcttaataaaaaagccaatattatgattggttctgcaattactagtgctggaatttctatggctatacatggtatgggagccactttttctattaaagggatggggaaagagcttattgggcattccaatccaaccatagtgatgggaaatactatttcatctttggcagatccattagcaagggttgcagaccaaactatacaatctgaaagtagcacaattgaaggtgaacaaaaagtattggatgcgagaggaagtattaataataatgtgattaataataacaatgagatacagcgagaagtgactgaagttataagagcattattacaagcaatagaagcgataattcatgctcagcaggatgcagcttctacgatttcttcaaatgtaagggcttaa

SEQ ID NO: 300882 - DNA, 1092 bp, Proteus mirabilis
atgagtttgttatttacgcctaataaattaggacctcatcaattagacaaccgtattattgttgcaccaatgtgccaatattctgcgcaagatggaatacccacatcttggcatacaatgcactatgggcaattagcattatcaggtgccgctttagtgattatagaagcgacggcggtagagcctcgaggtagaattagttataaagatctcggattatggtctgaggaacatggtcgcgcattaaaacagcttattagcgatataaaacagcatactaatgctaaaataggtatacagttggctcatgcggggcgaaaagcatcaacatcgttgccatgggaaggtggaaaatcattggctcctgatgatgagaatggctggcaaaaagtagcaccttctagtattgcttttggtcaatatcatcagcctcaagcattaacaattgatgagattgaaaagataaaaaacgcatttgttgaagcagctaaaagagctgagtcagcaggtattgatgttattgagatacatggtgctcatggttatttactgcatgaattcttatcaccattatcaaaccatcgcaccgatcagtatggcggtgattttaataatcgtagtcgcttgttaattgatgtttttactgcagtcaaaaaagcagtctctgacaaaatgtgtgtgggagtaagaatatcggcgactgattgggttgagggaggatgggatctggaaagttctatcgcattaactcaacatcttgaagatctcggttgccattatattcatgtttcttccggtggcttatcagacaaacaagccatcaagctaggacctaattatcaggttccttttgctcaagccatctataatgaaacacaattacccgtgattacggttgggttaattacagagccagagcaagcagaagctattttactgactgaacaagctgattttatcgcattaggcagaggaatactttatgatcctcgttggccttggcatgcggctgaaaagttaaagcagaccattaaagttgctccgcaatatttacgttgtgcacctcatggtagtaaagaattttttaaatag

SEQ ID NO: 300883 - DNA, 969 bp, Proteus mirabilis
atgttttttacttttgaagaaaaatttgaaagatatgccagtgatataaagaaattatcagaaatatcagctaaatatcttcttaaagatgattattgtaaacaaggctataggagtgaaatagcagaagtagtgaggctaattcgagctgatttctatcgggccatatataaccacagagaaagatataatagaacgcagaatctgagagatacagtaagagaagcatttggagtaggtttcctgccagatataatgcaatatcttaatgaaatagaagttgagtatgaaactgaaatgtctgcttattcacaattaaggaagaggagtaaagaaacctatgagctgactaaaactttttctggaacgggatactatttttacttaaaaagcagtcaaactattataggaggaggaatacaaagtacttttggatatttaacatttaagattggtcgtaaaattagaagtaaagaaatgcaaggagctggaattattggtataacactaggtggcggtaagtttattgaaggtatatcagatatagtgtatgaatttactgagggtggggttaattttggtggagacccagtaaaagagaatattgaaaagggactaagatttttaggtatgaacgagagtcatggagaaataggttatgatattattgatatgactgtcagtttatataatggatttgctgcttttgctaaatatgattctcctaatcgtattattcatttacctgttaccatggcggggagaacttatagagcgacatattttgatcgtttgtttaccagtaaaggtgttcgtttgtttcgttggagtacattagattttaagcggaaatttagcattcaaagtaaacctctattacttactacgctcagctacaatgcagggaaacttattctaatattaaaaaaatataagaacgatgagtcatctagtgagaatactcaataa

SEQ ID NO: 300884 - DNA, 939 bp, Proteus mirabilis
atgccattgagagagaaaaagtatcaccaaaatcaagagagcattttattttttccaggtcagggtaggccttatttaggtatgggaaatagggtatatcgtgacgttccatcaataaaagaagtatggaattgtgcgagtgaaatagcagggttcgatgtaaggacggtttgtttaaaagggcccatgaataaattggtacaaacctgttatcagcaagtggcgttaacaactatcaatattgcttctctttatttactgcgtgagcattgttgtgtgaatgaggcgggttattcagggcacagcgctggagaatattcagcgttatttgcagcgaacgtactggaacttgaatctgtctttaagttaattagttatcgcgcatctatcatgcaacagctcgctaagaataacaaaggggtaatgtatgttgttaaaaattgctcttatcagacgttatcaacattgattgaccagcaagatctcgcaacaaaggtgaatatttgctgtgataacagtgaacttcaccaagttattgggggggagtatgcaagtgtacgtaaggttgttaatcaattagctaatatgaaaatagaaacgaataaattagccgttaatggtgcttggcacactgaattgatgagcgaagggaaaaatttacttgctcactttttacagacaatccctttttcaatcccagataaacccctagtgatgaatgtttctgctgagattgttagcgatattgagacaattaaacagaatttagttaatcaactcacagaaaccgtaagatggacagcaactatggcgctatggtgtcatttaggctatcacaattttattgaacttggtgatagcaagtcattgtattatttagcgaaaaattcacatacgctaaaagataaaaatatattgcatgttaatgattatatttaa

SEQ ID NO: 300885 - DNA, 123 bp, Proteus mirabilis; identical to SEQ ID NO: 300532

SEQ ID NO: 300886 - DNA, 1008 bp, Proteus mirabilis
atggcctatcaatttgctgatattaaagatgcagattttggtggcctttatcctatgacctttatgctagtagatatattattattacaatatctctatggcccaaatatgaccacacgccttgaaaataatacctatggatttaattccaatacgggacgcgccgcttactctttaaaaagcatagaagataaactagtgagctgtatttgggatgcgggtggaattgatacattagacttttccctatataccgttaatcaagtcattaatctcaatgaaggctgtttttcagatattggaggattacggagtaatatctctattgcctataaaacgattattgaaaatgcgattggtggtaaaggtgatgatactctcataggaaatccttttgataataacctaatcggtggtgatggcaatgatttattctatggcggtgatggcaatgatttattctatggtggctctggaaacgatgttatatacggagaaatgggaaatgatgtgctctatggtgatgatggagatgatatgcttattgattattatggtgctaatatgttgaatggtggtaagggtaatgatcggatctgtgtagcctcaatggatagagggctccctggcagaaatatcattcaagggggagaaggtgatgatgaaatatatttgggcacaggaactcatcgtataacaggtggacaaggaaatgatacctttaattttttctgctatgagggcgttgaaagcaatagttcaatttgggattttgaaaaaaacaatgatcagataacttttattactagggattatagaaaaatagatatatcaaaaatgaaaaaagttgataaattatcaggagataaaaatgaattttcattaaatcataacaaaccagccaacaaaaccatcatagacgtttcaacatcttctaacgatgataagtccattgtacatatagagattgtcggtatatttaaccatgatgaactctttgcagtataa

SEQ ID NO: 300887 - DNA, 708 bp, Proteus mirabilis
atgtctcgtaaaattaaaaatatacttatctccatttttttagtatttatggccttggggttttatctcaataaaaatcaaatccaaccacagtcaaagccaaatggttatagctattatcaaaaaggtgactataaagaggcgtttaattatttttcacaacatgcgcaaagtgatccgcaagcagcatttagtttagcaatgatgtattgggatggcataggggttgataaaaatgccttagcttcacaaaaatggttaataaaatcagcaaatttacaaaataaaaatgcactttataatttaggatatttacgtaacaaaggattaatccaaagtcctactgatgatgctcaaggattaacgtcattaactaaagctgctgatttaggctcttcaatagcgaaagattttttacatgaccttaattttcctgtgatttattatgatcaaaaagaatatacgctactccctatttatggtgagcaatcttggtctgaaaaaaaaagaacacttgaagaattagaaaaattagcagaagaaggcaataaagaagctgtatatcaatatttagagaataaggattcagtaaaacaatcaagaaagactaaaaatatgatacgtccttttattgaagaaaaagatcctaaaatgatgtatttaaaatataagttaataagtcaagatattaacttactttttgattaa

SEQ ID NO: 300888 - DNA, 192 bp, Proteus mirabilis
atgagtaaattattccgccatatagtactatatgcatcttgttttattgaaaccgtatgggcagggatgataagtgtggtagtgggtctgatgactggcggtgtccaaattactttggcactagctaaattttctcgattttttatttttcacctaaagcaaccacacccaaaatattatccaatatactaa

SEQ ID NO: 300889 - DNA, 552 bp, Proteus mirabilis
ttgcgcctatttggttatgcaagggtatctactagccagcaatctctcgatactcaaaagaaagcattgattgatgccggagtggcaaagcatcgcttatttagcgataaaggatcaggaagtcacattaatcgtgatggattgcagttactcaaaattaaagttgaatgcggtgatattattcttgtgaaaaaactcgaccgtctcggacgagatactgcggatatgattcagttgataaaagaattcgattcaatgggtgtagctgttcgatttttggatgatggtataagtacagaaggaacaatgggaaaaatggtggtcaccattttatccgcggtggcagaagcagaaagacaaagaattttggaacgaacaaatgagggcaggcaagaagctttgctcaaaggggtaaaatttggacgcaagcgttcagtggatcgcgaaagaattattgagctaaaacgaagtgggtggggaggaaccgcaatagccaaagaaatgaaagtagctcgttctacggtttataaaatcttgaatgaagaaatataa

SEQ ID NO: 300890 - DNA, 1005 bp, Proteus mirabilis
atgaaatacattattattttaatttatttactctcattccattgttattctgatgaaccatataaaagctttagtaacaattgcgtttatgacgatataacagacaatgggtttattccagtacataatattagatttaaagctagtgatattgatttaggtgtcgatattggccaacctatcgcagaaatgagttttactgatgccgctctatctacgtcaattcttcattgtaaagataaagttgatctaaaattaattattaatgcaaggcattataaagatgatatttttaaaacaaatattccaggagttggctttaagatatcagcgaataaaacaccttttaacttagtaggcgatgaatttaatgtaacacctgaatatgcaaatgtctgtaatgctcaaactagaaaagaaggatataaaaatatatattgtactgatagttggccaagactatatattcaattaataaaaataagcgaaatcgttctagaacctctgagcgacatatttgttatggatgattttcttgtctatacattagataataaaaaatttacttataataatttgattattgagaagcctcagaataaagtttgcgaacttaatattgaacaacctaatattgaattagcgcctgtagaaaaaaacagtttaagtgattcaatacccgctaatgaaacacatttttctattggtgttatttgtaaccaagatacattagtttcattaaagcttgatgcacctgctatttataaaagtagaaatactaatttattaacacttcttaataatggcaccccttctggggtaggtttatcaattaaatataatgataataaatattatttaggtaatgttatttataatagcgttcatagaacaccttcgacggaatatacttttcctttttcagtaggttatgtgaaaatgagtgaaaacatcttgcctggcaaggtaacatcacaaattaatgtaaacttagaatataaataa

SEQ ID NO: 300891 - DNA, 705 bp, Proteus mirabilis
atgttaaacgaacaaaatcgtgctgagtttctgcaaactattgctcaaaaattaggacgtgaggtgacgcatacgccaaaaccacaagatccccctattaataatttagctaaaacacgcttaacaaatttaacccaagatgaattatgcaaagaatttactgattttgcacaaacccagcaagtaagatgcgttatcactaaaccagaacaagtgataaatagcttaatagcgctttgtgaaagctatgattgtcaaggttcagtgataataagtggtgatgagcgcttaaatgcacttggtgtaacacaagctattagtgaaaaatatgaaacttatatttgggatcctaaactcggtcatgaaaatattattcatgctgagcgctctcaaatagggattgtctttgcggaagcgggattaacagaatctggcgggattgtgctgttttcttctccggaaaaagggcgttctgtcagcctgttacctgaaacctcgattgttattttacgcaaaagtgacattttaccgcgagtggctcaacttgcagagcgtttacacaaaatggcacaagatgggatcagaatgccttcatgtatcaatttaattggtggtgcaagctcaacggctgatattgaattaatcaaagtatggggagttcatggtccagttcatgccgcttatcttattattgaagattgttag

SEQ ID NO: 300892 - DNA, 561 bp, Proteus mirabilis; identical to SEQ ID NO: 296621

SEQ ID NO: 300893 - DNA, 768 bp, Proteus mirabilis
gtggaatgggggttaactatgctaatgacaatgattaaattatttgttcttatcccttatctattgttaggtggttgtagtgagcttatcaatatatatcttgataataaatttcccgtcaatatgaataatgatggcaataaaatcacggtttattcaactatttcccctgaaacagtagtgcaagtccgaggtacttatacatctaataagtgtgaacgttctcattttaattctgattataccgaagtctcttactcctctttaacacaaaaagtagaggtagagcgtaaaatagcagaggataataaaaccgcgacctatatcgtacctattgatggagggggatggtgtaattggaagttagtaaaaatagatatagcaccagtctctagtaaatatgaggtatttgttacaaggaatatggttttttcattgactaatagtgaacattcaaaaataaaattatttgctacattagcccctgttatagtggaagaaaaagatgaacaatccatctattacacatcatcaataatggaagatgaacaaaagttatccaataaatcaagtggggaaatctattttaattataaagttgaacctaaactaaccacgactatctcaaaggataacaaagctattttccctaacggcaatattaaaatactgagcggatcgacttatagtaaattgattggttttaatgaaataatcgagaatagtgatgaaaaggcgtttacttcttttgttcgatatattgattga

SEQ ID NO: 300894 - DNA, 657 bp, Proteus mirabilis
atgtttaaaaaaagtttattagctgtttctttacttgctctaacaagtagtgttgcctttgctgctacacctactgctaaactaaaagttatcggtactattcaagcccctacttgtacagttaatggggaaacaagtgagactactgttgaatataaattcgatgttagcccaggccttttcccagcaaaaggtaatctaacattagaaccaatttcacacaacattactgttacttgtgatgctagaacctatttagcttttgttcctacagatgatagagcaggttcagaattagaagcaaatgcggctaactttggtttaggtacacaccacgaaacaaacaaagagggtgaagctgtagatactaaagtaggtttctatggtattaccatgaaaaatgcgacagtaaaaccaactgctgatgcagaagaagctaaagtttctgtattctacaatggtgctgtaaacagttctcaaagtcttcaaaaagaaaaagtgtttgcgtgggctaaaagctctagcgatttctctgccggtgaagtatttgcagctgatttcgaaatcaaaccaactatcaatagtgaactaaaaaatagcggaggtgaacctaaattagatggtttagcaactcttgctttccaatttggtatctaa

SEQ ID NO: 300895 - DNA, 609 bp, Proteus mirabilis
atgcaaaggaaaggaatattaatccctaaaatagatttttatatttcacatgaaaacaaatactttcaagaattgtacaaaaacagatatcaaataaaaactcctaaatcaaagattttatctacatctgaacttccttctttagaaggaataaaactaccttgcgtagtaaaaaaatacagtggttttggtagtcgtgggatagacctagcccaaaacactactgaattaaaagtatctatattaaaaaaaatgaactcctattggctactaaatactgatatatatgaatcaataaaaagattaattaaagctaaaataaaatttaaaaatctttaccctaaaaaatttggtcgcgtagtattacaagaactaataccaaatctggcatatgattggaaaatattagtttttgatgattatgtatttgctttaaaacgatacacacgaaaaaatgattttaaagcttcaggtagtgggctttttgattttaatgctacacctagcgattctttaattaaattctctgttgaaactagaataaaactagatactccatttatatccttagatattgcagaagatgaaaataatgattttacgcaataa

SEQ ID NO: 300896 - DNA, 687 bp, Proteus mirabilis
atgattgttaataaagataaagaagttttatttcttaaatttacattagagttgaaatgtgctctggaaaaatacatacttgaaaaaaataaaaaaaaagataggctgaagaaattaaaagatattattgaaaaagaaagattaactgataaaataaaaatacttgataataaggtaattgtatcaggaataaaagatgctaatgatataaatgtattattttcctctttgttaaagaataaagatgattctagtacactttttaataaaatatttagtaataaaaatactataattaatagttttatctctaaaaaagaaaaaaagatttctgatgacatagaaaatattgcaaataaaattatgcgtaaacctaaatttacattatataatgatgtaaataaatatcaaaatataattactatttcgaataaaatttttaaggaaccagagaatactgatataacaaaagatgattctcataataaaaataattttgaaaaaacagaaaaaacagacctctcaaaaaaaaccaaaaaatcaaaaaaagcagccctgatggaacaacttgataaagataaacagaaaatgaatgagttgttagctacttctagccaagggttattaaaaactgtagagtctgtctcttatacacatctgacgctgccgacgatactccttgtgtag

SEQ ID NO: 300897 - DNA, 450 bp, Proteus mirabilis
atgtattataaaacaagagaaaaacattacaaaaacattccagcaatgatattatgtgaagaatacattgatatatttagcgcagaatcaatttctccacaaccagaagattataaaatacattgcttccatggtaaacctgaatatttagaaattcaattttcacgttttagcaatgaacgacatatcaatatatatgataaaaattggaacttacagccatttttaatgggctataaaaatacttcatttgaggtacctaaacctaaaaaattagaagaaatgctacaattagcagaaaaattatcatcagaatttgaatattgccgtgttgacttttatcttgtaaatgatcaaatattttttggtgaaatcacatttactccttgtaatgggatggatcagtttattccatatgaatgggattacaaatttggagaaaaatggtaa

SEQ ID NO: 300898 - DNA, 609 bp, Proteus mirabilis
ttgctctctttaggctttaacttaataagtattgaagatgataataaaacccattattggattgagcgtgatgatgaatctaaattagcgccattaggttacaaagcggaacgttcagaaagttacttttatagaaaattctctgatctgatcacattaaatattacagagtttcttggtattcaagaaacaaaagatatccttgataaattagaaaaaagtgcccctgagcttttaaaagagtgttataggcaagtttctattcagaggataaatgatgttttacaacgattagtacaagaaaaaattcctattagaaacataaagactattatagggggcttagttcaatgggggagcaaagaaaaagatcccgtgctacttactgaacacattagaacgcttcttgctcgttatattagttattttttttcaaccgatgggaagtttaatgcaattatcttatctaacgatatggaagagataattcgtagtggaataagacaaagttcttctggcacattattgaatttagaacctgctgaattagatatgataatagaaaaaatatcctgtctcttatacacatctccgagcccacgagactaa

SEQ ID NO: 300899 - DNA, 573 bp, Proteus mirabilis
atgattgataaaataatgacatatgttaataagttaacagaggttggtgtttttaataattataaatcaacaaattatatttccgatgtgtctaatacccctgctgtatataatacaaatattaaacagtttagcttaaataatgtaaataattatgtttatcttggatcaacaaatagtccactacttaataatatgggaattacccttgatgatgatggaaccttaatgttaataaaagggaaaacatatgatttatttaccggattaattcaaaagtactttaatggaggttttaaatataaagtatttcatatcaattctcaacatggtgatgatataaaatttaaagaactatatgtcgattataatgggtttttaattgggagtaagagagatacttcaggaaataataatgaactttataaaattaaatttaaaaagattgaaggtgaatataatttaagcgatgacgccaccgataatactaatattaattttattattgaatatgaaaaatatgaaatagaaaatagctgtctcttatacacatctccgagcccacgagactaa

SEQ ID NO: 300900 - DNA, 159 bp, Proteus mirabilis; identical to SEQ ID NO: 297225

SEQ ID NO: 300901 - DNA, 564 bp, Proteus mirabilis
atgtgtataagagacagggatagtagttcaagcttctctggctattatggacgctatacttcaatcgctaatattaatgcgaatgctactatctcaaataaaaatacctcatcatttggtttttctgctaatgggggcttaacgattaccgctaaaggagcagcgcttcacccagatggatttaatggtggtactcgcttattagttgatactgaaggtgttgcaggagtaccagttgatggtggccgtgtaacaaccaataattggggttatggtgttgttaccgatattaatagttattatcgcaatgaaacaacgatcgatttaactaaattacctaataatatagaagcgacacaggcgattgtagaatcttcattaactgaaggtgctattggttatagaaaatttgaagtgttaaaaggtgagaaggcctttgcaataattaggttagctgataactcttatccaccatttggttcaataattagtaatgctaaaggacgagagctaggaataattagtgactgtctcttatacacatctccgagcccacgagactaa

SEQ ID NO: 300902 - DNA, 141 bp, Proteus mirabilis
atgacaataattcgattttcattaaattcaaaaactcttttgaatttttatcttttatatttaaagcaacagtattcttcacaagttttatttgaatattttttctatattctatatcaatatgctgtattatattcataa

SEQ ID NO: 300903 - DNA, 450 bp, Proteus mirabilis
gtgaaagagataaaaatagttatcgccccagatccttttaaagagagcttaagtgccaaagaggtggcagaggcgattaaacaaggcttttcacgttatttacctgatgctgattattgttgtattcctatggccgacggcggtgaaggtacagtaacgtcattagttgatgctacccatggtcgttttatcacaacgccagtttgtgatccattaggtaaacaggtaacagccacttggggagtgttaggcgataatactactgccgtgattgaaatggcacaggcatcaggtcttcatcttatcccttcatctcaacgcaatcccaatttaacgacgagttatggtaccggcgagttaatttgtgccgcactagatttgggggttaaaaagatcattttaggcttaggaggaagtgctacaaatgacggcggtgcaggtatgatgtaa

SEQ ID NO: 300904 - DNA, 1230 bp, Proteus mirabilis; identical to SEQ ID NO: 16656

SEQ ID NO: 300905 - DNA, 1347 bp, Proteus mirabilis; identical to SEQ ID NO: 300779

SEQ ID NO: 300906 - DNA, 717 bp, Proteus mirabilis; identical to SEQ ID NO: 300780

SEQ ID NO: 300907 - DNA, 1509 bp, Proteus mirabilis; identical to SEQ ID NO: 298822

SEQ ID NO: 300908 - DNA, 516 bp, Proteus mirabilis
atggaaaataaacatataaaatcttatcgaaaactattttcacatacgccttatatgcgaaaaaagatcgacctacttgccgatgaaaattatagaaacaaggagtacaatttttattttatatcatcagcatccttatcaataatttcagcaactttttttataggaatgctaagttttaattttaaatcggctggagtaattgagttaatagaaatatatttatcaatattttcattttccatgtctctttcattaaattcattttttcttttctcattatttatatcatctagtaatgagcttgataaagtagaaacaataataattttcaagtatagaatttttggtatgtttaaatttctatcatttacatttccgtttattggaatgttttttctaatatcatatttcagttttttaattgcctttttctcattgataagtttttttgttatgaattattgttatgataaattaacaaagaaggcaaaaagaagagctaatgaaatttaa

SEQ ID NO: 300909 - DNA, 273 bp, Proteus mirabilis; identical to SEQ ID NO: 300849

SEQ ID NO: 300910 - DNA, 465 bp, Proteus mirabilis
atgaactatataactaaaaatacgccatctcttcatccttcaattattgatgggcttatttatttttcaaaaaagaataaaggaacattaaaaaaagagcagcttattcattttttaggtaatgacgacaatctctctgaattaaatatcatagaagccgctcaacaactcaatttaaaatgcgaattttcattttttaatagtgaaagtgagtataaagataaaataattattgatacacttatcgaaattaatggttattggtatattctaaaaaatagaacaagtgataaattaattattattgacccaagcactaacacagagagtcattatcatattgataaaaaaatcacttataccacactgctaattattaataagatatttacccctaaacagagcaagtttagcttaatgtggtgtattccatcactattaaaacaaaaaaatcattatatttaa

SEQ ID NO: 300911 - DNA, 2109 bp, Proteus mirabilis; identical to SEQ ID NO: 300821

SEQ ID NO: 300912 - DNA, 846 bp, Proteus mirabilis; identical to SEQ ID NO: 300811

SEQ ID NO: 300913 - DNA, 507 bp, Proteus mirabilis; identical to SEQ ID NO: 300816

SEQ ID NO: 300914 - DNA, 282 bp, Proteus mirabilis
atgtttaataagacaatatacgataaagatactacagacattattgcgaataaaatatcatctataagtgaatacctagagactataaattattttaatggagaatttataatggggaatctatataggggacaaagaaatagtgattggaaagtaatgtcctctttaaccagaaagttaatccctcctaaaaatattatcattaatagtaatattaatttagctaacactaataagattctatttattaaatataaaaaaataaagttaataagatgttag

SEQ ID NO: 300915 - DNA, 1092 bp, Proteus mirabilis
atgacaataggtacaacattaagctatgctactgatggtgaaattaaaataatggcagggaaaactggctatgtaggcgaagttgttccagtgacaaaattagctgaaacctttcctaaaagtttcactgccccttcgagcgctaattattatgctaggcttggttttctgagccttaccaaccagacgggttattgtggtagtaccgatgggctacaaaaaatacctgaaattaatgaatggggatttaaactaataaataaaaactatcctacctctggctatttactattggcgataaatggaaacattggaggacaatataaaactaataattcaggtatccaaaatataaaaggagtattaactcgatctaagttgactcgttcaagtttatataatgtaagcaaaaatggttctttttgctggggaccttcggcttatgatcaagaaaatttttatgatccttcttttcgatcttatgtctctatcagtataaatagttattcagtttatgcatatggcgatataaaacctggtattttttcattagaaactagttttaagttgtcaagaaatacagctaatagcgtcgatgatagtactgcttattttatccgccctggagaaattaaagttacggccttaagaagctgtaacgtaacaagtagtactgagactaatattaaatttaaagatcaatttacatcaacatttacttcaccaacattattagatacttcaccagtaaattctgttaatgttacatgtactcaaggtggaaaaaactatattacaataaaagcttataatagtcttgttagtggaaatatgtctggaatgcttttaaatggaacaaaatcaaacaatcaatcagaagtttatgttgttgcatcattaaaaaatttaacaaatcaaacatgtcaagcgaatgatacaagtgccattagattctttgatggtcactatatacccaatatggataatataaaatcctttaatcaaacttttctatttggtctatgtgctaatggcaaagttatagcagataaatattcaggagctgtcgatgtttcatttatcgttgagtaa

SEQ ID NO: 300916 - DNA, 1293 bp, Proteus mirabilis
atgaatagagttaatgatgtaggtgtatttaataagggaatagagttatctactaagaaagattatttaggatcatgttatgtaactattgcaaagaacataaaggatatttctaatacaacggctaagcccagttttataaaaaaagttattcatatgatggaacgatttacaatgttttttgcaattagccaaaccggtagaatgggaataagtaatagagatggaaatttaaatagatatactgaaacacttactgatttaaagattaaggtgaaagatttaaagtgtaagatagatgagtttaataataaactaataaaaaaagatacagtagataaggaaaaagctgagatagctacaattacagctgaatatcataacctaaaccattttctctctttaatagagaatgaaaattcaagttttaaagatagatatagttttttcaattatttaaatgagttgcaacgagcggaggccttttgccgaaattcatcaaatacagattataatcatctggcggatgaatttaaaaatattattaaggaaagagttgaaagaataaaaaaagaagatgttataaaaatatttaatgaagtgttggtaaggtatgataatgaaactcgatttaaaaatagcaatgaaagaatactagctaatttttcaagtaataaggagaaagaaaaatttctgtctaaaataaactttctagtctgtgtttcaaaatataatcttcctcttatggtagaggtagagcagcttaaagaagaatttccagtacagttacgggaaataatgaataaaattctttatgaagaaagtataatgggtgaaattcttaatgaagcgaatattgattgcgtatataagtattcacttaaaaaagtgcaaaatatttggattgaagaatatataaataagttttatggtggtgaagaaataataatggataaaagtacagatgataatgtcgcttattttgtgggggattttgagtgggatagttttgatggaattaataatactaataatgacaatatgaattctaaacgtaatctttctgaagcaagtgaaattattcatggaaaattaaataaacatgttaaaggcgatgaaatatctgatttaacttctattctggaacaaatagaactagataaattaggaggaaaagaaacatatactttaatttctattctgaaagagatgggactgggtaatttagaatggaaagaaatatataatttaatttctattctgaaagagatggaactaggtaaattagaatga

SEQ ID NO: 300917 - DNA, 363 bp, Proteus mirabilis; identical to SEQ ID NO: 300853

SEQ ID NO: 300918 - DNA, 369 bp, Proteus mirabilis; identical to SEQ ID NO: 103780

SEQ ID NO: 300919 - DNA, 1530 bp, Proteus mirabilis; identical to SEQ ID NO: 103776

SEQ ID NO: 300920 - DNA, 858 bp, Proteus mirabilis
atgcatgataaaataattaacgatatccttgattggatagaagataatctgactaaaccaatttcaacaatagatgtaataaaaaaatctggttatagtcaaagatattttcaagatctatttctgcataaaacaaaatcaactattgctaaatatattttgtctagaaagttatctatgtcagctattttgcttaaattaactcggtattctatatcagaaatatctaatgattactcttttacttctcagcagaatttttcaagagcttttaaacgatattttaaggtaacgcctgaattttatagaaaaagtaaattttgggattttagatattatcgacctcaacataaagtatttgattttaaaaaaataaattgtcagttaatttatttatcaaaagatagattgcttgataataattctgatgattttaagttttttgatatttctattccttttgactttaagtcaaatattgcaatagaggggctaggctataaaaataaaaaacagattgaaataataaaaagtcttgttgattcatcaaatgataatttgtgtgtatcttataattatttccttagtagtaaagttaaaaataaaattactgtaaaatataatataaaatatattcatgattataatttttcctttaataaggaaggtctaaagtattatctattttcatttttaggctcttgggaagattatatgattttatccaatattatctatatgagagaattaccgctattgcaagccaagagaagagatggctatgatatagaaatatttacttcaggtaaattagataaaaacatttgttctttaaattatcttatccctataatttag

SEQ ID NO: 300921 - DNA, 813 bp, Proteus mirabilis
atgaataaatcggttgaagcagtgattttagattgggctggtacagtagtcgattttggctctttcgcccccacacaaatttttgtcgatgcctttgctcaagcctttaactttaaaataagtttatcagaagcacgagggccgatggggatggggaaaatcgatcatattcgtgctttacttaacgagcctaatattcgtactcgctggacagcccaatttggacacccaccaagtgaagaagaggcacagcatatttatcgcacctttatgccgttacaaattgcacaagtggtacattttgctaaaccgattgagggagcacttgaggctatctcgaccataagagcacaaggaattaaaatcggctcttgctcaggttatcctaaagccgtcatggatgtattagtaccgaaagccgctgaatatggttatcagcctgattgcgtggttgctagtgatgaaattgccgccggctctcgcccaggcccttggatggcgttaaagaatgtgattgaactgggtgtaatgagtgtagcacgctgtgttaaagtcgatgatgcagtaacaggtattgccgaagggttaaatgccggtatgtggactgtcgggttatctgtttcaggcaatgagtttggtgccacctttgaacaatatcaaacaatggaacaggcagaaatagaaaaccgtaagcgcattgctaaaaataaactacgtaccgctggtgctcattatattattgatacccttgccaatttacctgcggtgatagaagatattaatcagaggatcgctaataatcaaaaaccgtaa

SEQ ID NO: 300922 - DNA, 561 bp, Proteus mirabilis; identical to SEQ ID NO: 296292

SEQ ID NO: 300923 - DNA, 294 bp, Proteus mirabilis
gtgaatcgctcttatccagcatcaaagatggtaggaaaaaaaatcgcttattaccgtagagtaaatggcctcacattaagtgaattggctaagaaaataggtataagtcaacagcagcaatcaagatatgaacggggaattaatcgagtgagtctagataggctttatcaatatgcttgctttttcggtattagtttaagtgatctttttcaattagatgatgaagataaagtagaaatagaaaataaaatatcaaatataatagggaataaaaatgaatcatttaataaataa

SEQ ID NO: 300924 - DNA, 2190 bp, Proteus mirabilis
atgaagtattggaaattttacattgtcgttgtgatagtggggattgttgctggtggttgtgcgcttattaatgcacaagcgaaaagaattaacacactgacagaaaacaacaaagaacttactaccgcactcgaagagcagaaggatatcaatactgactatcaagtacgcatagaacgactaaatcaacttgatacaaggcgcacacaggagcttgttaatgcaaagaataaaattaatcgcttgcgtaatcttagcgagcgtaatcctgagcgggtgtacatcaaagcggagtgtccaaaaagcaccagtaatcccaccaccagcatggatgatgcaaccaccgcccgacctactgacaccgctatccgaaattattggttactcaaagaacgaattgcacagacagagcaaatgccgggtgatattatcgaaattgctgataattattacgcggataatcaaattggtggacgtctaacacatattgattatgcctctcaaacattaaccttagatcgcaatatcgacacacccaaaagtggtaaatcaagcgtcatactcatcaatgctcaaggtgatccgcaatcttatgaagtggtgagctatcccgcatctaatcaaataaagctggatactttgccgttagggttacaagaaggcggaatttggacattaacacttccgtctttacgtcggcgattatttcgtgccatcagcttgactgataacggagatggcagttttacggttatcgctgtgcaacacgcgccagaaaaagaggctgttgttgataaaggggctaaatttgaaccaaaacctgatacgccactgggtggatttattccaccggttgaaaacctttctgtggatatcgaatcagataaaagtgcatggcaagtagaagccagttggaatacaccttattccagtcgaggggtagattttttattaaaactaaccactggtgatcgcattgtcggcaccgcctcaaccacggatacgatatatcgttttggtggtttgcctcaggggaattatgttttatccgtcctgcctcaaaatgatcggaaacaaaaaggcgaggtggccacaacttcatttgcgattaatccaccattaccacccagttatattgaggttgagtcgggctattttagtttagggattattccgcgatctggtggtcaaaatagcttacgagcacagtatgagttttggttttcagaaaaacagatcacggatattcgtgatgtggaaaatcgtgctgagtatttaggtattagctctatgtgggttatacaaggacgtaacctaaaggcaggccatacctattatatttatgttcgcagtataaacgctgtagggtattcagaatttgttgaaggaatagggcaaccagaaagccacactagcgaaatactagataatttagataaagaattacaggaaacgcaagcatggcagaagcttaatgaaaaagttgaatggaatgaaaatacaataaaaagggtaggttataatgaatataatttatctcaaaagtttgaaaaatacagtaaacagacagagaaaacgattaatgagatccgaactcagatagaaaatacggaagctgatattattactcaaaaggaagcaatttcttctatcaaacaagctcaatcaagttatcaacaacaagtccaagctaaaattaatcagcagtcaggtattctcaatcaaaagatgaatgcacaatttacacaatcaggaggatatgctcggcattcaataaatattactatcgtccataatggaattagatataatgcagctggttttattgttagtgccgaaatcaaaaataaaaaaataaactcttatattggatttaatgccaataactttgcattttataatccccaaaataaccgaatggaactgtttatgtctgctaaaaacggacaattttttattcgagaagcattaattgataaagccatgatcagaaaaatcgtgttatcagaggctattacttccaataatttttctcccgaaaagtcaggttttattcttgatgtgaaaaataacaaattagaaatatatggtggtaatggagggacaacattaaccaatcaaaatttatatgtaaaagacgaaactgggtataacgttgttattattggtgatatcacaaatgagcgataa

SEQ ID NO: 300925 - DNA, 315 bp, Proteus mirabilis
atgctaaacacaaaagaaaaaaacatattgagaaatatagaaaaaagtgttttatgtaggaatataaaatttaatataaagtgtaatttacaaactactttctttacaatagttttctctcttttctttatttttagtaaaagtataactcttacactacaaagtaaaatatcaattagcttattaatcgttctatttgtatatttatttggatcatggcattcattccgaaatataaagctagcaacaaaattgacaattatatatataaaaataaaattaaaaaaactcgttaataatcttagttcttcatga

SEQ ID NO: 300926 - DNA, 303 bp, Proteus mirabilis
atgcatataaaaaataattttgatagcgttacttcaataaaaaaatacgatgaaaatataaaagagaaataccaaataaaaaataaaatcaatgatgtgttaaatacgctttcaagtctttatattgaaagggaaaagattactttactatctaaaatatcattttttataaagagtatttttaatattaatgttggggtggtttttctattagacaaaagtcaacatgcgaaaattaatacattatccattttgatgagaaatggaggggaagtatattttaaaaacaacgggtttatttaa

SEQ ID NO: 300927 - DNA, 771 bp, Proteus mirabilis
atgggattaataattcaagagcaatgtgttattgttgatcataattgccccgactggctaataactcagtctgaagggaatccaactattgattatacagatggcttaaaagtttatgctatttttaaaagacaattcctttcaggtaaaagaagacgtaatagaaaacaacgtcaactgggggataattgtcctttaatttatgctttgaaaaaaaaggatgatttatatacaaatatttctagcataaaaaaactcaatgatagcttcaaaatcatttgcaataaacttatggaattagaacctaaagggtatcaactaataatatcaatgccttcagcccataatattagccctattatcgcaaaacgtttagcaaaaaaatttaatgccacatatttaactgatattttaagaaaaataacagtcgataatgcttttcaacttctcgataaagcagatattaatattgaagaggctaaaagtcttagtttcaaaattaaattacaagcaaaagaagttggacttaaaggagggttttcactaaaaagtatccctactgaatttaggaatatatttccaccatttgttttaaacacacaagcatcatccaatactgaaaaaatcagaatattacttgtcgatgatcttatggctacaggaacaacattaactacagctagagatatcattgcacaacagtatccaaatgccattatacatgctatctgcctattcagttcaataaaaaaacaaaacaaaaaaacttga

SEQ ID NO: 300928 - DNA, 861 bp, Proteus mirabilis
atgctagcatttaatactagtattccttttagtaactttatgcgttctgataatgattctatatggcaaaatgcgagtttaagtactaactcctcgcataacatgaagaaacgttttaacaatactatcggattaaacggtacattattggaagataaaaacttaagttacaatattcaaacaggttattctcatgaagaagaatcggactcaacaggatatgcctcattaagttataacggttcttatatgaatagcaatataggttataactataccgatacatcacatcaaataaattatggtatgagtggcagtattttagctcactcaggtggtataacacttagtcagcctatatatcaaacagcggtgttagtaaaagtacctgaagttaaaaatataaaattagaaaacaatagtggcattacgacagacagtaatggttatgcggttttaccttatgtttctgaatataaagaaaaccgtattgcattggataccaattcattctctaacaatattgaaatagataatgcggtgaaaagcgtagttcctactcgtggagccattagtgcgatcacatttgagcctagcgttgggataaaagcaattacgacattaacccataaagggaaaccagtacctttcggggctatcgttgattcaggtaataatactgggattgtggcagatgaaggaaaagtttatttaacagggttatcaccttcaggacaattaaaagtgaattggggtagtaagaaagagcaacaatgcttagtaaattacacattaccaccacaagatccagataaactttatgttgaatatagtgcagagtgccaccctattaaggaataa

SEQ ID NO: 300929 - DNA, 933 bp, Proteus mirabilis
atgataagctataaaaaaacaatgcgttttttattgtatttaagctgcggtttattttcaaacccagtactatcatttacttgtaaagtcgcttcaacgggacaaattgttggtgatggtgctgctaatatacgcgttaatttaacgcctcgagttgaagtaaaccagaatttggtagtggatttatctcaacaaattctttgtaaaaatgattcttatggtggacctagagatccaatagacgttgaccatgttaatttagttagtggaacgacttttggaggcgcgctgaataattttgacggctctttattatggtataacagttattatcctattcctctttattacgatacaaaagttattaatattaaagacagaaattttatcccactaaatcttagattgtatttgaaaagtattggtgctgcgggagggaagcaaataaataagggggatttaattgcaaaaatagaaatgtacaaaattgcagattgggatggtgggcaccctcgtttttttacatggaatatttacgcattaaatgatgttattatgcctactgggggctgtgatctttctagtagaaatgtcacgattaatcttcctgaatatccgggtaatgcgcaacctattcctttatctattttttgtcctagacaacaaaatatttcttactatttaacaggatcaacgtctgatgtgaataatacggtctttaccaatatatcatctaactctcctgctaaaggggttggaattaaaatatcaaataataatggtgttattcctgctaatacaccggtcaaattaggcaatgtgacgaataatagtgtgagtttaaggctatctgcttcgtatggtgaaacgggagaaagagtaagagcgggtaatgtaaaatccgttatcggtgtgacctttgtttatgagtag

SEQ ID NO: 300930 - DNA, 450 bp, Proteus mirabilis
ttgttttttcaacatcaaaaggatgggacatatttacgcaccattgatggccaagaagttcattatagcgatctacaacaggtaaataatgctgcagatgcgttagaaaaactattaaaaggtataaatggaataagtgtatcaatacaaaggcgtgggggggagcctgatgttgacattgattgtcgaggtagaattgattgtactgacctagaaaaattgctaaatgatctatctaagaaggtatctaacacggatgatattaatcaaacagaatttgagttattcagaaaaaccatcgacgcattagataagaaaattaacactaatttagatgaactttccaaaaaatacagtacagcaaatagtaattatgataattttgttaagattgtcagtagtacaatgaacactttattagaaatggcaaaaggatttttacgtttctga

SEQ ID NO: 300931 - DNA, 1788 bp, Proteus mirabilis
atggagacatggaataaagagagattaataaataacagtataaatcactattactatctggactttgcagaaaagcatttttttgatatcacttggtttgtcccaacctttatgaaatatcgtatattatttcaaagtgtattattttactcgttaattcttcaactgctagcacttgcctcgccgattattacgcaaataattatggataaggtaattatccatcaagccctatccacgcttgatgtgttaataataggtcttatttttgtcgccgtttcagaatctgtattaaaggggataagagagtatatttatcatcatacagcaaataaaattgatatgttgctaagtttgaaattaactaaccatttattcaaacttcctatcagttattttaaatctcgccaaacaggtattattgttacacgagtaaaagagcttgatatcattcgagagtttataacaaaaaccttattaatgttattggttgatttctcatttatctttattttcctatttgttatggcttatttgtcattaaagttaacattaatctttcttgccaccatcccactctattttatcttagctaaattaattgcccctaaaatagaaaaaaccgtacaacagctttatcaatattcagcaacaaatagtgcttttttaacagaaacgctaggaggtatagaaacaataaaaagcctttcattagaaccacgttttacacaacagtggcatacgcaaattcatcaactgactaatgaaaatttaaaattacaaaatattgataacttatcgcaatacattgtttcatttttacaaaaaataacgacagcgatacttttatgtctaggtgcttttgaagtcatttcacttgcaatgacaataggtcaactcattgcttttaatatgctattaaaccactgtctacaacctttaagttctgcaatagaagtttggggaaagtatatccgagccaaaacggctatttataatttacaagacattcttaatctcccaatagagcaagaaaaagccaataagaaaatgaccttacaaggtgaagtgagttttgagaatgtcagttttagttatcaacatgatgccccccctgttgtaaggcaaatttcatttagaataaatgaatatgaaactattggtatcgttgggacgtctggatcagggaaaagtacattagcacgcatcatcgcagggctttatatcccacaattaggtcaggttaagcttgatgacattccggtttgtgaaattccccccgcagtattacgtcaacaaatagggtttgtcttacaagagaattttttatttcatttaaccgtgctcgacaatatccgtttaacgcaaccatcagcctcattagatgatgttattcatgtagctaaattagcaggtgctcatgagtttattttaaaacttcctttagggtacgacacactcattgctgaaaatggcagatctttatctgggggacaatgccaacgtattgcaattgccagagccttactctcatctcctaaaattttaatttttgatgaagctaccagcgcattggatggtgagtctcaagccatcatcgaaaaaaatcttccccttattacccaagataagaccgtcattatgattgctcatcgcctttccacaataaaaaactgtgaccgcattattgtattagaaaaaggccagataatcgaagaaggcaaacataatgaattgattagaaaagatggcgcttataagaaactttggcaacatcaacaaggataa

SEQ ID NO: 300932 - DNA, 180 bp, Proteus mirabilis
atgcgattacaagatgttaagttattgcaagagttaggagaatatcatgaaggagataacgaattaaatgatatcgcggtaagaaaacaagccaagatagaaagctttcttactcaatcctttaaagaaaaagtcgattttcaacaaacattagaacaaatgtatgagattaccgcttaa

SEQ ID NO: 300933 - DNA, 744 bp, Proteus mirabilis
atggccttttatacgttgttcggatttgttgataatcatattgctactaaaaattccattgaaataatggccaaacatgtagaggaaaaatatggccataaaaaagaacaaaatatgctatcagcaaaattaattgaattgtataaaccttattttggaaaagataaaattagtttatgggagtatataaaggcttatgattcaggtaattttgttatagatggccaatatgacaaatatcttatcctaggctggctaatttttttccccggttttttatggctatttggctatctctctttctttacgcctcctgtgtaccttattgctgataggcaaagaggaatactgtatagctatggcatggggaaagtgcgtttaacccgctataaagaggcgcaatttggttatgcgggcaatatgttggcaattaaactatatggcattaatgaaaaaacaggccaattaaaaacgatcctctatcgccccaatgtgtcccactactccagtttcctaaccagtaccgacagtgaaaaccaccgttttatcacttttcttaatgcctatatgcaacaaggccgagatgctgtttcgcctgttgattaccaagcccgtaagccctttttatcttttggtaaaaacccacttcctgctgattttgagcaacaggtcaaacagattctggcaaagcttgatcaggagaaaaaaaacatgcgtaaaattgataaggaaggcacggaatga

SEQ ID NO: 300934 - DNA, 936 bp, Proteus mirabilis
atgaccaatttacgcacagtatcaaaacacccagagcaattagaaaccacaccattaattgcggaaagtcatcactatgatgaccctttggagcctcaaaaactggtgtttttagaggcagttaatcaacagagttgtgtgattaattcaccacagcgcaatagccaacttactaatacaatacctttttttatcatactgttagttatggccgtttatacactgtatggttttattgaaaaccataaatcaaattattttacccttcaagataactctaactattttaatgaaaaatatggtgttgataacttaccaatagggttatcaaactatttgccatatatgaaagttaaggaaataagtatcggaacatatttaatcgattactatacggataaaatttacagaaatgataagtttaagatattgatgattatcggctggctaatttttttccccggttttttatggctatttggctacctctctttctttacgcctcctgtgtaccttattgcggataggcaaagagggatactgtatagctatggcatgggaaaagtgcgtttaacccgctataaagaggcgcaatttggttatgcgggcaacatgttggcaattaaactatatgccattaatgaaaaaacaggccaattaaaaacgatcctctatcgccccaatgtgtcccactactccagttttctaaccagtaccgacagtgaaaaccaccgttttatcactttccttaatgcctatatgcaacaaggtcgagatgcagtttcgcctgttgattaccacgcccgtaagccctttttatcttttggcaaaaacccacctccagctgattttgagcaacaggtcgaacagattctggcaaagcttgatcaggagaaaaaaaccatgcgtaaaattgataaggaaggtacagaatga

SEQ ID NO: 300935 - DNA, 444 bp, Proteus mirabilis
atgaagttaaatggctctaataataggagtttttatcaaggtgattttaaaacaggtataaatttttataattggattttacgtaataacagtagcttttcttcaggtgatgggaaaacttactatagatttaatgaaacaacgctttcacgtacaatagagcgcatcaaagccattttacaattaggccaaattacatctaatagtgagttattagatagtgctgatgtgaatggttttcaattatattcagatagtagctatcaaaacagtaagttgacagttcctattactgggatgtctgaaaaaccggctaccgttgaagtcacgcaaaataatcgattgttatatagaacgataatacctgcaggcactttgatcgaagtaatcatcattaatagtgatatcaatagagttgttatttgggtgataggtaatatctga

SEQ ID NO: 300936 - DNA, 1215 bp, Proteus mirabilis
atggaaatatcatcaaaatataagtccattgtaggtagcgtaaatagcgtttttggtgaacatcgtcctttatctactggctttggtattaaatatgcatcttcttctaataaaggtgatggcttccaagcaaatgctaatttaagtttacctgtatcagtattctcactaggcttatcaacaatatatcgttcacgtaactattcgacactctatgaatctctacaaatagataatatagaaaacccattagatgataatcttgctaataatcagacaaaaacatcaagctcattatctctaagcttaggaaatcaacgttatggatcactgagttatagccttagctatagccaatattatggtgataaaaaagacaattattcaaataccatttcttatggaaaaagatttccatttatgtcttttaatattagctatcaaaaaagtagtaattttgaagatcgtacatttgtaaacatcaacgtacctattaataattcatcatcatttagtactcaataccaacattataaaacatcatctttaacaacaaattatagtaattatcataatgatttatttagatattctatcggggcaactgctgataaagatagtaaagataagaatattagcggtaatatcaatgcaacaaccgcttacagccaaattagtgcgacaggctcctttagtaatagtaatcaaaaatcggcgatgctgacagcatctggtgctattgcttatagtgatggattatttgctacttctcctgtggagttaggagatactttcggtattttacgtgttccaggacaatctggtattttagttaactctatgggtggtggtacgacaataactaatcactttggtaccgccgttattcctaacttaccagtaaataaaaaaacaactgttctattaaatactaaaaatttaccactcaatgttatgttaggcacaacatcctttgatattgcattggcaaaaggtactgttttttctcgtgagatccccgtcaatacaatgaagcaagttttattagaaataaaaaaaccagatggtaaacctgttaatacagcaaatagtgttattgatgataagggaaatctaataggtgttattatgggggacggtaatgttataataagtaatgagcaaatcggtaaaccactaaaagtaaaatcagataatggtgacatttattattag

SEQ ID NO: 300937 - DNA, 234 bp, Proteus mirabilis
ttgggtataagtgtgtttatgtctacacatcatccacaacatgccgctttactggcagatgaggtgattttactcacccctcatcgccacgttttacaagataaacctgagcttttgctcacccccgaacatttagctcagctttataatgtgaaacccactgatattcaggcgcacttttacgcctaccctgataataacaatccatataggcaagaatatgaacaccattga

SEQ ID NO: 300938 - DNA, 798 bp, Proteus mirabilis
atgattgtttcattactgatcggtaaatcaccgcttattttattaagtggtttaggtgccatgactgcggtgttgatgttggtatttaaagatccaattatgggacttgttgccggtattcaactctccgccaataatatgattagcttgggtgattggttagaaatgcctaaatatggtgctgatggtgccgtagtggatattagcctcaccacagtaaaagtacgtaattgggataataccgttacgaccattcctacttattctttaatttctgattcgtttaaaaactggcaagcgatgacacaatcaggtgggcgtcgaattaagcgcagtttatctcttgatatcaatagtatttactttttagatcaagagaatattgataaattagaaaaggcacagcttcttgaaccttatataaaaagcaaagtaggtgaaatctccagctataacgctagcctttgtcatgatcatcaaatgccgcttaatcaacgtggtatgacgaatgtcggtacatttcgcgcttacgtggaagcttatctaaaaaatcatccgaagatccataaacagatgaccattatggtaagacagcttgccccaacctctgaagggttacctatcgaaatttatgcctttaccaatacaaccgtgtgggtagagtatgaagctattcagtccgatatttttgatcatatattcgctattcttcctcagtttggtttacgaatacaccaatcaccaacaggtagcgatgtcagagcattaaaattccctaccaatatcgacacaccatag

SEQ ID NO: 300939 - DNA, 459 bp, Proteus mirabilis
  misc_feature (416)..(425): n is a, c, g, or t
atgcagcagcaactgcttacatggatacgtcagtttaatgaagagtacgctcaaatcacttctctgttacttgttttattgatcatttttgttgttgctcttgttctccactttattttgcacaaacttgtgctccctaagctttcaaaagctatcagtaaatacgatcaaaagtggcaactctcttttgaaattaataagttattcagtcgatttgcctttcttatccaaggtgtagtcattaatatccaagccttattatggatgggacccggtaagacacaggagatattaaccaccacagctcaagcatggtgtttacttttcggtttattgatgattttctcaattatggatctctgtttgcagatcatgagaaattccccttcttttggccgattaccccttagaggtannnnnnnnnncggttaccccttagaggtattttccaaagtttaa

SEQ ID NO: 300940 - DNA, 177 bp, Proteus mirabilis
atggcattgttattacggaaggggagtgtagagactccatatagcttgcctttagtctgtgcaaccagtcagtttgtgaatgcatcttatcaggatgaccacattgattgggccaagcgcaatacggggatacgttttcgggggaaaacagatttttgtgagcgaacgaatacgtga

SEQ ID NO: 300941 - DNA, 525 bp, Proteus mirabilis
atgagaaaaagctttattgcaatgttgattgctacaacgtctatttttgtcgcgaataatgcattagctgcagatggaacaatcgattttacaggagaaattatcgataacgcatgtgaattagcagctggatctgatgctctaaaagttaatttaggtaaggtatctaaaacagcattacctagtgccggagttactgctgcggcaactaaatttacgattaaattaattaattgccctgcaacagtaagtactgcatctgttaaatttgatgcagagtcttattctggagacgatactgttattgcgctaaaacaagagtcgggagtggcaacaggtgtcggtattcaaattacggatgatgcaaatactgttgtccctttatttaccgcatctaaaacttatccattaaaagaaggtgttgaaaataatttagactttagagctcgttatattgctaaaacagattctgtcactgcgggtttagcaaatgcgaatgcaacatttactattaattataattaa

SEQ ID NO: 300942 - DNA, 519 bp, Proteus mirabilis
atgttcattctcaatagagtatctattaagacactaacattaatattaatatttatatccatctttatttttatgataatgaatataaacctattgaactttggtggattttatgaacgaggattagaaagttctcggtttaccattataaaagatggcctatactctctacttgatcatccattcggaggtatgaaagtggtatctgcctcatggtttcataatattttcttagatatagctagggtttcaggatacatagtaacattattttggtgtataatcctaacgtttattctaaccataattattgcaaataaatttatttacaaaacaaaaaaaacctttggtatactattttttatactaatgctttctttttctcaagacttagcatttgatggatattataacacaatggcattattgttcatgattatgggatataacgtaaatatattttttaataaaaaaagagatgataatgagagtttcggtaataatcacaactcgaaatag

SEQ ID NO: 300943 - DNA, 840 bp, Proteus mirabilis
atgactgatgtaaatgaaattgaatgtcctaaatgtgggaatattcatggttctaaagaattatgtgaatgtggctatgatcctgaattatgtaaaggaaaagaaaaatattcagcaaaacatgctctgacagctactttagatttagttcctaacaacaagggaagtaattttgtaagtgaaattggcttagagtggaagttagacactgaagatgttgttcaatttataacccgtgctgataaaaaatttatgggtaaaaggaagagtcatggagtgatgaaaaaagaccttatgccactaaatacaccaagtgtttttttggattatttattaggaaaatttgattttcatggatttgttaatgctgtaatgaaattaatgcagagagaagcaaatcaagatcgtgcaacattagttggtggtaattttgtattcatacactatcaagtcgatcaggatcaggaaagtgacggtagacttttgattttaatggttgataaaaaaggagtttttgattttgatgaaaaccttattcctgaaaaagtcccctcaattaatatcgatgcactgcgacaagcagtgttgatagatttaactttgtttaaagctagttatccagataatgttggagaaccttacctacattttatttcaggaaaatcaaagagtgaattttttaagcgagctttaggctgtgatcctaaagtggataataatagaagtattcagcatattagtatggcttttgatgatttttcaaaaaagataaaaataaattcggttgataaggttaaggtaaataaagcgatagaggctctgtctcttatacacatctga

SEQ ID NO: 300944 - DNA, 768 bp, Proteus mirabilis; identical to SEQ ID NO: 300893

SEQ ID NO: 300945 - DNA, 423 bp, Proteus mirabilis
atgtcaaaagagataagcgaattacagtttagtcttcactatgcctcagaaacagacagtgaaaagaatacctccatcattttaacggcgaatatccatacggctgatggtgaaactcaacaactcacacaactaatttgcacgacatctcccgcaggtaaaaagcaatatcgaatcggcttgcaaaaaattagtgatgctggtgctccattgctggtggcgattgaatcctattggcgcaaaaacacacaagagagttgtgtttatttgttagagaaagcgaagcaatttattcaaggacacttacaacaaacgaatacatggatatctatgtatggtcttgtgattgtttctaatgcgtcactggaagaacagttgcctgaaggtttattaaaggcacttaaagtatcaatccccgcctaa

SEQ ID NO: 300946 - DNA, 534 bp, Proteus mirabilis
atgaaaatactaaaaggaatgatttttctcattctattaataagtcatttttctcatgctagttttcaattggaaaccatgactgttattttagattcagaagaaccaagaaagatttttaatgttaaaaatacgggtagtgaatttgatgatgaacaaattttaaaagcctctttccaaggtattggtgttgcaaaggtcaattcaacaaaaatgcctatcagacaagatattgcgatgttaattattccaaaagggttaaccatagagcgtgaaccttggaaaaatctagaagtaaaacaagtcaataatcaattaatattaaagaataatggtaaacaagttattcgtatggctcccgcttttagctctttaccaagcaataacggttatagtattggtcaattttatattcgtcctcaagaagaaattaaagttgatgtaaaagaaaagttaacagaaataaaaatatcacctttaagtcgttatggatttaaattagcaggtgatattaaaatgaaagttaataattaa

SEQ ID NO: 300947 - DNA, 213 bp, Proteus mirabilis; identical to SEQ ID NO: 297906

SEQ ID NO: 300948 - DNA, 219 bp, Proteus mirabilis
atggagtacagcaataatagtgattatttactcgattgcttgcacattttattttttagaaaatcatctaggaatacttggattggtaatataaacgatgagatcgaaaatttagaaaatgaagctattttattttggatgtcaaagaataattataatgacattcaagatattggtaaattaactaggaaaataaaaaataacaacacttgcacgtga

SEQ ID NO: 300949 - DNA, 873 bp, Proteus mirabilis
atgtccactttgcgtccacaggtatcagtcggttactctcttatttttacttttttacttggaggtttagaagtgaagaaagaaattccacaaaccattatctctgtagttgctgaatatgtatccacagttgaaagccatgcaaaactagactctctatttatctatgcaaatgctcctcttgatgcccctcttggctctaaacttgcaaaatcaactgaatggctgatgagaataaataaagaatgcgattatcctttatctgttcttgggaagattttagagcgttatatggaagcagagttaccagataaccctgaatatgaatgggatatcagggatgtaaaatttgtaaatgacgtaaaaagattacttgcaaagtatggtttaaaatacactatcggtggctttattagtgatggagcctctatcccgtcgctctcattgcatgaggctatcaagcaaagagacttccctaccatcgagatggagttcactagagcaattgagaatatttataactctcctcgagaggcggtatccgctgcaagtaatatcttagaatcaatctttaaagtttatattgcagatgaaggcttagagcttcctgctaaacaagatttacaaagcgtttggaagattgttagagaatctctaggtctgaatacaaagtcagtagaagatgaagaccttaggaaaattctaagtggcctttattcaataactgaggggattggtacccacgcaagttcagctcatggggctggtagaaaaatatacaatttaaaaccaagacatgctcgattagctataaatgcagcgcataccctaaccatgtttatcttagaatcatggaatgaaaagaacatgtaa

SEQ ID NO: 300950 - DNA, 1116 bp, Proteus mirabilis
atgacaatgatcgctggcctaaaaatcaatggctattcatttcttattagcgatacactaataactggacataatgacggtaaaactgaagaaaataacagtgcaattcccacgctgggtgatacttcaaactttataactaatgataattacaatgttttaggactattatcaaagatagaaatcataaataattattttgttatttcttgggctggaaatgtgttcgctgctaaagccataataaaccaattaataataaagtttaatagaaaagttccaacacaccaagagattgttgattgtatagataaaagcgaacatgttcattttatttggattataaaaaatacatcaggaatggaactacgtagttataatgctgcaaaaaattccaatcataaatatttcgatgaatctatagtcgcaggatcaagtgataccaccatagaagaagctgatgaattttttcaaaataaaagcaaatcgatatctttagaggacatagttgctgattctgcttgtactgctttatttatgtttagccacttgatgaatcacgaaatgctaatgaaggataaagcaaataccctccatgataaatttggcgggtattatgacttagtcttattttatgatgataaatttcaacgattgaatagcgttacttttatatacttagatgcaacaacagatgcatctggatatatacagattgaaggttcaggaagtataattaagcaaagtctgcatgaaagaaaattaattgttaataaaataaattttgaagcaactgacactttcaataaaaataaattatattcaaaaatcaattacaatcaatccttccctattcattctacatttaaacatcctgaatgtattgaacatcatgatttttcttcgcagttcgtttgcataatgaccagatgtgatagttcattagggcatcattgtctaataagaaaatatgaaacatccagaatcgcagagcgagaaacaatagaaataacccgtaaaaataagaaattaattttgaagttcaatcaaaatttctttaaaatttatgaaaaaaaacttatgagtttttataatggaaaacaaaataatggataa

SEQ ID NO: 300951 - DNA, 462 bp, Proteus mirabilis
atggataagaaaaccttcattctagataatatcgatattaatgagttatatacaatagcgccagttttaatggctcaagatatgtgtgttgacgttaagactcctgacgatattgccacatatctatatcaaggaggaaaatcattacctctagcgtcaagcaataaagaacaaaatagcaatccaagaccacctaaaaagatatggctagccataaaaacagagtttaatctttttttatgtggagattcgccgaagtataaagttttatgggaaaaattagaacaactaagtacgaaaacaacaactttaatagcaactactattagcgtatatttaattactatacttaacttatcaacttctttgtctattgtgatcggccagtttgttgctattttattatgttgtgcaaaaaaaataggcatatctagctactgcacatctattacaaaagattaa

SEQ ID NO: 300952 - DNA, 183 bp, Proteus mirabilis
atgaataagataaaaagtgtattcgcgataggactaatagggctattagcagttagtgcatttagcttggctgaagaacaacagcgttatgcgagcatcacgcatacgagctcaaattttattaaccaaggttacggtggttattcatttacctcgataatggcggtaaccatatggtgttag

SEQ ID NO: 300953 - DNA, 288 bp, Proteus mirabilis
atggtgttagaccacgccgaatttggcgcactcgaactaacgctgcgaatgaaagataggcaaggaaaagtattaggggagacggtactggaagtggaaccttttggcgattctagcgccactcgtgccacctttgcaggattggaaataccttgtgaggatgttgctgagtttgaagtggttaaaacggtggaagatcaaaacggccgtaaggttgagttaccactatccacctttcaggcgaataatccagagctagcgaagatgtcggtggctgggggaaaataa

SEQ ID NO: 300954 - DNA, 291 bp, Proteus mirabilis
atgcgccgtcagcttgagtacaagcagctctggcgaggaggtcaggtactggcaataccaccagcctacaccagtcagaagtgcgcttgctgtggtcatacagcaaaggaaaaccgacagtcacaaagtcaattcgagtgccttgaatgtggatatacagcgaatgctgatatcaacggggcacgtaacattttagcggcaggacatgccgtgcttgcctgtggagggagggtgcagtcagaccgcccgtcgaagcaggaacccgccgaggtgattcagacatcagtctga

SEQ ID NO: 300955 - DNA, 486 bp, Proteus mirabilis
gtgacgtattttgcgaagccgggggtgctggctgtgacgccggtgacgtttccgctggtgtttgtgttcagtgccggacaggccggttgtactggaagtcatttttgcctgacggtggccggtcatcaggtgtttgatgaggagcaacagcagctgattgccggcatgtcaccggcgacgatacagctggcgtggcagagtaccgccgatgagacgcccggggcggttctgtctgtgggccgtcaccgggtggggctgagtgacaacgacattaccgtttaccggtttgccccgcgggatgaggcgtggccgcaggacagtgactgggatcgcctgctgtacaccgtttttaaaggggaggcgccggataaagccggctggcaatgtgtgcctttttcactatctgaactgagctgtcacggtgagtttgcccggctgacctgccggggggcgatcctgaagggcgcgggaggcgtcatatcatga

SEQ ID NO: 300956 - DNA, 258 bp, Proteus mirabilis
ttgcgtgaggatggccctaatcttggtcgccctcaagttgatacactaaaaggttcaaaatatccgaatatgaaggaactgagaattcaggttggtggtcatccgattagagcgtgttttgcatttgatcccattcgccgtggtattgtgctatgtgctggtgataaaaaagggaaagatgaaactcgtttctataagaaattaatcaaaatagccgatgctgaatatactgcacatctattagagcaggagaaataa

SEQ ID NO: 300957 - DNA, 291 bp, Proteus mirabilis
atgaccattatccgctttcagttactggtacatcagttactgcaagtgcattacggcattacgctgagtgataccggattgtccgatgatgctgaggtgtcccggatgattgaactcgggatatcgccggtatcggtggtcaaccgtctggtggataagtaccacctggataaactgaatgcatcctgttatctgccggcatccccgtatgtcagtgacagcgatgccttacttgcacaggctcagctgagcggtgccattaacccggatgtcatgccggataatccttaa

SEQ ID NO: 300958 - DNA, 1002 bp, Proteus mirabilis; identical to SEQ ID NO: 238083

SEQ ID NO: 300959 - DNA, 1029 bp, Proteus mirabilis
atgattagaatgtgttgtgctgaatgtttcaatgataacggattacgaaataatataattcctatgttgacaaagaaaaaaggaaactgttctttttgtaatagtcaacatgttgatattattgcaccaaaactcttgttggattattttgagctgttgataaatatctatgaaataaatcctgaagggaaaaacctcgttgaatggctaaaggaagattggtgtttattttcccatccaactatggacaatgctcatgctaaagagttattgggagaaattctcgatgacggagatatagtacgaaagaacttctctccctccgaaaattataaaagcactggccttgcgcaatgggggacactacgagatgaaatccttcataaaaatagatacttccttgatgagaaaattgacactcaaagattacaggaattactcaaccatttaaaagcatttaatattccacgaaaatggtttagggcaaggataaatcaaacgaatactccgtataaaatcgaagatatgggtgcacctccaagtcaatatgctagtcatggacgggcaaacccaacaggcattccatatttatatttaggatcaatgccagatacagcgatctctgagattagaccacatacaggtgaaatagcaacagtagctgagtttaacatcccagaagaactaattattgttgatttaagagaaccgagaaaacatgtttctccttttgtactatctgatgcacaagaaataggaaaaatgcgagcagacataccttttctagaaaaattgggagaggaattaacacgtcctgtgttacctcgaagtgctgctattgattatattcccagccaatatttatgcgagttcattaaaaaaattggttttcatggtgtaatttacagaagttctgtaagtgagggaataaacttagctttgttcgatccaacattagcaatccctatttcaacatcacaatatagcgtttctcgcgtaagtgttgaagtacaatcaaagtcgttataa

SEQ ID NO: 300960 - DNA, 933 bp, Proteus mirabilis
atgtactatccatattttagaggtaagcagtttgaattaatagcgattcgtgaaacagcagagacaatggctcaggctgattttattccgattattgaaccagttaaagaaaccctgaatggattagaaaaaaccttaaaagctatctgtgaagctaaaggtaaagctattgtaatagtaaatccttcatatggtgaccattcaacaaatgggcataatatctctcaattactgaaagatagttttcaaggacatgaaaatatttttgcagggatactattaaatgaagggatggatgaagaagatatcacagagctgcttaatgaacatgccgaacatcaaccttgtttcatccattctggattttctgagccacgttctttatcagaaaaaacaaatggtcgagtactcaaacatattttcttagagctctactgcggtaaactttatagaaaacattttaacgattgcgaaagaatattaattcgcgatggttttaaaaagagaaaaaatgctgattatcctcctattgaagagttttcagatcttcatataaccttcaaggaagaaggaatggatgggtttggtgattttttaatcgtcggggatgactatactgaaggaggtggtccggcatatgcggtagcaatacatctcacgttcttagaatctaaaaaagaaaatgtcatgtatatttaccactttgtttcaacaacaagagatacaccaacagaccctgctggaaaattcggtcaggcacttgaaaaacttattacaacaataaatgaagataattctcctgtattggagacctcagccatttcagaatttcgagctttgcatacaaaaggccattttcctggattgggaaccgtcaagaaactatcaatgaggcaccatgttgaaacattagctaattattttaggggctag

SEQ ID NO: 300961 - DNA, 888 bp, Proteus mirabilis
gtgctaaatcctacgcaactctcagcgctatcaaggatgttttcttcgtcagtgatttccgagatagctaaaaaaggtcagtcacctcttttttcaaggttactgtctgaggcatctgttttcgaatttgatgacgcagataatgtaactatcggtgatgcctttgatacagcattttctttgctcagacgctcaggtttgagaaatgagtatgtttatcgttctgcgttaattagaaatatattattaggtcgtcattctttgcgtacagccagcatgcttactgaatttagaattggctctagcaaagcggatatggttatccttaacggttgtggaactgtatacgaaataaaatcagatagagattctcttgccagacttgagagtcaaattaagaattatagaaaagcatttagtaaaatctatgtcattgcagggactgcacatatccaagatatcttggaaaaaacatcagaagacgtaggagtgatgagcttggttcgatggaataggattagcattgtacgagaagcaaaagagaatactgattatatttgcactgcaactatttttgattctctaaggcttagtgaagctattgatgttctagatgaattaaacattgatattcccgatttacccaacacattaatgcgtactgcaataagaagtatttttaccaagctaaatccaattgatgtacagagctgcatgataaaaactttaaaaaggacgcgtaatcttgctccattaagtactttaattgcaaacttaccaagtgcattacaaagtatagccctgatggttcagttacgtaataaggatcaagatcgcttagttgagacgttgaataaacctcttaatgaagcattgaaatgggtttaa

SEQ ID NO: 300962 - DNA, 1077 bp, Proteus mirabilis
atgaagttaaagaaattaaaatgggtgcactattttctaaatctctataacccactctttggtaagatgaaaaaaacggcaacattttcatctgatatcaaatttaacagtattgttattttttcaaccacagcgctgggggattttatgtttaataccccagccatcagagcaattcgtgcacattatcctgatgcacatatcacactggtttctagtgtaaaaaataagttgttagtggaaaactatgagcaaatagatagtgtggtgtattgggataataagatcagaaacttgttaccggtagctttacaagttaaaaagtataaacctgagttagcgattattttacattcccatcttccttatgacgtattatttgccgtgatggcaggctgccaatatattttacgcaatacttatgatgttattccagcctggtttagaaagtggcttgtagccgaatatcagccacaatcagggcattttatccaaagaaaattaaatttattaaagcagttaaatatcacagaaaatatatcgcctgaaatgatgttaacttgcccattttcaccattagaaccatctagtcagcctgtgattgggtttcaattaggaacatcaagccctatcaggacatggagtattaacaattacgttgaattagcaaaaaagataataaacaacaatccacattcagtgataaagctaattggttcaccaagggaattatcgttagcatctcaatttattagtttgatgccatcacaatatcaatctaatatcgttgatttaataggaaaaacatcactacctgaattaattgctcatattgataatatggcagtattggttacaggtgatactggacctttacatcttgcaattgctttaaaaataccaacagtaagtttatttgttacggcagaccctaaaaattctggtccttaccaagatattcatattcatcaggttattaagaaagagcctgattcacgatatgatcatccaatggaccaaatagagatccatgaagtttttcaaaaagttttaaaagtgttatctctagaagagtag

SEQ ID NO: 300963 - DNA, 738 bp, Proteus mirabilis
atgaaaatatatattgtaaatttagaaaaagatattgaaagaaaagcatctatcaaagcacagcttgatgctttaaatttagactatcaatttatttccgcagtttatggaaaagcgctttctcaagaagaaattgctcaattaagcccagattttgagaaaactcgcctaacattacctgagctaggttgtgctttaagccatttaaaggtctatagagaaattataaaaaataatgatgaaatagcacttatattagaagatgatgtaaagatcaatagcgatcttatagagttactcgaatatatatcaaaacaaaataattctaataaagctgaggttattatattgggtaaggtcaatgagtatattgatagttttaagaaaaaaataaataaacagtattcaattgctaaagctattgactcatctggtacctattgttattgcgtaaatcatttagctgcaaaaaaattactggaatttttacaacctgtttggcttgttgctgatgagtggaagctattacgtgaaaaaaatattattagcctaaaagcagttgttccttctcccattacatttacggaacttgctgatatatcaactatctcagatactcccagagctttactcactaatttcgataaagaaaaaagaaaaagaagctttagtgaagctattagacttttattttggcgcatctttattcgtagttgggtaaaaaaaattaggccttaa

SEQ ID NO: 300964 - DNA, 717 bp, Proteus mirabilis
atgaagcggaataccgatgatttcgatgggatgaaggattttattattagcatcataactgttgtggcttgggttttaattggttccattataactataggttattttaccattgaaacaaaaggggaaagtataattctttctttcatatcaacaatatttaccattatttcatcactagggatcgtagccactataagcgtttatttttggcaaaaaaaatcagatgataaaaaacaaaaaattaaaaatgatatagttaaaagaatactattaaacatcattaagcaaagaactaagactatgagttccatagtggaatttagtgaagacgttaatatattaaaagaacagattactatcacttcacttaacgcagtaaaaattaatgaaagcactgctaatttaattgcatatagtgattgtaatgaagttctacttaatccagttattatgtatagcaatgaagaaatgaaagaagctatgtctaagcgctataccacaagcgatgaggttgtactaattactgaagaagttaatcaggtaatcaatgaaatagacaaattcatatcaataaaaataatagatcaccttagtagagagaattttcatttcaaaattaaatataatagattatctgaaacaaaaaaaggtggtagatttgactacattacagagctcaatgagcttcatgaaagagtttcagccctgcactag

SEQ ID NO: 300965 - DNA, 201 bp, Proteus mirabilis
atgactattacattaacaactaatcaattaatagctatggctgattttgctggcttaaaggtagacacacacggtttagacattgatgacgaaactgaatacacgctagatgatgagcataatttagactgcttcgataagtcaaagcctgttttttactgcactgaatatccagaagaaggcgctattcagctgaaataa

SEQ ID NO: 300966 - DNA, 339 bp, Proteus mirabilis
atgaaaagtttacacggtcgttgcattcagagatggaagcaacgattcaagagtgtttgtgattctaaggtttcaccttattacagaaaacgcgacttgaaaggattttgtcgtgaatgtggcgttattactgctgatatgatgattctaaacatggcagagggtaatgctcacgttgattttgatggtaaacgccatgggtggtcgcctgaattttcaaagttctttgacgagaaccgagaaaaatatattaccgaagcgcgtttatttctgaatgaagaagccactaacgacgaaatagacgacttaatcgaagaagaaatctctaattggaattag

SEQ ID NO: 300967 - DNA, 1041 bp, Proteus mirabilis
atgtcagaagtagcaactctcgaaagaaaccaatcagtaatgaataacacatcattactttttaatcccgaatcattagaccgtattgttaaatttgctgagctaatggcatcaggtacagcaacggtgccaagacatctgcaaggtaaaccatctgattgtcttgctatcacaatgcagtctgcacgctggggaatggatcctttcgttgtcggtcaaaaaacacatgtcatcaatggtgtgcttggttatgaagcccaattagtaaatgcagttattaccagttcaaatgctgttgtaggtcgatttcattacaaatacggtggcgactgggaaaagattgtaggcatgaaagataaacgtgatgaatcgggtttatttattgaagtcggtgcaattttaagaggtgaagaagaaattacatggggtgagcctgtttaccttgctgatgtacaaacgagaaactcaccactttggaaaacaatgcctaagcaacaaatcgcgtatctcgctgtaaaatactgggcacgtctttattgtccggaagttattttgggtgtgtatacgccagaagaacttgaagatcgtccgattaaagacatcaccccaccgaaagaacgcgtaagcattaatgaaatcaccaaccagcaacaaccaatcaatgctgaaccggtaaaagagactcaaggcgagtttatacctaagttcgatgctgaaacctttagattagctattgatgatgttcaaactgtcgaagaagctaaaaatattcgtgcagaaattgagaacttaaaaaatgaaatggggatcaacctgtttactgaattaaaaaataaagcagtacaggcatatcaccgcattgatgcacgtaatgccctagaagcttctattaactcacttcctgaatctggctcacctgaagctaccgaagcatttgaaaaagtagacaagctacttaaatcaagcaaaagaaaacttggtgatgagttatacgaatctttctctatcactcttaacgatatgcgccctgaataccagtga

SEQ ID NO: 300968 - DNA, 360 bp, Proteus mirabilis
atgaaaattaagacctcaaaactaaaaggattagcacttgattgggcggtaggtaaagccgttggcgctgatgttcgtattggcaaagagtttgttgttgatgtgaataactgcgtatatagcccatctagcgactggttaaagtgtggtgagtttattgatacgtacgctatcgaactgatcaatgagatgttgagtaacgatttcggacattatcaaattgcatggtctgctatctgtaattacttacaagatgattattacgatggtgatacacctcaagaggcaatttgtcgcgccaccgtcgctgtggtgttaggtggtgaagtcgatgtgccaaaggagctattaaatggctaa

SEQ ID NO: 300969 - DNA, 303 bp, Proteus mirabilis
atggctaaatatgaggctggaaagctagctttagtaatattttcactgaatcaatcagaaataggtaaatgcgtaacactaatcagaagattgtatgatggagaatattttaaagcgccagatggcaatgaatatcgatgtgataatgcaaccaaaacataccagtggctagttagtggtgatgtatctgtttatttagatgggcaattcagtggtgttagtgttttttctgaaagtgaattaatgttgcttgatgatggtgaaagcatctttcaaagcaatttgatagaggaattagtctaa

SEQ ID NO: 300970 - DNA, 2463 bp, Proteus mirabilis
atgccatttagtcttattcaacctagtttttcaggcggtgaaattgcaccaagcctatatgggcgtgttgatcttgcgaagtattcaactgcactgcgcaagtgccataactttattgttcgtcaatatggtggcgttgagaatagaccaggcacacgatttattgctgaaacaaagtatcaaaataagaagtctcgccttattcctttccaattcagcaccgtacaaacctatgcgttagagtttggtgatcgttatattcgcgtatttaaagatggtgggcaggttctctatgctgatggtgaacataaaggcgaagtgtttgaattagcgacaccttataaagaagctgatttgtttgatttgaagtatacgcaatcagccgatgttatgacgattgttcatactgattatccaccaatggagttacagcgttacgatcatgatgattggaagttagtgtccgttgaaaccaagaacggcccctttgaagatatcaataccgataaggcaatgaaagtttatgccagtgcaagcacggggcaaattacgttaacgtctacgcatgatatttttggtgccgagcaaataggtaagcagttctatttagagcaacgtgatattgatgcggttcctgtatgggaaacagataaaacaaccaaccttaatgatcaacgccgagctgatagtaactactatcgtgccaatagtggcggtaaaactggtacgctgcgcccatctcacactgaaggaatgagctgggatggttggggtggtgatacaggtattcaatgggaatatcttcatagtggttttggtatcgtaaaaattgaaaccgtaagtgaagatggtaaaacagccacaggaaaggtgatctcttatattccatccaatgccgttggtgaagataacgcaagccataaatgggcgcgtgcagtgtggaatgatgtcgatggttatccaagcaccgttgtttattatcaacaacgtttattctttgctagctctcgtgcctacccgcaaacgatatgggccagtcgtagcggtgactataaagactttggacgcaacaaccctatccaagatgatgatcgcattatctacacgtatgcaggtcgtcaagttaatgaaattcgccatttgattgatgtcggttcgctggtggcattgacctctggcggtgaatatcaaatcacaggcgatcagaacaaagtacttacaccttccagtttttcaatgtcatcacaaggggctaacggttcaagtgatttacctccaatctctgttgcgaacattgcgctttatatacaagagaaaggcagtgctgtgcgtgatttatcgtattcctttgatgtcgatgggtatcaaggcactgacttaactatgttggcaaatcacctatttcaacgtcatcgtattgttgattggtcatttactacggttccatattctattgcatggtgcatacgtgacgatgggttaatgctggctttaacctatttaagagaacaacaagtttttgcatgggcgccacaatcgacagaagggaaatttgagtcaacgtgttcgatcagtgaaggcaatgaagattcagcttattttattgttcagcgcacagtaaacggtaaacaggttcggtatgtagaacggttagccagccgtttatttactcgtacagaagatgctttctttgtggattctggcttaagttatgacggtagaaatactgatatatcaaaaacagcaaccatcactggtggagcgggtgagtggaactatcaagaaaactatcaattagtggtttcaggcgatccagtctttagcgcttctgatatcggtagtgccgtcaatattccttattttgcagataatgaacataaagagcttcgctgtaagattgttcaatatatatctgcaaatcaagtggttatttctgctaatcgcaatatcccaccagcattacaaaatacacccactactgaatggagcattgcccgctatcgctttgctggcttaaatcatcttgaaggtaagacagttaatattctctctgatgctaatgtttcaccgcaggccattgtcatcaatggcgcagtggaaattgatacaccttcagccgttgtacatattggattacctattatcagcgaattagaaacgctcgatatccatattaatgggcaagaaacattacttgataagaagaagcttattaaggttgccagcttaattgtaaatagtagtcggggtatttgggctggtactgaaaaagaacggctatatgagtatcctcaacgtcaattcgagttttacgacaatcctgttgatgatgccacaggcattgttgaaattaatttagatgcagattggagcaaaaacggacgtgtctttattagacaggttgatccgttaccgttagcggtgctctctgttattccgcgtattgatgctggtggtttctga

SEQ ID NO: 300971 - DNA, 300 bp, Proteus mirabilis
atgtggaataaagataatttattaaaaatacaaaaagattatgatgatgcaatgcttagctacaatacagcaaaatatattcttattgcctgtgtttttggtatgtctatgagctttatcttcctacgtggcgaaaccatattatttgtttttgcgacaataggtttctgtttatacttttttcactgcaaagataagcttaaaaaagcagagttaataatggacgatgcttgtaaaagtctttttggtaagaaatataaagaatcaaaaagtgattttattaacgaaatatataaatag

SEQ ID NO: 300972 - DNA, 444 bp, Proteus mirabilis
gtggatggtggaaatttaaatatactttgtactgataaaggaagtttagtagagattattacaggtattatgaaaacaaaaagtatcactaaagatttatatgttagattaactaattcaggggctatgacgcttggaaatgtgaaattttctgtaatcaattcaggaagcattattgaaaactcaggtgaattacattgttctggcactgattttggttttggtagagtaggtgcaactggggttaatgctatgagtgggtctaaaacgtttttaaataattgtatcatgttaaatgaaacaagtaatgttaataacgctatttgtatttttaattctggagctacagggtatgcagttggttgtattagctctgattcaaatgctattagaattcttgatggtagttctgctattagtaaaggaaatattaacttattttag

SEQ ID NO: 300973 - DNA, 1839 bp, Proteus mirabilis
atgcaaagtaaaaagtttagagctgacattaatggattaagagctattgcagttttatctgtcatgtttttccattttaatcaagagttagtacctggtggttttgcaggtgttgatgtattttttgttatatctggttttttaatgacatcaataatatttagaggattagaaagcaataatttttctctctggagttttttaaaagcaagagctagacgtattgttccagcactaataactatcatattgattgtattagcacttggttatctattttttgaaccattaacataccagttagtcggtaagcatgggttttctagtttacttttcatatctaatataacttatgctaatgaagctggatattttgatgcagactcttttagcaagctatttttacatacatggtcattatcagtagaatggcaattctatatagtatatccaataatattgcttatcttatcaaagctattatcaataagtactctgaaaaaaattgttgtgatttctgctattataagctttattttttgtatttatttatcctcagtaaataaaactctttcctacttcatgatatacactagagggtgggaaatgcttttgggtggtattgcatttctattcccattatcgacaacagataataaaaaaagaataattgagatagtggggttaattttaattattacatcattctttattttttcaaactctgacaactggcctagttataatgcattgctacctgtttttggtgcatatctttgtattatttctaataacgaaaaaactcttttatctaattatgcatttcaaaaaataggcctttggtcttattctatttatcttatccattggccttttattgtattctttaaaaaaataaatatagagatctctatttttacttattttatatctaccatattacttgcatttataacttatagtgttatagagaaaagaagaaattataaatatggattattattatgttggttgctatcagtttctttatcctactatatatctattgatggaattggaaacagagttgatgaaaaatacagattaactaaagaagagttccataaaaaatattatggtggaacaaagataacacaaggaagcatcatacaatattttgatatgaaagatactgataaacctgattttataattagtggtgatagtttcatgagacagtacatgaattctataaggcatcaaaaattaaaatcaataggtatttttaaagatggatgttttattacacctaatttaatctcacttaaggatgagttcaatgatcagcgttgtattatgcgatataataatttcattttagcaatgaaaactcaccctaaaacagatgttataatatctcaagcttgggattcatataagatatatagtagaagtacacaaaaagaaataaaatcaaatgtagaagaaagaattattaatgatattaatgaaattattaaaattggtggagttgatagaaattattttattataggcagaccacaaagaagtaatatatcaacatttgaatgtttagcaagacacaatttaccaatttggaaattagcaaaatcctgtgataaatacatggatcagaaagtcttaaacattaacataaaattaaatgaatttgcaaataataagaacaatgttatatttattgatccgaatgagattctttgtaagaatggaaaatgcttgctattaaatgatgataacgaacctatctattctgataatagtcacatgtctttatttggctctgatattgtcattgattatttttttaaaaaattataa

SEQ ID NO: 300974 - DNA, 369 bp, Proteus mirabilis
atgggcgcaaaagtaaggggtatttctcaggctaacgcaaaccttagagcgcttgttggtgatatacagggcaaaaaagtgatgagagctattcagtctgctttgttgattggtagcgctcaggcggctatatacacacctattgatacatcaacacttatcaactcccaattcagggaagtcactgttaatggtactagagtaaccggtcgcgtcggatatacagcaaactacgcggtttatgttcatgatccaagaatcaagcaaaacttcaggcgctcaagtgctcgtaaagagtttttatctcgtggttttgaagatgaacgcaaggctattgatgacgcaatgagacgggagcttcaaatatga

SEQ ID NO: 300975 - DNA, 540 bp, Proteus mirabilis
atgaattatccaacagtagtaaatggaattgattttcgaaatatcgtatttatgtctggttcagaagtaattactgatagcttttgtgtagcaagagcttttggtaaagagccaaagaacgtaattcgtgatatcgaaaggactataaaatcatgtcctccagagtttgatacagagctcaattttgagctttgctataaaaacaatgagttacagaatggaaagcctcaaaaattctataagctacggaaagacggcctaatgttattggttatgtcatacacaaagaaagaagctatgagaattaaggtggcgtatataaacgcctttaactggatggctgatgttattaccaaaaatatccgaaccatggaacaagagcgaaatgagataatgctcgaattcatgaaagagaaggatgtggccagtatgtcaggacgattattaaatcgctggggtagagttaaaaagcctcagttattaaacaagatcgccgagatagaggaaaaaggtcaattactccttcctagcgttgagtga

SEQ ID NO: 300976 - DNA, 369 bp, Proteus mirabilis
atgagggctagactactagcaattcttattgatgtggtggttgctgcatcactctattttgggttgactctgaacaatgaagggctaactaatatcgggtatttcacaggttggctatttgctgtcatggggatattacttatcttcgttgataaagagaaattcgcaaaaaaccacaaacaccagtctatagcgtggcgaacttatgatgtattaaccgatgtggcttatgtaacttttgctgcatattctggctggttcgtgcttgctacattctttgctattgcttcgataatcaaagctgcaataaagagtgacgctgaaaaatctttactaaaggccaaacaggaaagcaatgcgggaaattga

SEQ ID NO: 300977 - DNA, 453 bp, Proteus mirabilis
atgagtaaattaacaccttgggttcctgtgattttatggggagcgatgttgttattctcaatgctatctatgaaagaagtcattgaactgggcaaggaaaataaatcactcaccgagcaactctcacaacaagtcgaaatcaacaaagactaccaagcccgtatcactcgattaaatcaactcgatattcgacattcacaggagttagccagtgcaaagaatgaaatcaacactcttcgtgatgctgttagctctggtaacaagcgggtgtatgtcaaagccgagtgtccagcagtcaccaaaaattccaccgaaagcggaagcaatgaagccaccgcacgacttaacaaagcagttgaacaagattatctacgtctcagagaaatgatagtagagaacgaacagcaaacgttgtatttgcagaattatattaaaacggagtgtttacgatga

SEQ ID NO: 300978 - DNA, 393 bp, Proteus mirabilis
gtgagtaattttagattgagcaaacgtagcgaagaaaacctccgtggcgttcatcctgatttggttaaagtagtacatcgagcattagaaattaccgatattgattttatggtgattgaaggtaagcgcaacgaagccagacagcgacaattagttgcaagtggcaaaagccaaacgatgaatagtcgtcacttaaccgtccacgctgttgattgtgctcctctggtaaataatcagatcccttggaacgattggtcatactttaaaaaggtagctgatgccatgatgcaagcagcgaaagagttaggtgttgatatcgaatggggcggtaactggaaaacatttaaagatggtcctcatttccaattaacccataaggcatatccagcatga

SEQ ID NO: 300979 - DNA, 318 bp, Proteus mirabilis
atgaatcatatgaaagaaacccctgaattttgggatcaagtattccaagttatcgccgctcataaggagcaaggtattagcgcagcactggcaaccggtatggctattctacgaggtaaatacaacggtggtggctggaggaaaacgttatttgatggtgccatgtgtgcgttgtttgcatggtttgtaaaggacctcttaacgctacttggccttaatcatgaattggcatatttggctagtgtattcattggttatgtcggtgtagatggattaagtaaactcattaagggtaaggcagggctgaaaagtgagtaa

SEQ ID NO: 300980 - DNA, 192 bp, Proteus mirabilis
atgtttactgatttaatcgcagctattgaagaagcaagatatttaaaatccagatcaggcggtcgagttaacttctgtgtaatgcaggttatggactatatggaagtggtaagcgggctgatggatggtgtcagggttttatatacaacggctaatgatgattatcacacagtattaccggaggtgagatga

SEQ ID NO: 300981 - DNA, 129 bp, Proteus mirabilis
atgaactgccaatcatgcaatagacagctaacagatgatgaaatttacgtgtgtagcaagtgcgctgatgaatacgctcatttggaagtgatggaaaaaatcaaggaggaaaagagtggcgaaggctaa

SEQ ID NO: 300982 - DNA, 495 bp, Proteus mirabilis
gtgagcgagttaactcatgatgacctgtgtgaaatagctgtcaaatttctgcaaagtaatgggttcaaggttgcctttggtgacaggtttcagtctagcaatggaactggcgagcaaccagatgcaattgggtttagatgtggagttagttgcttattagaagcgaaagtgagtcgttcagatttccttgctgataagaaaaaacattttcgagcagatcctgataggggtatgggtgattggcgatttttcatatcacctccagatatcattaaaccagaagacttacctgatgggtgggggcttttgcacgtgaaagggaaaagagttttcaaggttcatggctggcctcccaatacatattggcatgaaagaaaaccatttaatgcaaacaaacaggcagagtgtgatcacatgtatagcgcccttcgcaggttacaaattcgtggtcacttacatgaaatatatgaaggaataccgaagggagttgtttaa

SEQ ID NO: 300983 - DNA, 210 bp, Proteus mirabilis
gtgagtgagccagtagaagtcatggtctattacgtcagcttcaatacgaatagcagattttggatgttgaaaataaatgtaggttggattgaggaacactataaattcccaagcaaaccaactaaaagacaaatccgcaaaaagaaaaaagaatggatccaagaagctaaatattggatagaggtatacgcagaaatgcaaggaggttaa

SEQ ID NO: 300984 - DNA, 225 bp, Proteus mirabilis
atggaatcaccacttgcacgaatgattaagcaacaggtattcgacgccaacgtcgacaggcttgtaaaactaaacgatgagcaatgggatttcatactgaatgaccaagacgaacgcgcatggtctggcggtaactactacggtcacgattatcatgagtgggaaatttacattgcctacgatatcaaatatatgaaaacaggattgagagagacgttgatatga

SEQ ID NO: 300985 - DNA, 210 bp, Proteus mirabilis
atgcagggaactaattgggttaagtgtagtgagaaacatccagagaaggttaagctcattttgttttatgcaggtggtgaaactcatgcaggatggatgcttgatgaaggttgtggtttttacagcataaaaatatcaaagtggtttgactattcagatgttacctactggtgcgacttgccactcccaccaatgccagagggtgaatga

SEQ ID NO: 300986 - DNA, 183 bp, Proteus mirabilis
atgaaaggaacagactataaaactctgatgtgggcttatgtgaatgagtctagaaatcgcaagagaaaatatcttaagcaatgcaaagattataaccgcaaatttaacagtaactatcgcagtgaaaaagtattgaaaaagttgctacgtcttgattttcagagcttaacgggaggcatctaa

SEQ ID NO: 300987 - DNA, 348 bp, Proteus mirabilis
atggaatgtgcaaaaaatatcaaagtagagtgctcatcaaacgaattgatgacgttttacattcaacaaatgtattcagtcggtaataacggactcgctaaagagctaggcatacacccatcaaaatccagtcgagataaagcccgaatattcgatttagcttgccagttggtgagtaagttcggattaccccctgactctgtaaatatcagtgataagccaacgaaagttgttcttgaaggtgattatgcagaaagggttattcaggctcttgaaggaaagggaaagattaaaagaaaagccccagcggtaactgaggcttctcaacaaatggacttaaccatttag

SEQ ID NO: 300988 - DNA, 969 bp, Proteus mirabilis
atgtcagataaccaatctatgtttgatgtatttcaaaatctatctctaccgtataaagatactcatgacctactttattacaatggaccaataaactggaatggatatgaaaaaataacatcattatgtaggcagtcaaatccagaaaaggatgctatacttatcttgctcacatacggaggtgatccaaacgcagcttatagaattgcaagagctatcaggcataactataaaaaattaacaataataatacctagtgactgcaaaagtgctggtacgcttataacaattggtgcaactaatttaataattggtgattgtggagagctaggcccgctagatgttcagctgcggaaacaagatgaaatgttcgaaaatagttctgctcttgactactatcaagctttatctgggttgcaacacttcgcaaaatcagcttttaaagactacttgttagatatgaaatcaaatttcggtgttacagcaaaaatggctgcggaattttcatctaacttgacgacaggactattttctaagatatatgctcaacttgatccaataaaattaggtgaggttcagcgagctgttcaaattgctgagtcatatggcgaaaggctgaacgaatatgaccatatactacaagacaatgcaatgaacgaattagtagcagggtatccatcacattcattcgttattgataggaaagaggcttctaaactcttcaagaatgtatcacctccacttgatgaagcccaagcagatattgtatcttttgtaaatcagcaattcaaaacaagatcaagaagttgtcttgtattaaatctctctatcataagggagatgacagaacaaagaaaaaaagaggcagctcaatcggaacaacaaccagttgaagaaattaaggaagaaagagatgacagcgaaaaacccaaaaaaagcagagttaacagcaaaagcaaatcagaataa

SEQ ID NO: 300989 - DNA, 180 bp, Proteus mirabilis
atgacagcgaaaaacccaaaaaaagcagagttaacagcaaaagcaaatcagaataaatctattaaagaaataaccattccagatgaaaagaaaatattctctggagataaaaataattttggttcaattgatattttcaataactcatcctctgctatgagtagattaaattttagataa

SEQ ID NO: 300990 - DNA, 294 bp, Proteus mirabilis
atggcaactattacttttttaccagctaaagataatttaaagatgcgtagatacaaacgcaacggagaatactacaagcaacgtaatgagttaaaagctaaacaaaaaagtcgctcagtggaagaaatttgggattcgatatttggcgttgagaaaccagaacgccctgttctctctctcaaaccaacaaagcattatccaagtggagataactgttgcttacctaatgtagcagtattttcgggagttaagacaaaacagccgagcagtgagttcggggttacggcgagataa

SEQ ID NO: 300991 - DNA, 318 bp, Proteus mirabilis
atgaaatttgaagatttaacagaagcgtctcaagaatcggctcgtgcggttctatcagccatgctagttgatagttatcgacgcaattttaaattaactcgtgatgatattttagaattaggccatagagttagaaaggcatttgtgaccttggaaagtgaagagcctaaagctgaattatgttctggttcaggtatgtgtagtgacttgcatcctgacgcctcgttaagtgttggaggtcttggcatccagcagggtgttggaattgctatgaatagcgacacagcaaaccagttaaagcagaaaggaatgctttag

SEQ ID NO: 300992 - DNA, 273 bp, Proteus mirabilis
atgtgtgattgctttacaaaattaggcgatgacatgaaaagtcgcatcaaagcaaaactaccagaaggcgcaagcctacagtcttctggttggaaacaatcaggattatttatgtctggcggagtcatgtcagttaattatttcattgaatacaacgccagttatcaagaaatcaaaaaggacggcacgccgaaagcccgcctaacaaagcaggatttccccgttacgttctcattctgccctttctgcggcgtgaagtgtgaaaacaactag

SEQ ID NO: 300993 - DNA, 285 bp, Proteus mirabilis
atgacaatagatgatttccacagtggaaagctacccatgccgaagttatttagagttgttagtgttgagcttggcgtgctgcgtagcgggcttggtagtggctatggtgtcatattcgattgcgacgaaactgtgataagaaaagttcgcagagttaaatcaaaaataggctggcactggcaattggtcagagaacataaagaccaagagatatgggattactacctagagtcagatagggaaagtcttaacaatatcaattatgaatacggactgatgaaatag

SEQ ID NO: 300994 - DNA, 237 bp, Proteus mirabilis
atggaagataaaacaggtggagcggcttttccgattccagcaacagagttacatggcactcatactggtatgagtttacgtgattattttgcagctaaatgcatgcaaggtgacatcgccacacaggacgcgtcagatatggggtattacgaaaatgacacctctattgagcatctagcaaatagagctaatttctactaccgcatggcagatgcaatgttaaaggctagggggtga

SEQ ID NO: 300995 - DNA, 267 bp, Proteus mirabilis
atgcagaataaatttgtacatttatttgaaagtggaaattatcagttgcttgtaaaaaagaccgaaagtgacgatggtaagccaaaattatcactaatcacacaatatgatggtgcagaggtggatttcggtatcgtaatgaacaatgacgatgagcttgataaggcatttaataaccatgagcaaattaagactagcgctgaaatgttcttaaaggaactaaaccaatcaacatctttgcaaaacttcattaagcgaatttattag

SEQ ID NO: 300996 - DNA, 210 bp, Proteus mirabilis
atggcaaatgataataacggctggattcgctgtgatgaattaacaccagaagttaaagatgatttgatattgctaatttgtatggatagcaaatacccagaaccgtggttaggcaacatacttgattattttggtaagtcaggctcgcttaattcttattgtggcaaggcaacgcactggcaaccagttccaaaaaatccaactaaataa

SEQ ID NO: 300997 - DNA, 699 bp, Proteus mirabilis
atgattagtaatgacatcattctaagccaaacaggcatcgatttaaccaagatagagcaaggaagcgaagaatggatgtctgtcaggctcggagttgtaaccgcttctgaggcatggaaagttatctctaagccaaggtcaggaacaaaatggtcagacacaaagaaaacatatttaaatacccttattggtgaagtttgcacgggagtttacaaggaggtatcagcaaggacgctggaatggggtaaaaactacgaattagaagcaaggatgacattcgagttttacaccggattaacggcaaaggaagtgccaataatattcaaagatgagcaactacggatagcttgctcaccagacggcatttgcagtgatggctcaggattagagcttaaatgccctaataacacggacgtatttatagacttagcattgaatggaatcaatgcaatgaaaaaggaatatgtggctcaagttcaatattccatgtgggttacaggtaaggatatctggcattttgcaaattttgacccacgaatgccggcaggaaaagaaatcgcatatttccctgttgagcgtgacgaaaaaatgatgaaagaatttgacgagttagtacctgagttcattgaggtgatggatcagggattaaacaagttaggcattcaatttggcaatcaatggagtgtatatggcaagtaa

SEQ ID NO: 300998 - DNA, 525 bp, Proteus mirabilis
atggcaagtaaaggcgtgaataaatgtattctcattggtcacctagggcaggatccagaaatccgttatatgccatcaggtggcgcagtcgctaatctcacactagccacatcggaatcgtggcgtgataaacaaagcggtgaaatgaaagaaaaaaccgagtggcatcgagtgtgcatcttcggcaaattagcagaaattgctggcgagtatctgcgtaaaggttcacaagtttatattgaaggtcaattacaaacacgtaaatggcaagatcaaagtggtcaagatcgctacagcactgaaattgtggtgaatatcggtggaacaatgcagatgctaggcggtaacggtggtaatcaagcaggaagccagaagactcatcctcaaggatggggtcaacctcagcaaccgcaagcaccaaaacaagcatcgagtaatcaaacaccacaaagtgagccacctcaagattgggatgatcaagaaataccattccaaccaccccgcccgtttaaccaaaggatataa

SEQ ID NO: 300999 - DNA, 177 bp, Proteus mirabilis
atgaatctaacaatgcgagattcagatacggatgaagaagttattttaacagtcgctatatcagaagaagattttaataaattatctgagcgagaacaggatgatttaatagaaagcgtcgcttttgattattacgaaaataaagcagcggaagaaatagagcgtaaatttaaatag

SEQ ID NO: 301000 - DNA, 456 bp, Proteus mirabilis
atgaaagacagaataaagtttaacgatgcaatgttagcggctgtcatggatggcagaaaaacgcagacacgtagaccaattaagccacagccaaaactcaacgaagagcatttaaaacagatgggtgcaatcgcagagggatttacgcttgctcaggtggttaactcagcatggcaagctggattcattgatgttgattgcccatacggtgattcaggcgacatcatcaattttgcagacaaggacggtaatatcaaagggaaaattgaaattactgacgtctggattcagcaagtaaatgatatcagcgaaagtgatgcagaagccgaggggtttgacgggaaactaaatgcacatacttctgactttgctgcggtatggattgcaatatatggagttgatagttgggtaaataacgaatgggtgtgggttattgagtttagcagaattgattga

SEQ ID NO: 301001 - DNA, 906 bp, Proteus mirabilis
atggcaacggaactaaagcctcgtacagcggctggatacgatcaaaatgttacattggcgtgcgagaggacgttgctcacactgctaagcgcctttgggaatctgaaggaaactctaagacttgtcggtggcttggtaccccggtacctcacaccagctactccgcctaatgttcctatgcatgcgggaacttctgacgtggacattgtgttaaaccttgaaatactggcagctggaaatgaatacgctagccttgcgcagcagctaaaagcacggggcttcacccgatgggttgaagaggggcagtctgcatcctggcgctggcgccgcagagtcaataacaacatcgaggtagtcgttgagcttctccgggatgccggtgatgaggaaccaggtcggaccatcagtgtcgatggggaaaaagtatctgcacttacaatcaagcatgctcgaattgttcacgattggtatcaggagaaggaaatatctgcccaactcctggatggtgatggcttatcagtagatatcgtgcgatttgcagacgtgccagcatttgtcattttgaaagcactggctctggatcaacgtcaggagaggaaagatgctgctgacctaatccacgtgatcagatactcaggctcggtacaggaagtcgcagctctcttcgttcagcgtattcgttcagggctgcacccagaggctttgcaggacgggctagcggcgctcggcaggcgttttggggatgacgagcatggtgaaggctatgagaaggtggggtctgttgcctacgcacgcttccacggcaaagacgatgaagacgaagatgagcttgttggtcgtcagcgttttgctgcagggttagtccaacacttactggccgagattgagaggcaacgtgcaatctaa

SEQ ID NO: 301002 - DNA, 1125 bp, Proteus mirabilis
atgggacattactcacataatttagggtttgaattcgaaaggcagatgctggatgcactggtgaaggctcttgctgaagcatttggctccgaagcctcagtgctcgatgcttcacacgagcttcgtggggctggggctgagcttgatggcatgatcgagatcaaggctccgggcaaaaccctgcaggtattcgtcgaagtcaaaagggaggtctacccaagagacttaaggaatgctgtgtaccagctccacaggggcatggacaatactcgtcatcgtcacgaagatattattggactcctcgctgcaggcgtattgagccccggggctaagcaggagcttaggaaacataatatcgcttcattcgagctgggaggcagcctttacctaaagcatgacggctggttcatcaacatcgaaaagccttctctccgtactaaaaagaacactcagggcattgatcttttcactgaggctcgtgaaagtgtaatacacgcgcttttgatgaatagtcataggtggttaactggtacagagctggccgaacaagccgaaacttctccatacacctgctctctcgtgttgcaggaactgacgttgcgtgagtgggtggagtctactggtggaggaccgaacaagcgcagaatgctcactagccctggtaagcttttggacgcttggtctgagcagtggcaggagcgcaaagaaaagaagtcaaagtggtacacctttgtcgaaaatcccaaggatatgctggcccacctagcggaaaggatagatcgccagaaggtggattatccgtgggcgttcacaggtgctgctgcggctaatgtttacgccccattgctgaccagtactgagggagcagaaatcattgtccccaagggctacgcagagaggatggctgatgtcttaggcctgaagccagtgagcaaaggggcgaacattactctcatcgagcgtgaacctgcgagcttgctttaccgagatatgcactcggaccaccctatctttttcgcaagtccttacattctttacttagacttattggatggtcgaggccgcaacaaagaactggcggaacatattagagaacgattggagtctttatggcaacggaactaa

SEQ ID NO: 301003 - DNA, 144 bp, Proteus mirabilis
atggcccctttctttgtttgcactgagcaaaatttcgcaggtcgtccagttcatgtggttttaagaaatttttggtcaaaaaacgctgttcaaggtcaattccacgaatatctaaaaagcgtagcaaaacaattaggttgctag

SEQ ID NO: 301004 - DNA, 519 bp, Proteus mirabilis
atgccaactccttgctatatttccattgaaggaaaaactcagggcaacatcactgcaggcgcgtttactgcagattctgtcggcaacatttatgtacaaggtcatgaagaccaaatgttggtacaagaattttctcacgtggtgacggttccgactgatccgcaatcaggccaaccttctggccaacgtgcgcataaaccgtttcgttttaccgtggcattaaacaaagccgttcctctgctgtataacgcattggcttccggcgaaatgctgccaaaagttgagttaaaatggtatcgcacgtctgttgaaggtaaacaagagcacttctttaccaccacactgactgacgcgacgatcgtgaacatcgattgccaaatgcctcattgccaagatccggctaaagccgacttcacgcaacttatcgaagtttccctctcttaccgcaaaattgactgggagcacactgttgctggaacgtctggtgcggatgactggcgtgcgcctctcgaagcgtaa

SEQ ID NO: 301005 - DNA, 489 bp, Proteus mirabilis
atggagacggtagagaaaaagagtattgcagggcaacaaactgctatacaaacagatttttcaacacgtaatgcccttgctcgtatcattcgctgtctttttgcagaaaaattattggatgataataaactgcaagttttcaatgatgaaaataacgttaagtacccgctttctgatgggatacatatccttcaatttaatcaaacgaccgtttttcctgcaaataccgttattaatcgcggtgatattatccttaaatcaatggatggccaccaccgaatggtgcaatcccatgaagaacttatggggatactgaaaaacgaacttagtttcacccctacaacggagggaatgacaaaattcaataaagatgtagcaaacagtatccataatgatcgattagctagagcacatcggtcaaagtggcgggatacgatttctataatgagatggcacaagagggaacatcttgttttattgaatggataa

SEQ ID NO: 301006 - DNA, 153 bp, Proteus mirabilis
atgaaaaaccatttacgtatggatcattgggtaggtgagggaatatctgatagtgcaattattacattaaaagccaattgtagtgatgaggttttaggtgcttcaataaaaaaagcttttacacgttgtattagtcgaaaaaccatcacttaa

SEQ ID NO: 301007 - DNA, 378 bp, Proteus mirabilis
atgaaatatttatttgaattaccctatgaaaagaatgagcctaattggactataaaaagttattttgatcttatatataatgatggttgttttttagatgctgtttctaatattgtacaaaaagaatcttttgtcctcgatggaatatattgctttttcccagatatgaatagcgctgatgtatctgatcattttttaggtgttaagtttggaataggatatcctctaacagataaagatattgttattgtaagcgaagatacttgttatcaatttattagattgtcttgtgaaaaatatttgttaatgcatcctgaaaataagataaaaattaaaatgatactatcaaaaaatagattaaatcatgttagtttataa

SEQ ID NO: 301008 - DNA, 279 bp, Proteus mirabilis
atgtatattgaatataaaatacctgcgaagcctccccaaactggagaaataactcattataaaggtaatggtgctcaaccttttaaaaaaacaatttatgatcccaagattttttctgaccaaaaaatacttgaattaggtcaaaaagcggcagctaatgagtataagaatgcgttagataaaaaattgcaatcctatgatgcaatgtcagaaggcataacttttagagtatatttagataaagaaacaaagatggttactaatttccatcctaagtag

SEQ ID NO: 301009 - DNA, 207 bp, Proteus mirabilis
atgagtaatcagaatttagaagtgttagtagataagttgttattccaagtagcacaacaaggtctgcaaattgtggagttacaaaaacagctcgcagatatgcaaaaggcaacgagctgtggaaaggagaaattactaaaattatatgaatgtaaaactaaagttgacaatattttccttgatctaaagtcaactgcagtagattaa

SEQ ID NO: 301010 - DNA, 258 bp, Proteus mirabilis
atgtcagaaaataataaagagtcatatgaaaattcaatgttgcagtatctcacagctttacgagccgagaccacatttcataaaactgtgttattggtattggctaaaaagaatctaaatcaggatgataaagaaataataagaaagattattgatagctcaaaacaaaaaaataaagaaacaaataacgagattcttagcaatatatattcagaagagatagaaagatgctttaaattatttatggataatgtttaa

SEQ ID NO: 301011 - DNA, 1212 bp, Proteus mirabilis
atgaagctaacagccagacaagtagagacttccaagccaaaagagaaagcttataaactttctgacggtgggggcatgtatttagaaattgctccgaatggctctaagtattggcgtatgaaatatagatatgcaggtaaagagaaaaggctggctttaggtgtttacccatcaatatcactcgcacaagctagggcgaaaagagaagaagccaagcgcatactagcgttaggtgatgatccatcgttggtaaagaaagccgaaaagcgagaaaaagagtctcaggtcaataatagctttgaaaaaatcacgcttgaatggcatgactataaaaagccccattggtcaaaaggttatgcggatgatttactagaagccttccagaaagatatctttccttatattggtaaagttagcattacggaaattaaaccgttagatatgttagaagtgcttcggaaattagaaaaacgcggtgtgttggataagcttaaaaagataaggcaggcatgtaaccaagtattccgctatgcaattgtgacaggacgggctgagtataatcctgcatcagaattagccggcgcactgtctactccaaaagctaagcattttcctcacttaaatgtgaatgagttacctgagtttttacaggcactatctgtatgtagtggaagtaagatcactcagattgcgacaaagctattaatgataacaggtgttcgtactattgagcttagagctgctgaatggtcagaaattgattttgataaagctatttgggaaattccaaaagaacgtatgaaaatgcgtcgccctcacatggtgccattacctacacaggccttagaattattcaaagaaatacaaaccataacaggaaagtttaagtatatctttcatggtaggaatgatgcttctaagccaatgagtgaagcggccataaatcaggttataaagcgtattggttatgatggtagagccacaggccacggattcagacatacaatgagcaccatcctacacgagcaaggctataacactgcatggattgagacacaacttgcgcacgttgataaaaactctattcgtggaacgtataaccatgctcagtatattgatggccgtagagaaatgcttcaatggtacgctgattatatggatactttagagaacggggataatgttgtgcacggtaactttaaacgcgcttaa

SEQ ID NO: 301012 - DNA, 690 bp, Proteus mirabilis
atgaaactaaaaaataacagcttaaatgctggtggattcgctcaccctaaaatcaaccaagaacctattttaattcaacatagaaccgagccgagaatagatagtcgcctgtttgctaaacgtatcggaattaagcataagaacctttttgaattagtaaaaaagaatgcaaagaacttacgccaatttggaacccttccgtttcaaacggagcgattaaatactaaacaattgggttcgcgtgaacataaatacgccttactcaatgaaagccaatttgattttatgtgccgtattgttcgcggtcgtaatcatgagcagatgactcaattcaagctggacgtaaccaaagcatttagtaagaagcgcgctgctgaacctatccgtcgtgaatatctaccacattaccatgagtcacgtgacgcactcagagacttgggcgcagaaaaacatcattacatcaatctagcccgtacagaaaaccgtttaacgggcttactcactggagaacgcgccagcgcagacgagcaacaattaggtttattagtctgtatgcagaaaatcgaacaggcagcatttcaggacgcgattgattcggggttatcggctactcaggcattacgagaggttagcaaacgcattgagcagttcgctagtttaatgagccctactgtgcggattggtggctaa

SEQ ID NO: 301013 - DNA, 966 bp, Proteus mirabilis
atgatgaatatcgcagctaatgcctaccaagtgaataattctctactggcaggtaataacgtaaattcaacttacaccacgactaatactgtagctttaaactacggtattacgggcaatcaatcagcgaaaatttacgccaatcaatcagggcaatatttctcaggttgtaagtctggtggatatttgagcacctcaaaacgtggagaatttacaccatttgctaaagatgatttttctcacctttctaaagaggctaattatcctcattggaaaggtttaatcggggtcactacacgaaacagaattgagttttttgagtccataaaaaagggcggccaatcggctacccttggaaacgtcgatattaaataccgagcaagtgagaactataagaatagtattcatcttgttatcggtaaagatgacaactttgagttaatacaaaaatgtgcaacacatcacttgcacttatgggtaattgttggctatagtgatcaggcactagcaaaatctagtgtcaggattgagaccctgagcttacaaacggcgacacatgacgcgccttgcgtctttttttgtgtctatgcctacgcatacctattaaatgcggtattatatcgctcttattcaatggtggcgttggtaaggcagccttcgggctggctggtttccgtttgtgccagtagtctcaaccttgctaacgtcaccacccccatagagattgagacctctggtggtgactccgagttaatacaaacggagatcatcgttatgatggcaacccctacccacactcaattcaaatttttgtttctgagtattaaacgctcagatacaaccgctaaaccttgtcgtattgctgttacagcaccgaatgaacacgatgcaagactgatgcttgtacgtgattatatcctgtcattcgctggtcgcttacctgttaaggaggtggctcatgcgtaa

SEQ ID NO: 301014 - DNA, 522 bp, Proteus mirabilis
atggcttactctgctatcgctgtcgccaatgccttcattgaaagggcaaaacatgagggagtagatgatctctcccctatgaaattacaaaagctcgtattttttgctcatgcttggatgctcgcaattacaggaaagccactgataaaagatgccgtcaaagcatggaaatttggacctgttattgagtctgtttatcatgagttcaagccttatggatcagcaactatttctcagttaggaactgagttaatttcatctgatgacaaaaatatttttaatatgaaaatggttattcctaaaataaatcaagatgatgaagaagcaaaagctattataaacgccgtattaaaagtatatggtaataaaagtgcaatgtatttatccaacttaactcatgaaaaaggttccgcttgggatgtaacaaatagcctgcatcataatggttcagtaaaagatgtggttattagtaatgaagttatagaaagaacaatgagaaataagcttgaactaaatgactag

SEQ ID NO: 301015 - DNA, 669 bp, Proteus mirabilis
atgactagaaaaaaaagtgttagtgtttttaatgagctattgagacagtccataaagaacactaatgaccactttgagaaagttacaaaccagtcctctgtggatcctgatgcaaattcaggttccacttctgagcatcaaagcgattcatcaacagatactcaaaatcaaagtactacacaaaatgattcagaagatttatatgaggaagagcggtcggcatatattcctgatcagcagtcaatagcaagccagttagcatcggtaaaagttcagcaagcattatcagaccaaaagtttgataagctttatcgaaaatctcttaaagcaaaagtaaaaaggcagaatcaaaatattgaactaagaaagctttatgcttcaaaggcttatcggttcgtatggatgtggtctattgttttttttattataatattgcttagtggttataaagatattgagattataggaactgatctaaaaataaaatcaacttttgagatgaacgataaagtattgatagcattaataactggggtgactattaatatagttgctgtttttgttattgtaatcaagaacctatttcctaataatgaagaggaaataatagtggagcgtgaaaaaaatattaaagaagaaaataaatctgtaaaaattaacaaaaaatag

SEQ ID NO: 301016 - DNA, 852 bp, Proteus mirabilis
atgctaattattgaaacaacgcttatcttacgccgcgaaattaagcgactaaaacaagaaggtaaacgcattgcattggttccgaccatgggcaacctgcatcaaggtcacctaaaactgatagaagaagcgcgtattcatgctgatgtggttatcgcctctatttttgttaatccaatgcaattcgatagagaagccgatttagcaaactatccacgaaccctacaagaagattgtgagttactacgcgataaacatgttgatattgtctttgccccatcagcgaaagagatgtacccaaatgggatggaaaaccaaacgattgttgaggttccagtactttcttctgtgttagaaggcgctagtcgcccaggacatttccgcggtgtaacaaccgttgtaagtaaactattcaaccttgtacagcctgatgtcgcgctatttggtgaaaaagattatcaacaactgcagatcataaaaaaaatggtcagtgatttatgttttgatatcagtattattccagtccctattgtgcgtgataaaacaggattggcatttagctctcgaaatcgtttgttatcagataatgaaaaacaacaagcccctgtgctttatcaagctatgcaacagatagccgagcaattaaaatcgggaaaccttgatgttaaccaactattacaaactgccaaagcaacccttgaacaacaaggctttcgtgctgatgaatgttttatttgtgatgcacaaacactagcaccactaagcgaagagagccgatgtgccgttattttaatggcagcttggttgggtaacactcgtttaatcgatagccaacaagttagcttagtctaa

SEQ ID NO: 301017 - DNA, 1260 bp, Proteus mirabilis
atgaaattaagaaatgcaataataattggcgtaatatacacaccatcaatatgccaggccgtagaacaaactaactataaatattattctgatcatatttctattaatcaagactcttcaacaatagttaaacctaatgaaattaatcctaaacaagcagaaatattaatagcaccaaaaaattccaaaggtatttctcataataaatatgatacatttgatgtaactgatgctggcattattttaaataataaagaggttgccgctgagactattattaatgaagtggttaatggagcaacgtcattcttagcggggaatatcgcggtagctggcaatgcagctcatgttgttatagccaacccaaatggtattgaatgccataattgtagtttttcgaatacattatctgaaacattagtaaccggaaaacctattattgataatgatgaattaattggttaccgattagaaacatcaatctcttccttagataaaagagcttttggtggtaagccaattgatcatattggcaaaattgtattcagtaacaaagataatcgtagttctgaacgtcctttcaataaaattaatatcatatctaataacattaagttagaaaacggatttatatcttctaaaaaagatataattattcattcaggtaaagaagaagtaataattaaagaaggcgaaagtatcttaaaacaagaatacgctatgcgctcacatataaaaagagataatctccccagtcagataatattaggtgataaaaatggtgatcctaaaaaacaaggtttaatctcttctaaaaatatcattatcaatgcttctgatactactatttataattatggtagtttagaaagtagtaaccgtagtaaaaatgctatacaacttaatctaaataaaacaatatttaataaccatggatatattctcgccagaggcggatatttagatctgaaaaatgggtctttcttccacaatatggaaagtggaactattggcatgccatattggcttaatacaggcaaaactaataatatatacagcggtatatatataggattaatacccaaagatactattagccgaatgaaaaacttaactttaaatattagtgaggatagcaatctgataaatgatggtattatcatgacagaacggttacacacacgcgataagaatataagcaatattcaaaataatagagaagatgtccaattttatattaaattactcaaaataaaataa

SEQ ID NO: 301018 - DNA, 1110 bp, Proteus mirabilis
atgcttgaggttattaggaaagatttattcgatattagaagtaaattagacaatggctactatcaaatatttaaagatagactggtagatcctacattctatttagataatattcttgttcaacaagaaggaaagattttatcgtcgacactctgtaacggtgcaaaatatataatagcagatagtgaactttataatagtattgaaaatggtgatattatatctgtttcaaatagtagaattagagttattttatctcgcaaggcaaatcataatacgttacttgttactgagcgttgtaataatttatgtcaattttgttctcagccccctaaaaatagagatgattcttggcttttagatgatgctctacttgcgattgctgcttttaatttcgatggtgttattggaattagtggtggagagcctttactttatggcaataaatttattgattttattagagaaataaaaagattggcaccgaggacagttttacatgtattaacgaatgggcgaaagttttctgatatttattttacaaagaaattattatctgaagcaaaagatatgaatatttcatttgggatccctctttattcatctcataaagaaattcatgatgagttagttgggcataatggtgtatatgaagaaacaattatgggaatagtaaatgcaggtaatttaggcattaatattgaattgagaataatcccaacaaaaataaattatcttcactttcataatattgttgaattatgtgctagagtgttctcaaatattaatcaaatttctattatgaatcttgaacccgttgggtgggctaaaaaaaattgggataatttatatatctcacctgataaatatatagaaaatctgaatcttgctatcaacatggctgatattagtcaattacctatagctttatttaattatcctttatgtcatttacctaatagtttatggaaatatactattcaatctatttctgattggaagaattattatccgaatgaatgtgaccaatgtaaaatgaagagtcattgtggtggatattttagttcttcatatggaaaatatcatcaaacagcgagggcgatattatga

SEQ ID NO: 301019 - DNA, 1389 bp, Proteus mirabilis
atgaaactattgccatttaattttgaattaattgatgaaaataagtattttatcagtaatttggcagggtttagccatgtcttaaatcagatggatttatctaatattatagattttggtaaaagtaataatgataacttaaataatatacttaggaataagttatttattactaatgatgatattcaactttctgaaatgatgatagcatcgggtttgggaaaaaaattaatgtcagagatgacattttctccgatatttatgattgttccaacattacgctgtgatcatacttgcaagtattgtcaagttagtagagcctctataagtgcacaacattatgatttagatgagaagaatatccctaaaataatttcattaataaaaagaatatcaaaaaaaaactataaactagagattcaaggtggtgagcctttaataagatttgatttaatcaaaaaaatatataatgaggcagtattccaacttggtcaagagaatattgagtttgtaattacttcaagcctttcattactcacagatgaaatgattgaatggtcagaagaaaaacctgtaatctactcagtatctttagatgggaatgaatatgtgcataataaaaacaggatattacctacaaagaactcatttcaaataatcacagaaaatataaaaaaactacaacatagattaggtcgcgatagagtttcaacagttactacagtaacaaaggaattgcttcataatcctcaatcactgattgatgctcattttgaattagatgtatttgatctttttattaggcctataagcccttatggatttgctgagaaaaaagaaagctacacaatatctgagtatattaatttttatgaaaaattattagatattattttcgaggaaaataaaaaagggtttccttttgttgagcattctggtgctatacatataaaaagattatataatcctggtttttgtgggtatgctgatttaaaatcccctagtggtatagtatttaatagcttattattcaattatgatgggaaagtatatggaagtgacgaattaagaatgcttcagcaggtatactctgatattgacttttctttaggtgactttgattcgttatcatttaataaaaacactatctataataatttactttctaattcatttaacatgctacatgttggttgtgaaacttgtgcttttcagccatattgtggcgttgacccttgtcaaaatatcagtttatttggtgagccggttggaaataaaagtctttcacgattttgtctttatcataaagggatgtttaaactactagtaaaaaaaattgatgaagataatgcaggggctacattactaaaaagttggatttatgcttga

SEQ ID NO: 301020 - DNA, 159 bp, Proteus mirabilis
ttgcgagataaaaaaataagaatggaagatgggggagggtatgatgaaattgaacattatggtttacttttaatgaaagaaggatatatgcaaccttggtatcttaatcacgatcattattacgatttagcctttaaatataaaaatatgaataaatag

SEQ ID NO: 301021 - DNA, 360 bp, Proteus mirabilis
atgaaacataatgtgcgtattcgggtcgcttcaatagttgcggcgcataaattagataaaaaaattactagtgtatttgattattcgaaatcatcctatgtgagcctcgatgttaagttagaaagaggtgtcgtgaacggatttgactacacatcctcgtcttatttttctggttcaaactcaggaacactaaacttttttaactatgactcaggcagttatgtagaccttaaagaatctggcagcaagtattcaggctttgattatgagtcatcctgttattttgatgctactatttctggaaacaatataaccatattcgattataaaacaagtggttattatcaattttctgtttga

SEQ ID NO: 301022 - DNA, 501 bp, Proteus mirabilis
atgaatggcgaactaaaagaaggttggtatgagaatacagtgaactattggcgtggagatgcgtttccaggctctgaacctatatgggaaaggatcgtcgaaggttatttaacgatttggagttccgttgttaggaaagaagcagtattagaaattgaggcagtctggccaaactcgttgaaattattgaactactcttgcttgagtgctgcttatggctctttagatggaatgattttcccatttttgatgcaagatgatgaagataatattaaagttacctatatatctagaatggttcaagctaacgacaaaaatttcattgaagcgattattgaaaacgcaaagaaaatgccttcccttagagtgaacttgaactatacgacaactaatgacgaagagatcagcacacctgatctaacctttttgaatgtctcactatcctctgacgataattgtgcctttgccgactttgttaaactcgtaagtcattctcaatga

SEQ ID NO: 301023 - DNA, 267 bp, Proteus mirabilis
atgaaaagatatgtagttgtaactgtattggcctcactgtggttgatgacatcaccagcctccgccaccagccagccccctaaaaataccatttgggaatataaaggcgatggcgataaaaccttatggcaagcatgtgggagccaaaacagtacctgtaggattgtgggctcaaccaagcattatgttgctgtactgaatcataaatccgcatcaggttgcgcatttggtgatttttatatcgtggcaagaactgacggaaactga

SEQ ID NO: 301024 - DNA, 177 bp, Proteus mirabilis
atgacgctattaaccccaccagcatcgcatcccacatattgccctcactgttcttctgagcaagacatcattgcatggagctcgggctggatgtgccgcgattgcggtcacgaatgggccatgcctattcaaaataaccattacatcatgaattcatcatcacataaggaagcttaa

SEQ ID NO: 301025 - DNA, 333 bp, Proteus mirabilis
atgccgaccatttctatcaattggtgtgccattaccagtaagcaatctattagcctactcacgcctgaacgtcgttttaatccactacaaccctatcaactgatttaccgtgaaggccagtggtatttattggcggaatatcatcagcaagtgcatgtcttgttgttggatgatattcaacaggttcagccgctcaatacccccttcacaccgaaacacgcagtgatgcaactgtcacaacaaaacagttttatcgcagcactaccgcattttagattgatatcacaagtacttacctctcttccatcacacaaagaaaggagccgaccatga

SEQ ID NO: 301026 - DNA, 414 bp, Proteus mirabilis
atgtttcagaccaaccgaaaatatgaccgaatggctgtgcgactctctgcgctgattgcccgcttaatggcgggcgaaagccttgtgctctcatgtttagctcaagagttcaatgtttctgaacgcacgttacaacgggatttacgtgaacgcttggtttatctgggtgtagaaagtcggcaaggttgttatcgcttgcccatcaatacgctaaaagcttatcgagacaaagatattctgacctttgtgaaacagattgggataattcgattgtttccggggctagacagccgcttactggggttactgttaacccaacaaccccatgcaccttgtttgatttggcatcacgcccataagatttcggctttgcatgccgaccatttctatcaattggtgtgccattaccagtaa

SEQ ID NO: 301027 - DNA, 885 bp, Proteus mirabilis
atgcctcagcactctcactttaaaaccatcctattgattctacctcattcattccaaacctcttttttcaatcaactcaatcacctaatcaactactctcccaccatcggtctgatgggcaaaacagggtctggaaaatccagtcttatcaacgccctattccaatcctcactatcgcctgtaagtaatgtttctggttgtacacgccaagcccaacacttcagtatgaagatgaacaaccatacgctcacctttgttgatttaccaggcgtaggggaaagccttgagcgagatagagaataccaccagctctatcgtcacttattacctgagctagatttaattatctgggtactcaaagctgatgatagagcgtggtcttctgatgaacaatgttatcgcttgctcacggaacaatgttctaacggtttggtgtgcggtgatgtattaggggaagtgcgtgtcccccataaaggggatgtggtggggaaagtgattgaaggggcgtatgaggtactcgatacgtttgagcaagtggcagaaaaacgcgaaagtatgcagtcgttattgctacctccacccgtccagcaagcctttgctgaagcggctttgacctaccgttttggtgaagagttccagcccgtcacgcgagagcaagttctacagcctcgacgctttgaagataaaaaagaagacctttggacggtgtaccaacgtctacaagaaaacctgattaaagggggattatcaggcagaactgcaaaaggtaaacgcgctcgtactcgttcggtgaatgggattgatggctatatcaaactcaataaagccctgtgggtgatggcggataccttatttaaccaactcgtccctcgccaacccaactaa

SEQ ID NO: 301028 - DNA, 984 bp, Proteus mirabilis
gtgaatgaggctgaatttcttgaaaaatggcatatagaaagacccttctaccaagcttggggcaactttgtcgtatctaaaatcaactcatctattgaattgctaggatatgatattaacaattacgtaaaaataacaccttttgctcgaattaaagacaacaattcacttattgacaaagctttttatagacctgacaagtcatatgaacacccctatgatgatattgaggataaggtggggtgtcgatttgtagtgttacttattgatcaagttgaacaaattgccaatatcattagatctgatccatcttggattgctgaggaatgtagacatttcaacgatgaacgtaacaagagtccattattattcacatatcaatctgtacattttgttgtccgggcgaaagaaaaattagagtttgatggtacaatcgtaccagaaagtacaccatgtgagatacaaattcgaaccctgcttcagcatgcatacgcggagctaacgcatgattcaatttataaaactaacaaaatagttaaaccagaaatccatcgaaccgtcgctaaaagcatggctttgattgaaactacggacgatttttttaaagaggtaagtactagcttacaaggacctattgagcagtatgaaattgtatcaatacttgattctttatacacagaatttctatcttcaccacctttaaaattgcaaaaatcatcctattacgttttagatgcatttgaagatctttttgaaagtaagtttcaattaagaatacaaaaaataattgagaatgatgcctatgacttgattaatgtgataaaaaataaagcacataaaaatccattttataagcaaagtatctctatttttactggctggttaataatagagcgaaaaaatagagttgtaatagactggcctttagattcagatcttttagaagaatttgcgtcagctctttccgtctcactagagctatag

SEQ ID NO: 301029 - DNA, 1107 bp, Proteus mirabilis
atgcatttaactcacttagaaatagataaaatttgcatccatcagatttttaaaagaaacccagacggcactaagaaagcccctgaaaaaagttcagttcttgttaaattcgatacggtagctatggagaccttcaaacaaagagtaatcggagctctaggttctcaatcaaaagccgtagacatgaagatcatcgaacaagataaagacaaaacaccaagtttattcacatctctaagaacagttacagatgtaacatttattgacacatcatacgtattagcagacaaacttgctgatgctcaaaaacgtaaaggtttatcgggtggtatagtagtagtgttcttgggttcttttggttcaaccgaagcggataaaagaaaaaaaatagttggcgttataaaggctgatatttacagcgcctatcagaaaattgaagatgagaacactcatgaaatctctcttaaatatgtaaaagaggctttattaacaccatcttccaagctatttaaaaccgcagcatttgcagaaaaacatcccaaatcaggcgattcaacaactcttgacttaaatgatagctgggtagtagctgtatccgactatcaaattagccaagtagatggaaaaatagctgctcaatatttctatgaagcattcttaggttgcggatatccagaatcaagtgcaagaaatacccaaaaattctttgaatctgttaaaacctttatcaatagtctagaagtatcgaacgaagaaaaatacgagttaaataacgcgctagtctgttatttaaaactagataaatcagggataatatctccagataaatttgccagaacatatttcacccctgacactgctgacgactttataactcatttaacggattcaggagttcctactacatcctttacaaaagatacgcagcatgttaatagcaaacttaaaatgcagaaagtgtcatttggacaaaatatacgcttattagcaccggctgaaatactaaaggacaaagtaattatggagccgattgtatttgatgaaaacggtattcccgtaaattggactaaactagttataaaagaaaaattggccttaccacagtga

SEQ ID NO: 301030 - DNA, 471 bp, Proteus mirabilis
gtggaaatcattaatactgatatatttcttttgaccgaagttgaaaacagtattgtcaaactcaaatcaaaggttgattgccttaagaggaaaacaaaaattatcaatatattgactcttcttctcggagcttcgattactatcactttgggactaaccattagtggctaccaagaatatcaaagaaatttggccctctcttttggagctatacttactgctgtaaacggttggaatgtgatatttgattataaaaaattatggataagacaaaagtcgacactattgcacttatatcaattaaaaaatgatatttgtttctcacaatcagtaggacaaatgtcacatgacaaacaattagagttatttgaaagataccaaaatatttgggaagacaatggtagtgaatggcgtaatataaatcgtacatcatcccgtaattccacctcatcaaagaattcagatgattag

SEQ ID NO: 301031 - DNA, 1779 bp, Proteus mirabilis
ttggttgttgacgaagttcaaaatattgaacgagttgctaatgacagtgaccagagatcaaaaatactatatgattttttaaaagaaataaaaaaccaaacagttacagataatattattctaagtgggccaaggttgaaaaatattggaaatctagggtttgatatatttgatgaaatatcatacgaagctgaaactaagcttcctcctgttgtaaatatcacctactcaatttcagaatcaggaaaaagatactattttaatcagtatagtgatatttatgaaaatcccactactatagaaatatcaaatccatcagaaattaaaggtatcggtggtactcaatacaacaataatttccacaattatctattatcaatcttgaataaaattgattcaaaaaagagtaatttaatattttcacctaccgcacgacaagctagaaagacagcaatatttttttcagaaaataaaccaaacatcgacagtgatcagatagagagcttatcagaatatattgagtactttgtacacccgcaatatgatcttgctcaaatagttaaatgtggtgttgcctatcatactggaaaactacctctacacatacggtctgctatagaggatgctttttcatcaaacatcataaacaatattgtgtgcacaacaactttaatgcaaggcgtaaatttcccagcgtcaaatattataattagaaatccgtatttattcgtaaaacgacgaaatcacgcagaaaatgttaagctatctaactacgaattctcaaaccttagaggaagagcaggccgacttttgaaagaatttattggcagaacaatagtacttgatgaatcaacttttgaagttgaacctactcaagattctctattcgaacatgtagaaaaagaaattaatactggttatggtgattattataaaaaatataaaaatgaaatagaggaaaaaatatcaaacgacactatagcagatgatggaaaagagaagcacttactgacgtatattcgccaaacaatctttcgtcatcgtgaggctagtatcacaaaactaattgatgtaggtattgatatagatgaaaatcaggtaagacatacaatccaatcattagatcaacttgaagtaccattaagtgtaatatggaacaaccgatattgggatccatttgatctagagttgatttttcaacacaaaaaaaataaagagatagaacctatccctaataatatttgggatcaaaatttacaaagttctttgataagagcaatgaccagcttttcagaaaaactcccttattattttaaaaaatatattagtaatacagatgaggataaggaacgactgaaaaaatttatttggagtatatgtacatacgcaacagattggggtcgcgaaaaactattacgggagatcttagctgatagagatttttctggtaatgctagtgacgatattgacaatgcagtacaaacgatcacttcaaaagtatgctttggcttacctatgctacttaagccattagcagacatgtcacctattgagaactcagttttaggtatcattgaaacaggagcattcaataaaatcacaaatttccttatttcaaagggagtgccaagagatactgcaatatttttaaaaaacacatacctccaagagttcgatatcgatgagcctaatcttcatgacgtacaaatttatttaggcaagataaaatccaatttatctccttgggtagaaagtcaaattgagagcgtatgcatttaa

SEQ ID NO: 301032 - DNA, 1221 bp, Proteus mirabilis
atgtccttttctcaagcagtcagtggtttaaatgcagcagccgctaatttagatactattggtaataatatctcaaactccgcaacctacggttttaaaggtgcaacagtctcttttgctgatgtttttgccggctctggtgcagggcttggtgtaaaagtatcaggcattagccaaaactttaaagatggtagtatcactactactaaccgcccaaccgatgtggcgatttctggtggtggtttcttccgtattgaagatagcaacggtggcgttttctattcacgtaatggtgaatttggcaaagataaaaacggctatctcactaatatgcaaggcatgcgtattacaggttatccagtacaaaacgtagacggtaaaaatgtagtacaaaaaggggcaacaccaacgcctatcattattcctaccgatatgatgaatgcaagtgcaaccgataaaatggatatgacggttaacttgaattcagctgaagaggctatcgatcaaacaacacataaatttgatcccaaagataacgattcttataactttagtactaacgtgacaacctacgatagcttaggtaatgaacataacctgaacttattctttgttaaaactaaagataacgaatggagtgtttatgctcaagacaccacaacaggtgagccagcacaagatcttggtaaattagtttataaggataacggggtattagatgaaacagtatctaagctgaaaaactttactactgttgcttataaaggttcacaacccatggatatggaaatgaactttagtggtagtacgcagcaaaaagtcgctgaatcaagtgtctctaaactcgcgcaaaatggttaccaagcaggggaatttaccaatttccgtattgagccagatggttccattatggcgacctactcaaaccaacaaagccaagtggttggtcaaatcgcattagctaactttgccaatcctggtggcttaagttcacaaggtgacaatatgtggtctgaaaccaatggttcaggctcacccattgttggtgtggcaggctctggcgtattcggtaaattaaccaacaatgccttagaagcctctaacgtagatatgagccaagagttagttaacatgattgttgctcaacgtaactatcaatctaatgcgcagactatcaaaactcaggatcagatcctgcaaacactagttagcatgcgctaa

SEQ ID NO: 301033 - DNA, 846 bp, Proteus mirabilis
atgaaatttgttggcgcacatgtcagtgctgcaggtggtgttgatcaggctgtattacgagctcatgagatcaaagcaacggcatttgctctttttactaaaaatcagcgccaatggaaagcagcccctttatcaactgaatcgattgataaatttaaaaaaaattgtgaaatctatggctatggtccagcacaaattttaccacacgacagctatctaattaatttagggcatccagaagaggaagcccttgaaaaatcaagagccgcttttctcgatgagatgcaacgttgtgagcaattaggcattgaattacttaattttcacccaggtagccatttaaaaaaaatcgatgttgataaatgtctgcaacgcatcgctgaatccattaatatcaccttagataaaacccaaaatgtgaccgcagtaattgaaaataccgctggacaaggcactaacttaggctatcgttttgaacatctcgccgccattatcgatggtgtggaagataaatctcgagtgggcgtttgtattgatacttgtcacacttttgctgcaggttatgatctacgtaccgttgaagactgcgaaaagacctttgctgaatttgataatattgtcggctttcaatatttaaaagccatgcacttaaatgatgctaaaagcgaattggctagtcgtgtcgatcgccatcatagtttaggccaaggcaatattggcaaagtaccctttacttatattatgcaagatacccgttttgatgggatcccacttatcttagaaacaattaatcctgatatttggccagaagaaatagcttggttaaaatcacaacaaactcaataa

SEQ ID NO: 301034 - DNA, 417 bp, Proteus mirabilis
atgtctgtagtcgttggtgttggagtgatcatcgtcaatgaaaaaggtgaagtattattaggtaaacgctgtggtaaacacgccccttattggtcaatttttggtggccatgtcgatccgggggaaacctttgagcaatgtgctattcgtgaaattgaagaagagattggcattaccatccctactcctgaagtgattgggatcagcaacaatctacaaacttatcaattagaaggtaaacataccgtatctatctgtatgattgcgcaatatcaaggtggcgagcctaagttaatggagccagataaatgttctgaactacgctggtgctcacctgatgatttacctgaaccccattttgaagcgagccgtaattctattgctttatggaaaagtaaacgtttctatcaaccttaa

SEQ ID NO: 301035 - DNA, 1242 bp, Proteus mirabilis
atgtcagaagtcacatccattgctaaacgcccatctatactcggtggtgcgatgattattgccggcacggcggtaggcgccggtatgttctccatccctattgtgacttccggtgtgtggtttaccggctctatctttttactcatttatacttggttttgcctatttatgtctggcttaatgatcttagaagttaatcttcactaccccctaggatcaagctttcatactattaccaaagatttattaggtaagggatggagtaccattaatggtctttctattgcttttgttctctatattttaacttatgcctatatttctgcaggtagctccatcattgtgcaaaattttgctaatgtggttagcttgccacaagccgttgcaggcttagtatttgcccttgttgttgctttcttcgtttggttatcaacccgagccgttgatcgcttaagtaccatattaattggcggtatgattgtggcttttgtatttgctatcggtggattatttaccgaagtgaaaatgccagtattatttaatacaacagaaagccatgccagttatttaccttatgcactagccgcattaccttatttattaacctcctttggttatcacggcaatattcctggattagtcacctactaccgtaaagacggtaaagccgtgatgaaaagtctattaattggtaccttgatttcgctggctatctacattttatggcagtttgttgtacaaggtaatattcctcgtgaaggctttaaacaagtcattgctgaaggcggaaatattggtaacttactggcacaaatgcgtatcaatacagcaaatacttccgtttcattcttattagacttgttctcatatatggcattagcgagttcatttttaggcgtgtctttagggttatttgattatttagctgatttctttaaattctcaaatacagggacaggacgtttaaaatcggccatcgtaacttttgtcccacccaccattttagcgattatttttcctgatggcttcttgtatgctattggctttgcaggacttgcagccactatttgggcggcgattattccagcattaatggcaaaagccagtcgccaacgtcatcagcaacaaagctttaaagcacctggtggcacctttatgattatctttgtgatcttatttggtgcaattaatgcgattgcacacatattagcaaactttaatctcctacctatttaccgctga

SEQ ID NO: 301036 - DNA, 573 bp, Proteus mirabilis
atggcaaaagctaatgaaattaagcgcggtatggctatcagttataacaataaattattattggtaaaagatatcgacatccaagcgccaagtgctcgcggtgcaagtactttgtataaaatgcgctttactgatattcgtacaggccaaaaagtagaagaacgttttaaaggggatgatatcctcgatactatcaacttaacacgccgtgcagtcagtttctcgtatatcgatggtgatgaatatgtctttatggacaatgaagattatacaccttacaccttcaaaaaagatcagattgaagaagagctgctgtttattccagaagaaggcttagctgggatgcaggttttaactatggatggacaagttttagctttagagttaccgcaaactgttgatatggaaattatcgaaacagtaccgggcattaaaggcgcatcagcgagtgctcgtactaagcctgcgactttacctactggattagtcattcaagtccctgaatatctttctacaggggataaaatccgtattcatattgctgaacgtcgctatatggggcgtgctgattaa

SEQ ID NO: 301037 - DNA, 327 bp, Proteus mirabilis
atgaaaaaatatctgaccattttatgcagtcttctcgtttccagttcgatatcatttgcttgggcgtcaacagcacagcaaactacaggacagatttatgtacgaggggcgattgttgatccagcttgtgaaattaatttcacactcgatcaagctgagtaccaatgttacaaaaataacaaagtctttacatcaacccagtctattttccctacctcttttgaacaatcatcatcaattatactgcctcaaaatatggggaaagctgaaatccgttggatggatggcgctgaaaaaaatggattgattaatgtgcaatatttttaa

SEQ ID NO: 301038 - DNA, 1533 bp, Proteus mirabilis
atgcttttaaaaaagagatatatatttgttattgttggaactttaacttatttacttaatgttttgatatacaataaagattctagtattcctcatctaacttcatttgcttttttattattcattctttttgctactaaaagtaaaaataaaataattaacattattggtttcattctctcttttttactttttcttgaatgtttttatacagtttcttttaaagaaaagatatctacaagcatcttagattccatcatcgaaacaaacaaaactgaattcttattaatgttaagtagatatattttaacaataatattaccatctattattatatcaattattttttttaaatttattaaaaaaaagatcacacttaatataaaaccccaaaaaataataacaatcattatctcattatatttattttgttttttttcaataaactctgttttttcaacggcagataaaagatggatagctgacattaaagaggatgaaaaattattttctatttttattagagatcgattccctatggtattgggaaatataacttatttagtatcatctatatataacaatgtaaaatactcatatacttttgatatagaaaaatttaatagtgttataataaaaccccaaaaaatagaaaataaattaattgttttagttattggagagtcatcattgtcatcaagatatagtgcgtatggatacccaatcaatactacaccaaatataaaaaaaatattttcccagccagacgcttgtattattaaaaatgcacactcaagtgctcctatcacccgtaactcagtatctatgacattgagtttttacactccagaaagtaataaaaatctttttgaaaacaaatctattattgagatggcgaaaagtaatggttaccaaacatattggattggctcacaaaaactaaaaggcttacatgattcaaaatatggatttattgcaaaaaaaagtaatcatatttggttaactgattttaaagatgatgaactaccgtatttatttgaaaaagctctacaagcaaataacgaaaataaatttattattatccatctatggggaagccattacccttataataattttgataatgaagacgaaaaagcccttcccaatgtagaaaaatatgatttaacagtacatcatacagataaaataattaatctactatataaaaaactaaaaacttcaaatgaagattatatttttctgtatacatccgatcatggagaaattgtcaataaaggacatggcttttataaaggaaaagaacaattcctagttccttttttatataaatctaataacccaaaatttgattgtgattttattgagtcttttagaaataaggatggttggctgagtggtctaatgaataaatatattctttcaaaaattattggttatcaacttgatgaccaatttattgaaaaagaaaaaaatcatgatcgtatattgaatgcaaatgaagaagttcaagccttctctgagattcaataa

SEQ ID NO: 301039 - DNA, 813 bp, Proteus mirabilis
atggacttacgacgaatacgggtggggattgaagttgcaggacgattgcaatggtatgaaggattgcgtattaaagccaacggtaccaagtatgcaaaccccttacaaaacgaatgcacagttagcattgatggattaaacgcccacactcgagattatctgctcactgaaaccagcccttatcataaaagcaaacaaactcgccgtctttaccttgaagtaggacgcgtcaatacgggattatttcgtatctttaccggtgatattgtcagtgcagaaattgcctcgcctcctgatgttacgttaaccattaaagccaaaactaataatgccagttcaggtgatattgtttcttccagtggtggcgccatgcagaaaatgagcgagatcgcttcatcagtagctaaggattgcaaggttagattggactttcaagccaccgataagaatattgccaattggtatttttgcggttcagcgttacagcaagtacaacgactgcaggaagcaggaaacgttaaagcctttattgatgatgatatgttatttgtaaaagatgacgacaaagcactaaaaagccgtttgcgtattttaaatatgaattcaggcatggtgggtataccgaaagccaccgaaaaagggttgtccgttacctacttaattgatggcgcctcagaactaggagggatgctacgactcgagagtaaatttaattccgcacttaatggtgactatattattgagcaactgaaattcgatgttgcttcacatgatgatcctttcttttatcaggctacctgtaaacgagcataa

SEQ ID NO: 301040 - DNA, 528 bp, Proteus mirabilis
atgatcacagaggtcaaaatttttgatttagcgtcgttttctacactgtttgatagcgtgagtccgattcaaatcaatgtaagagatgagcataaggcaacacaatttcaagttgaaagtggtgaaactcgcagtgatcatgtgatcattaaccccgttgagattggtatagatttgctattaacgggagagatgaaaaacatcttctcatcgatgcaacaagcttttgacgaacacaaacttgttggtattcaaacccgagtaaaaacctatcaaccaatgttattaacgggttttaatcatgatgaaatacccgacatgatagatgcgataaaactgtcgctacggtttgttgagtggcgcaccgttgagcctgaatacggagatttaccgcctcgagccactcaaaagccaacgcagtcatcaacggtaaatcggggaaatgtgcaaacaaaagacgccgatactgagactaagaaaaaaggttcggtcgcaacacgtatcgcagatggggattggagcttctaa

SEQ ID NO: 301041 - DNA, 1194 bp, Proteus mirabilis
atggcaacaaaaaatatagttattattggcggtggtacggggggtactattctcgctaatatcttagctaaaaaattaaatgatgaaatattttcaaaaaaaataaagattacgcttatttcagataatccataccattattacaaacctgcatttatgtatattgcatttaaccttttcttaaaagaagagttaatgcgatcacaaagaagtttattaagaccagaaattgaatttgttatagataaagctgaaagtttcgattttaataataaaacagtttattgttgttctaagaaaaaatatcactatgattttctggtattagccacaggatgtgttcctcgtcttgatagaattgaaggtttagccgaagctggaaatcatttttatcaatatgaagctgcacgaaaattagcagataaaattgctaccattgaaaaagggcgtgtatttatcacggtaactttccctgaaacgccaaatgtacctcaccaatgtggcattgcgccaatggaaacaaccttgatgctggatgaatttttacgtcagcgacgggtaagaagtaatatagaaattgtttatacctatcctaccgtagctcaactattaagaaattgtctttttatgcagcaagaagtttgtgaagtacttcctgcggtcttttctgaacgagatatcaaagcaaagcgtggttttacattaagtcatgttgatcctgataagaaaatcgcctattcgaaagaaggagaagcagagccttttgatatcttaatgagcacacctcctataacagcggtagaagccattcgtaatacaggattaagtgaatataacaatggtgaaggctggctaccgaccgatcctgaaacattacaggtatatgggttaaatcaagtttatgtgttaggtgatacggttgatttgcctattagtaaggccggtggtagctgtcataaccaagcgggtgttatagctaataatatttgtggtgaactgcgttatggttatccggctgcaatttatgatggtcgagtacaagctgttgcccaaatgggattatcagcgggtatgccattacagtatgactataaacatgatgttattccaacacctccaacaaaactcggtggcatgttacgtaacggttataaccggggcttatattgggcaacggtcagaggattattgtag

SEQ ID NO: 301042 - DNA, 723 bp, Proteus mirabilis
atgatgaaagctgttattcctgtcgctggattaggcacacgtatgttacctgcaactaaatccattccaaaagaaatgttaccgatagttgatcgtcctttaattcaatatattgttgaagagtgtgcacaagcgggcgttgaagaaattattttagtgacacattcatctaaaaactcaattgctgatcattttgataccagctttgaattagagaatatgttagagcaacgaataaaaaataaattattaaaagaagttcgctctatttgtcctgaaaatgtaaaaattattcaaattcgccaagggcaagcattaggattagggcatgccatttgttgtgctcaccctgtcattggtgataatccttttattgtgttactccccgatgtgctattaaattctcactactgtgatccttgctatgataacttatctgccatgatcaaacgcttccaaaaaacagagcgtagccaaattatggttgaacctgtcgcactcactcaagtacatcaatatggaattgttgattgccaaggtgttttttgtccacaaggtaactgggcgcctattcgtcgtattgtggaaaaacctaatccagaacaagcaccttctaatctttctgtggtggggcgctatgttttctctgcagaaatctggccgttactcgatgggttgcctgcggggggttggcggcgaaatccaattaacggatgctattga

SEQ ID NO: 301043 - DNA, 312 bp, Proteus mirabilis
atggataaaaaagaggcggtcagtaaatttgatgccttagcttccgagctgaggcttgatattgtgaagctattggtgcagtttggtgaggatgggttagtggccggagaaatcagcttacagctggctattccaccaactaatctatcttttcatctaaagactctgacacacgctggtcttgtctatgtagagcaagaagggcggtttcagcgctatcgtgctaatacctcggcattaatgagcttagtgggatatttaatggagaagtgttgcgacaagcaaactaaaccaaaaaccgaattatgttag

SEQ ID NO: 301044 - DNA, 735 bp, Proteus mirabilis
atgaaagaggatacaaaattgttaaaagatgaactaccgaatattgatgtaaagcaattagaaacccctgatttaaatcggttatttcccaaaaaaatcacattacatccacctcgcattgtattgctctatgggtctgttcgagagcgctcatacagccgctttgtaacgaaagaagcagccagaatattaaatcaactaggggctgagactcggatttttgatcctcggggcttaccgcagcccgatggggtggcggaagatcaccccaaggtgaaagagttacgagatttggtgctttgggcagagggaatggtatggacttccccagagcgccacggggcgatgacgagtattttaaaggcacaaattgactggattcctttatccatgggcgctgtacggcctactcaaggtaaaactttagcggtgatgcaagtgtcgggtggctcacagtcctttaatgccgtcaatcaaatgcgggttttagggcgttggatgcggatgattaccattcctaatcaatcctctgtggctaaagcgtatctggaatttgaagaggatggacgaatgaaaccatcctcgtactatgatcgtattgtggatgtgatggaagagctcatgaaatttacgttactgactcgtgagtgcgctgattatctagtcgaccgctatagtgaaagaaaggaaagcgccgaggagctgtccaagcgggtgaatcagcgtagtatttag

SEQ ID NO: 301045 - DNA, 918 bp, Proteus mirabilis
atgttaatggcaatgggtttttcagcggcagcaacattggcttttgtcatggccgcaggctttattgcagataccgccagtttgccattggtggtgtctaatttggtcaatattgtctctgcggattacttttctattggctttacggattatgcggcgattatgatgcctgttaatttggtgtctgttttagcaagtctgtgtgtattaattttgtttttcaagcgagatattcctgctacatatagtttggccagtttgtcagaaccgttgaaagcgattaaagatcccgtgacctttaaggcgggttgggtcgttttgattctattactgattgggttttttggattagagcctttaggtgtacctgttagtgccgtggcagcgatggcagcggcattgttactggcagtcgctgcccgtggaaaggtgattaacatacataaagtcttgcgaggcgcaccctggcacattgttgttttttcactgggtatgtacttggttgtgtatggcttacgcaatgccggcttaacggattacattgcgttgttattaaatacatttgcagaaggcggtgtatggggagccgctatcggtacaggtgcgctgtctgctttgttgtcttccgttatgaataatatgcctaccgtgctaacgaccgcgctatctatagaagcttccactgcgaccggtgcagtgaaagaggccatggtgtatgcgaatgtgattggcagtgatctagggccgaaatttacccctattggcagcctagccactttgctatggttgcatgtgctagcgaaaaaaggcactacaattagttgggggtactactttaaagtgggggtggttttaaccactccggtcttgctaattactctggtggcattggcgttgcgtttaggtgctttgtcttag

SEQ ID NO: 301046 - DNA, 816 bp, Proteus mirabilis; identical to SEQ ID NO: 6090

SEQ ID NO: 301047 - DNA, 294 bp, Proteus mirabilis
atgagtcagaagaaagcctatacagctgagtttaaagaagccgcggtcaagctggcggtggagtccgagcaatccgtcaaccagaccgccagggagctggaggttaacgtcaatacgttacatacctggatcgccaagtaccaccgccagcagagcaccaagggcgatggtaaagtggatgagcagcacctctatgatgagttgaagcagctccgccgagagaacgcccgactcaaggaagagcgagagctgttaaaaaaggcggccgccttcttcgccaaagaatctcgctaa

SEQ ID NO: 301048 - DNA, 1176 bp, Proteus mirabilis
atgtcaaaatcacttataaccgcactcattgttgtcgcgcttgatgcgattggtttgggattaatcatgccggtggttccggctttattaaatgaatttgtaccggcagagcaaacagcatttcactatggtgtttttttatcgctttatgcgtttatgcaggtcttttgcgcgcccgttttagggcggttatctgaccgctatggacggcggattattttgctggtttcatttttaggtgccacgattgattatagcataatggcggcagcgcctgttttatgggtgctttatatcggccggattatctcaggtgttaccggagcaactggtgcaatcgcggcatcaattatcgctgatacaactaaacaggaagaacgtgcgcgttggtttggttttatgggggcgtgttttggtgcaggtatgattgcagggcctgctattggcggtgttcttggtgatatatctgtgcatgcgccctttgtggcaggggctcttctcaatgcaattgccttttgtttggtggctttcttgttgcccaaaacgccgtcacaaccgcctgaaggacagccagccaaaatcaatttgtttgaaggctttcgcttcaattttgcagttcagggacttgccagcttttttgcgttgttttttcttatgcagctgattgggcaggcgcccgccgctttgtgggtgatttatggcgaacagcgcttgaattgggatattggcacagcaggtgtgtcgctggccgtttttggtgcagcacatacattcgtacaagctgttttaaccggcactctttcaaagcgactgggtgaccgcggtgtgttgctgcttggaatgggcgctgatatgtgcgggtttttattgctggcttttatcacgcaaagctggatggttctgccggcaatttttatgctggccacaggcggcattggtatgcctgctttgcaggccattatttcaggtcttgtttgcgatgaaaaacaaggtgctttacagggaactttaacggggttgacgaatataacctcgattatcgggccggtcggatttacgacgctttatggcttaaccgcggggcagtgggatggttgggtttggctcgtcgcagcaagcctttatcttattgctataccattattgcgccagtcagccagtttattgcgatcttaa

SEQ ID NO: 301049 - DNA, 273 bp, Proteus mirabilis
atgaaaatggcatccccacccggaaactggaaaacccgctataaagccagtgatcttgcagaccatcaaagattagaaatgacctgcaagaaatgtaaccgccttgtttatatcaataaggcaatgatcagctcaattcgaggacacgagcaattatatttggacgaagttgaacgacgcgcacgctgcaaagctcaaaattgccgtggcaccatgcgcatggcaatggtgcgtcttgatgaactcagcggttttattggcgggattgcttga

SEQ ID NO: 301050 - DNA, 837 bp, Proteus mirabilis; identical to SEQ ID NO: 22759

SEQ ID NO: 301051 - DNA, 804 bp, Proteus mirabilis; identical to SEQ ID NO: 19906

SEQ ID NO: 301052 - DNA, 858 bp, Proteus mirabilis
gtgagatttcagtttattacggattaccgtggctctctctcacgttcacgcatatgtcgtttgatgggcgtaacagatcgtggtttacgcgcatggaaacgccgtcctccatcactgcgccagcgtcgtgatcttatacttctagcgcatatacgtgagcagcatcggttgtgtttggggagctatggtaggccgcgtatgacagaagagttgaaagcgctgggcctgcaggttgggcagcgtcgggttggacgtttgatgcgccagaataacattacagttgttcgaacgcgtaaattcaaacggacaacggatagtcatcataccttcaacattgcaccgaacctattaaaacaagactttagcgcaagcgcacccaaccagaaatgggcaggcgatatcacttatgtttggaccagagaaggatgggtctatcttgctgttatccttgacctgtattcccgtcgcgtgattggctgggcaacaggtgatcgattaaagcaggatcttgcattaagggcactgaatatggcgttggctttacgcaaaccaccaccgggttgtattcaacacacagaccgtgggagccaatattgcgctcatgaatatcaaaagctactgctcaaacatcaattgctgccgtccatgagcgggaaaggcaattgttttgataactccgcagtagaaagcttctttaaatcattaaaggctgagttgatttggcgcagacactggcaaacaaggcgagatattgagattgcaatcttcgaatatataaatggcttttataatccacgccgaagacattcaacactcggctggaaatcgccggtggcatttgagaaaaaagccgcttaa

SEQ ID NO: 301053 - DNA, 276 bp, Proteus mirabilis; identical to SEQ ID NO: 19894

SEQ ID NO: 301054 - DNA, 615 bp, Proteus mirabilis; identical to SEQ ID NO: 100706

SEQ ID NO: 301055 - DNA, 378 bp, Proteus mirabilis
atgcgttgcagatattcgagccggtcgagcagccggttggccgacgaagagttcgagccaggctcgaactggcgcagccacacaaaacgggtcacccgatcatcagccgtctcctcgagcaatgccagcaactgttctcggatcgacataggcagccgactggcgatcctcgtctcgatgcgtcgctcggcatcgacgagagccgcggcacaaagccgctcgatcgtggatgtcgcgggaaggacagtgcgggtgcgtcggcactcggctacgaagcgacgggcgatatcctcgttcgacaccgccatctcggcttctcggaacaaccattccttcagctcgctcgcaccacgtccggagaaggtgcggaagccgtag

SEQ ID NO: 301056 - DNA, 759 bp, Proteus mirabilis
atgtcaaaatttttagcagtaattagatgtggagataattcacttcataaaaactgggttaatgataatgcccaatttgatgtaattcttagttattttggtgaaaatatcccttattctttagataatataaaatatgtacaccactttaaaggatcaaaatgggaaggattatacgatttattccataaccatccagagttatgggctgattatgattatatctggttgcctgatgatgacttagacagtaccgtagaaaatatcaacttattttttgaattaatgcaaaagtatcaattcgatctttgccaaccagcattaacgaataatagttactattcctataaagacttactacaagaaccggatttaatatatagagaaactaattttgtagaagtaatggcgccctgcttttcaaagaaaatcatttctaaagcatatcaaacatttaatgaaaataaatcagggtggggattagatttttattggcctattttatttaaagaagaaaatattaaagttggtgttatagactctacaccaatacatcatacacgaccagtagggatagcaggccatgggagtagtgataaaaccttatcgcctttaaatgaacttcatcaattattagacaagtattcacttgaaatacctacgtttgtagcaacttcacttctaacccaaaaagggaaaatgatacaaaaaggcagtttcagctattctttaagggagtttatgaaaaaaagaaaataa

SEQ ID NO: 301057 - DNA, 1146 bp, Proteus mirabilis
atgaaatttttagtcgtaggctgtgggttaacaggggctgtaattagtcgccatctagctgatgctggtcattacatcacgataatagaccaaagatcacatattgctggtaattgccatacagaacgagatagaaataccggtattatggaacatgtttatggtccacatatcttccacactagcgatgaagtggtatgggaatatatcaataaacatggtgaaatgatcccttatgtaaatagagtaaaaacaacttatcaaaatcaagtatattctttacctattaacctacatacaataaatcaattctaccaaaaagcgctaaatcctgaacaagcaaaaacttttttaagtactatcacagataaatctattactgatcctaaaaactttgaggaacaagccctaaaatttattggaaaagatttatatgaagccttttttaaaggctatacagtaaaacaatggggttgcgaccctaaaaatctacctgcgagtattttaaaacgcctccctgtaagatttacttatgatgacaattattattctcataaataccaaggaatgcctaaacatggctataccgatataattcgttctatccttgatcataaaaatatacaagtaataacaaataaaaagtatgaccatagcgaaagagaagaatatgaccatattatatggactggaaaaatagatgaatggtttggctattgcgaaggtagattaaactatcgaacactagattttataaaacatgaaactataggtgactatcaaggtacagctgttatgaattacggcgatatagcggtaccttatactcgcatacatgaacataaacacttctcaccatgggaatctcataacaaaacgatttatattgaagaatatagtcgggtatgcgaagagaatgatattccttactatcccattcatttagaagaagaaaataaaatattaaacaaatacttagaattggctcaaaaagaaaaatatatcacttttgcaggtaggctaggtacatatagatatatggatatggatgtatcaattaaagaagcacttatgcttgcagaaaacttagtatcagatttaataaatcaaaatgaacttaagtcgttctaccacaaacaccaataa

SEQ ID NO: 301058 - DNA, 1548 bp, Proteus mirabilis
atgaaaaaactctttactaacaaaatattgcaatgctttattttgcttatatttgttttattactacatatctcattaggatataaattacgccctttctatgttctgacttttactgcttttcttctatgcttatctggatattttaaaagaacctatttcatctttataatattattgatgatggttggtgctatttattcaccaataggtttaaagtatggctcaccaaatatcaactctatcatctctatcttctataccaatacacatgagagcttagagtttatcttatctgtttctcctataagcttagcatttagttgtttacttatattatttggcttacttagtcttaaagtgaacctcttaattggaaagaaactatcactatttaccgtctctatttttatcttaaccagtgttacatggccggtaaaagcccttattactcatgatgattactcttttgaagccaaattacctataattcgcttttttagtgatataaaaaaacattatgatacagtgataatagaaaataattggataaatacagaacttaacaaaaaagatagttggttacctattaataatagtaaatataaaaattatattttagttatcggcgaaagtgccagaaaagactttatgcaaagctatggtttcccaattcaaaatacaccatttttagagaaatctcctgtaatacagtttgacgactatatttcatcagcaccatctactttattttctcttcctccttcattaaccttaaaaaatcataaaacaggtgatatggagttacaaaacaatatcatcacattagctaaaaaagcaggtgtctatacttattggttttctaatcaaggttctatgattggctctgattctattatttctactataggtaaacgtgctgatgtatatcacttcttaagcaaaggtgattatcataataacggaagaaccactgatgatgatttattgcctgatatcaaagcagctctttcaacaaatagccataaaaccaacctcattgttgtacatttaattggctcccattcacaagcctgtgctagaacccaaggacaatacgatgagttttttcaatcaaccgaagtctcttgttatgtgcaaagtataaaaaatacagataagttattagaaaaaatcgtctcgatgtcaaatgcaacgggcaattcatggtctttactctatttttctgatcacggattatcttatgaacataagggggaaagctatacaaaacttacccataatgatcaatttaaacaaaattttgaggtaccactctttatactttcgagtgatagtcacgagaaatatcacataacagcaagaagaaatggtagatattttatgacgttattttctgagtggataggcattcaagatcccaaaatttctaatcattgccatatgatttcaaatgatatttgcactgatcaagacacagttatcaactttcaaaaagaagaaatcgattataattcactaccagaagataaaataatatatcaataa

SEQ ID NO: 301059 - DNA, 1608 bp, Proteus mirabilis
atgaatagcaaaatattttttttactcgtagcaccttgtcttttaaatttatcgctgtctacaatcagtcaagccgctacggtaactaatagttacgtttttattgagaataatgtagataatgaatattttattaccccaagaacaaccgatccgcgtttttcgggtgccaataaatatacgcgttattcaaaatcttcacagctcagtttaggttatatggggtataccaatacatccattcaggccaatcaatatgtcgatatttggctagaaaattctcaaatagataagccatttgtgggtaaccgatgtatgaggcgttattgtacagatgatagtggctattggcctgcgcaatatataggtaaagacggggcttataaaatagtacagacgaatactaacggtgaatcggcttatgctcggggaatatttagtgattcggcatacctgtattttcgccaattacctgtaggcactatagagacctatagttatagagcctgtatgacaaaaacagactatgatcccagtaaaggcggatcttgccaaagtgttggtggcagaatgcttgcatcacatgaattcaatatcactaagtcagggcatatcacgttaacttcaacaggtgctttacaagaaatatttattgatagtaacggtaatcccacgattggcttaggctctcagttttgccgagtgggtattgtatcaaaccaaaatggtattatttgtcaggtgattgatcatgaaactactggggatatatttaccaatattaggcttaatttaaaaattaataatacactgatcccttttacgccagcggcaaatacaataaaaattggccccgatgatggcagtaataactggtataattataatacaacatatcccgctaattattattttaaagttaataataaaaatgtttctatctttttatctaatacctttttaaaaagactcgtctctagtaatgtcgactttaaaaatagccaagacttttttaccttttcatttaccaatacagcagtgcctcaatctgggtattatgagttcaccccctcaaatacacttattctgaaaccgagagattatggcataagcattattcctgctgattttaaccctcatcaatctaaaacgggaaaagtgggtaatgaagagccacccattgagtttaattatattgttaccaccagtggccctagacaagcagactctattactgcatctgtagaaggaccacaaacaacattaaaagggcaatcctattgtttattctcctccagtgataaccgacttaatgtgccttttccggcttatctctcatttaaaaatagtgatggtacggatgcaaaatatagagcgagttgtgatagtcatgaaatttcattaaaaaatgcgttatggacagaaacgccatgggatagacctgatgaagacttaggctctttttatagaacgaacctagatttaacttttccaatgaatgatgctaactcatttttcactttagatggtattgattggctaggaacagtctcagccagtggaacggtaacggttaaggctatatggactgggcctgatattaactaa

SEQ ID NO: 301060 - DNA, 1224 bp, Proteus mirabilis
atgctcttgagtccaaatcccctctataaagcgtattgggttgctcaatgccgttatactcgcaacggtgaacaattcaagggggtgatgaccgtagcaggtacaagtcaatcacaagctattaagcagatgcgccagtactttacggctcacccaggtgaatatacctttgcggactatgacacattaatccctttaatcacccatattgaacaaagttcaaccttagaattaccgttaatacggcaagtacgtgagcaacataatgcaaaggtttcagccgtattagtggataaatgcaacctcacacacccaagaccgtcagaaaaaggcgacattcattaccgtgaggggcaacctacgtttattgaatattcgcatctatatgtcgtcattgacagtggggaataccaccgccaaactgggcaacatcttgtaccgaaactgcatggctcgcaactgccatggaaatcactctatcaaggtgaaacccaagacagccttgaagataaagccccttatttggtacacattgccgccaatcaagccggtcagcggtttctcgctcattacttgaatttaccacataaagcgagtctcggattatttatcaatagcctcaaaccctttaccgatattcaccggcaaatgcgaaaactcacctatttatataatcaaaaactggagagttggaatttctttcgtttttatgatgttaagcactttatcccatttattgagtctttgactcacggacagttaattaatgtggtcaatggggtaaatgcgttctacggctatagtgcacaataccccgatggggttgaaatcacctttcacccagattatctgtatgacggcagtaagcgggagccgttatttattaatacctatttatacaatcactacgcgaatatcacacagctgcaaactgtgactaaagctaaggcactgattgaacaattttctcaggtagaaggggatgagttagagggtgacgcattaatgggctactgtatacacgcagcaaattgcagttttttagacgatattcatcaatcaaaagcgttattgtacgacttgcaagcccgctatttgtgccgtcatcaaccgagaacatggcagatcgccaatgaaaaagccgcaccttataaatacaaccaagttttattgagttaccaccgttatatcgcctgtttaaatacccaaggagaaatgaaatga

SEQ ID NO: 301061 - DNA, 2172 bp, Proteus mirabilis
atgtctataacaaattcaaaaaaatatcaaaggctgggtgataaggatggcaactcactgagtggggataagacattaacccatggcggtggcagaacatacgcgcaagacctcgctttacaagagcaacatagacaacttatagagaagatcttaagtggcgacatgcaaagtggcttagtgtttacttgtcagattggtggattacctgaagagactttccaagtcacgcaattcgatttacaagaagggatctcacaacttttcaccctctccatccaagccgtcagtccactctcggaaattgattttaatgatgtgttaggcatggcttccagtttgacggtaaagcgagatggtcacattctgcgtacagtacaaggtatcttagcggcggcagagcaagggaataccgatggggtaaaaacttggtatcaatttgtgatacgtcctgaaatgtgggtaatgaccctcaaacaagatagtcgtatttttcaagataccaccgttcctcatattcttgagacattactcaatgagtctcacattaaatatgataaacagctttatcacccagaagagcatttgcagcgcgcctacaccactcaaaaacgagaaacaatgtatgacttttggtgccgtttagccgcagaagaagggattaatttttggtttgaagaaggcccacagttattttatagcgaccgacatttgggcatgagagcggggatatccttaacctataacccacaatcggatacagatatcaccgatagcaccgccacaacgtggcgctatgttgaacaactctgtagcgatattcgcgttgataaagattacaatcaacttagaccttcctaccccttaagccatcaagtcacaggagaggttcatcaacaacatgaaatatttgaaagttatggacgctttgaagaagatgctcagggacaaccttttaatcagatacgttatgaacaatcacaaaatcagcgtcaagtaggctctgcgaccacaaactgcattgaattagcgccggggcgtatttttaccttgtctaaccaccccagtgcacgcatgaacaccacatggcaggtgattagtatctcacatcacggtgtgcaacctcttgccgacaacagtggcggtgaaggaacgcaattgagtaatcagctttcctttgtgccgagtactcaagagtggcgcccgccttaccgttttaaacctaccgccgatggggatgaattagccactgtcgtcggcccgccgggcgaagaaatctataccaatgagcaaggtgccgttacggtctattttcattgggataggcgtggtaaaccagaccatagcgcatcatgctgggtaagagtcgctcaaggttggaatggggacggatttggctttatggctattcctcgtgttgggcaagaagtgattatctcttatttaaacaatgatatagataaaccgattatcaccggatgtacctataatggtcgcaatcgttcccccattgatttacctaaacataaaacccgtaccacatttcgcaccaaaacccataaaggtgatgggtttaatgaattgcgctttgaggataaaaatggcgatgaggaaatttatcttcatgcgcaacgcgataataatattcatattaatcataataaaacccaatacgttgggcatgatgatagccatactgtcgccaataaccgtaagcatgaagtgtgtcatgacgaatttatccacatcgtcaatgagcaaacagtacaggttgatgtcaatcaatttgaacaaatagggaaagaccgtatcacacgcattgacaatagttggaaagaagttatccacgctagtcactttcaggaaatcggggaaaacaagcagtgtgatatccaaaatgattataccctgaaagccgcagggggtatccatacccataccaaaatccacaccttgcaagccagtgaaacggtcattatcaaaggcaaggctgggtcgattcaattggatgcacaaggtgtgactattacaggtaaaattctgctcaaaggcgatgtgtcaataacggggggcgccccagaagtggttactcagttagaagcggcggttaatgaagggttaccattagctgaggattgccgtgcgaaagcgatgaaaaaaggaacggcctaa

SEQ ID NO: 301062 - DNA, 1086 bp, Proteus mirabilis
atgaacgttatcttggcggaagggatcaacctcggcttgcgcaaaatggcggatgcgacaaacacccacaccttctgggaattgatccgcattggacggtggcatgtcgagggcgaagcctatgaccgggcgctggccatggtggtcgaggcacaggcagcgttacccatggcccggttctggggcatgggcacgtcggcttcgagcgacggacagttcttcgtcgctacagagcaaggtgaggccatgaacctggtcaacgcgaaatatggcaataccccgggcctgaaagcctatagccacgtctccgaccaatatgcgccgttcgcaacccaggtgattcctgcaacggcaagcgaagcgccttacatcctcgatggcctgctgatgaacgatgctggacgccatatccgcgagcagttcaccgacacgggcggcttcaccgatcacgtctttgccgcatgtgccattctcggctaccggttcgctccgcgcatccgcgacctgccatccaaacggctctacgcgttcaatccgtcggccgccccggcgcacctgcgagcgttgatcggcggaaaggtcaaccaagccatgatcgagcgcaattggcccgacatcctgcgcatcgccgccaccattgctgccgggaccgtcgcgccaagccagattctgcggaaactcgcctcctatccgcggcagaacgagctcgcgacagccctgcgggaagtcggtcgcgtcgagcgcaccctgttcatgatcgactggattctggatgccgaactccaacggcgtgcccagatcgggctcaacaaaggcgaagctcatcatgcgctgaagcgggcaatcagcttccaccgccgcggtgaaatccgcgaccgttccgccgaaggccagcattaccgcatcgccggcatgaatctgctcgccgccatcatcatcttctggaacaccatgaagctcggcgaggtcgttgcaaaccagaaacgcgatggaaagctgctatcgcccgatctcttggcccatgtttcgccgctcggatgggaacacatcaatctcaccggagaatatcgctggccaaagccttag

SEQ ID NO: 301063 - DNA, 1617 bp, Proteus mirabilis; identical to SEQ ID NO: 16548

SEQ ID NO: 301064 - DNA, 213 bp, Proteus mirabilis
gtgcggtatatattgttatttattatctctttgttttttattgtaatttttctattaaaaacacagggcagtaccaaaaacgatgttattaaccaacccacagaaatagaaaaaaaattaaataaaaaagtcgaaagatgtatgtttcactcaaaaataaaaactaaacgtttgccttggataatgttaacgcgtaaacgttcatgctcttag

SEQ ID NO: 301065 - DNA, 231 bp, Proteus mirabilis
atggctgaccaaatggctgctactattcgccataatcgggctagagggcaacatcaagtggcggcaatgtcagatatagtcagagatttatcaaggctaggctggaatgatcaaaagattggtgatgaattaggtatgtcacaagatgaggtattacgtttaaaacagattagtggcttagctgaattattttcagagcacgatttttcagaagcttggactattaaataa

SEQ ID NO: 301066 - DNA, 252 bp, Proteus mirabilis
atgacacaacgagcagaagttatacgaaaaatactacgtaatggatctgagtcagcaaggcaactagctaatattatgaatattagtcagctaaccctgtctagagtattaaaaatgttgtctaatgatattgttcgaattggttcgggtcgttctattcaatatgctttacgtgatggtttgcgtggcttcaactctgtaactatttatcgcataaatgaagaaggtaaaattaaattgttgggtaaatga

SEQ ID NO: 301067 - DNA, 744 bp, Proteus mirabilis
atggctggtaccaatatagaaggccatatggcatatcgtattaatagtaatttggtaatgaccattgatactcaaatgttgaattgggtaaatataagaggatctgtttgtgaacaggctacaccaacattaactgctcataccagtgaatttattgtacaatttccaatcagtgtgacattttatataaatgatatggttattgattctcagctacctataactgaaatggatctaggaggttatgttcgtgcatttacacgatcaggaacgagtcctcctcaaaattcttgggcattgaatgatgtcactgttcctatgcgattagcagcatcacaattaaacataacttcttcttgtaaaacagtaacaagtacaggacaagtaagtactttaaatttaaagcatgggcaactcaatacattaaattatgacagcttagttacagaaagtgtaacttataattgtgttttttcaaaagcaacaaaagtgggattacgtctctattatattactgataacgatcctcaaaaaagattaccgatggtgagtacccaaaacagtaataataaaatttatagtgaattgaccatgacagatgaaataaccgggcaaaaaggtaaagattttaaaattgacattaatgatttgagaacaattaagataaccagccatcttcaaggaacaaatgcgatagctggagattataaaggttcagcttggctaatcgttacgtttgattga

SEQ ID NO: 301068 - DNA, 969 bp, Proteus mirabilis
atgacagatactaataaaaaaaagttaacaatcaatgatatagccaaactttgtggtgtgggcaaatcgactgtttcaagagtacttaatcaagatcctatggttaatgaagaaacaaggaaaaaagttaactcaattattgagaaatataaattcacgccgtcaaaatctgcacgagcaatgcgggggtactctaatcgttcttttggtattatcgtcactcgccttgattcttatgcggaaaatcaagcggttagtgccatattaccgatcctttatcaaaacaacattgaccctattattttagaaagccaatttagccaagccaaagtagaagaaaacttaaaaatgctcgcccaccagaaaatcgatggcgtaatattatttgcattttcagggatcaatgtggctaacttagcaagttggaaacaaaaaatggttgttatagcaagaccactagaaggttttgtttccatttgtcatgacgatgaacgagctgttaacgctttaatgcattatttccatcgagacaaacattatcaacatataagttttatcgggatccaaattaatgatgaaacaacgggtttattgcgttatcaaacttatcttcaatattgccagcaacatcaattaatatctcaagctcaacttggtgagcttaattaccaaagtggctatttacttgccaaacaagcattagcaagcaagcctcaagctattttatgtgcgaccgactctctggcctttggtgtacaaaaatatttagccgaacagaaaatagatcatattgaggtggcctgcatcggtcgtaatgatctactcacctttttatttcctcaaactaaattctatcgattaggttttagagaaagtggacaagaagctgctaacatattgatacaaatgctagaaaaaaatattcctgcacaaaaaatcattatatcaagtcatgacttaaacccatga

SEQ ID NO: 301069 - DNA, 651 bp, Proteus mirabilis
atggcaaatttaaatgaaattaacgcttttcttaatgagataccaggatggttatcatcctttatcattgcatttattggggctatagttggtggaatgtttactcttaaaggtgttgatcgtgaagcaaaaatttctagagcagcagcaaaaagagaatcacttgagttacaattatcagtactaaaaggagttaaaggagagatttttactttaattaatttatacaataaaagaatgcaacatcacattaatgatataacttcaggaaaaatgttacagatgagttttcctatcggagatgacaattttacattctatgagcaaaatgcaaaatttattgcgaagttaaatgactctcctagggattcaataattaatatttatacttatgctcgctcactgatacagtcctttaaaggtaacaaccaacttgttatggaatacgaaagaattctttttggtatggctgataacaacaaagacaaaaaaatgtatgaacaattgtacattgcaaaaactgaagtaatgattgattacgcacaaggaatcaaagccattgatgctgaactcagagaggccataaaagaaggttttaatgttatcgatcatgaaatagaagcgttagaactagcactaaaaaaaatgtag

SEQ ID NO: 301070 - DNA, 414 bp, Proteus mirabilis
atggaactaggtaaattagaatggaaagaaatatataatttaatttctcttctgaaagagatagaactaggtaaattaggaaggaacgaaatatatactttaattcctattctgaaagggttggaactaggtaaattagaatcgaacgaaatatatactttaattcctcttctgaaagagatagaacgaggtaaattaagagggaaaggaatatataatttagcttatattcaggaagaaacagaactagatgaagataatataagtgaagataatataaataagggtaatttaaaagaagataatataaaatatgctaatattgttgaattaatggaagatcaagtatttacacaattaaatgtagatggatttaacataacagatagcgactatgcgttctcatctgaataa

SEQ ID NO: 301071 - DNA, 165 bp, Proteus mirabilis
atgaaaaagaacgaattaattcaagcaacaaaaccaactcgcgctcaacttattcgttcggtcgcaatctctacgtcgattgaaacagggcaggagttccatcgagttgaagaagagatgaaagtgaagcgtgagaagtttgggcatttgaaacttgcgatttag

SEQ ID NO: 301072 - DNA, 1419 bp, Proteus mirabilis
atgaaagttaaggtactagctgaaccaactcttgaatttggtaaagggactcatatatgtccaagatctggaattgaaaggcttggagtatatgataaaaaagatgagtttaggaaatcagagctacgattaggtattgttgggcgaggtgaaggtgtagataaattagatatttggttagaaaaatgtagagcaggaatactcccaaaagaatctaatcttgcaaacttatttaaaggctttggtggcttcgcagactctcatggctttcattcaaagttactttcttcacctgcctatacaagatccatacaaaaatccagtttgaataaaattgcatcaattataaaaagagaggatagagttaatgctgctgttgagctgttttatgatcagattaggtttttaactgaaaatcgagctgtcgatgtaatagtttgtgttattcctgatgatttgtttgaatcagtaacaaaaaatacaggaaaaagtactgatgataacgctcaactagaagtttatatggaacataattttagaaggatgataaaagcaaaaacaatgcatttaggtgtacctttacagcttgttattgaaaatacaattgacgactccaaggcatctcgaggtcaacaggatgatgcaactaaagcttggaacttcagcactgctttgtattataaaggaaaccgtactgttccttggagactagttgagaatacttataaacctaggtcatgctatgtaggtattggcttttataaaagtagggatggtgaaactatttcaacaagtttggcacaagtatttgatgaatttggccatggcgtaattttacgaggtagtccagttgcattagataaaacagatcggcgtccttatatgtcaaaagagcaagctttcgagttgttaagtagtgctttatcagaatatgacaaagcattaatgcaaatgcctgcaagagttgtaattcataaatcaagtcaatttagagtttgtgaaattgaaggttttaatgaagctctcgatgcaaaattaattcgctctcgagattatgtatcgattaccgaatcagatataagactatttagtgaaactaattacccaccaaaacgaggaactttgctatctatctcagagtccgaaggtttgctttacactagaggatttgttgatttctacaaaacttaccccggtatgtatattcctagtccactaagagttattgctcatgaaaatgattcatcgttagaagaactatgtgaagaaatacttggtttgacaaaaatgaattggaataacactcaacttgatggccgactaccaattacaatcgaatgtgcaaagaaagttggtgaaattatgaaatatgtagataaaaatgagaaaccacaagtaagttatagcttttacatgtaa

SEQ ID NO: 301073 - DNA, 810 bp, Proteus mirabilis
atgccgtggactaatgagcatatacaatggctccatgatactggaggtgtgctgactttagaatgtggtcgggaagcaaaggtttttcgctttaatcatgatgttaatgaccaacgaaaaatgacagcatgggccaagcattttagaaatcactattgtaatgatgctcaaatcgatctgctcaaggctccagggcagacccgcgcagattatctactctctatgaaatttccgagtgctactattgcacctgggcccagtattcgagctggagatttcgcagaaattctagtcgctgattacttaacttacctacataactacttcgttcctagaacacgttatgatcgaaaaggtgtacctaacgaatccacaaaaggatctgatgtgctagcttttaagcaagtggaaagagatccaaataatgatgagttattagtgtatgaagtgaaggctaaactgagcgctggtccgaaatcaatgcttcaagaagctatagatcattcagcgaaagatcacctgcgcttagctgagtcacttcatggaataaagcaacgaatgatcgaccgaaacgatttaactggcataggtacaataaataggtttcaagattcagttaatcgtccttataagttgaaattcggagcagcagccatttgctctgatagtgcatatgatgccgcagtactttctggtgctagcacaacaaaccatccttatgcacaagatctagaacttctggcaattcaaggaaatgagctaatgactcttgctcatacgctgttcgagagggccgctaatgaggtttga

SEQ ID NO: 301074 - DNA, 3111 bp, Proteus mirabilis
atgaggtttgagaatcaatcatcgaaactactctcaatcactaaagcaaaagctaaaatgtacgaatttagcttagatgaagagcatcatatacatttgactgagtctcctagtaagttgttattaatgacaataggcatattaggtgatttatgtcgtgaagaactctcctcagaaaggaatgttactctttatgaacaaagaagaggtgaaattcgaaatgttgctaagtatttcgatgctcttattggttcaaaattacaaacagagtatgactattacctttgcttgttgggagctgcatcatattaccttgcagatatgctggggagttctgccgtcttgtccaataaactagatgaattgaaagttgatttgacggagtcggggatagaagtgttattagagtggttactgaaagacagatttcatgagcctttaacacttgtcaaagagacgcctttgactcagttaatgttagaattgtcaatatctattaaggcttactttgatatcaatctggatacctcaattagcgtgctagaggcttcgagaaatattcggaaatactgtcacgctatagggtctgatagagagcttttgttagcagatatccttacttcagtaatcgcccgtaagataaaaaactcatcattgaatctacttcctatctatacaggcttacctttagagagatggcttcctattttagctaaagcaacctttatcagagagttttggccggcacagagactacttggagatgcagacgtttttatcggtagatctgccgttgttcagctccctactagtgcaggcaaaactaaatcagcagaattaattatccgttcgtctttcttatcaggaagggcttctgttgcggtaattattgcgccttttcgttctctatgtagagaaattagctcatctttatcagctgcgtttactgatgaagatgttctggttaatcagctcaatgatattccgcaactagatgattttgaaaatgaattattatcacacttatttgaacaaaaggtggagagtagtactaccccaaccattattgttgctacacctgaaaagcttgtctacctattacgacataaacctaagttagcagaagtaatatctttggtcatttatgacgaaggacatcagttcgatacaggaagtagaggtgttacctatgagttacttctaacaagtttgaaacgagagttgcgtaaagatacacagcatgttttgatttctgctgttttaccaaacgctcaaactataggcgactggttgtacgcaggaaatggaacggtagttaacggatctgaatatttatctactgaacgaagtattgcatttgctagttggagaatgggacgtggtcagttccactacgtagacccctttaacattaatgtcgaagaattctttgtaccgcgagttatggaatcactcaaaatccccaagaagaaaagcgaaaaagtacaaaaattatttccgccaaaggatgacaaatcactagtcgctgcatacttaggacttaaactttcagaaaatgggccagttgcagttttctgtgggcaaaaaaactccgttataaaaatttgtagagaaattattaaaccattagatcgtatcgatcaacttgaagcgccaatagtgtatagtgatcaaactgaaatcaagaaaattgctagattgtctgagttacacttgggaatcgatgcagttgtcacaaaagcgatagagcgtggagttcttcctcacagtgcaagtatacctaatgggcttagaatatcagttgaacatgcaatggagaatggtctggggcgttgcgtgatatgcacatcaaccttagcacaaggtgttaacctaccgatcaaatatcttgttgtatctggcgtttttcaaggagaaaaactaatatccacccgagactttcacaatctattagggcgagcaggtagggcaggaaaacatacagaaggaagtatcatattttctgatacagaattatttgatctacgccgctcatctaaacggtggcaatggtctcaaatgaataatctgttagacccatcaaacactgagagttgtttaagtagtcttctgagtattatacaaccgctatttgataagaattactccattgatcctatggagtttcttaagtcaccttataattatgaagaaagatgtgttgaattagctagaaggggagaaaatgttacagagttacttaaacagatgcaacaaaggattaaatatttagaaagccttgaaagcttcttacttgctaatttaagtagtgatgaaatgcttgatggcgaagctttaactgaactttataatggtactcttgctttctgcctcgctaatgatgcggaaaaagaaaagctagcccaagcgttcagagtagttgcagagaaagttaaacaggttgaaccagaaaaacgtacttattatggaaaggcactactaggtatccaaaaattagactatctagagcaatggctgagagaaaatattataactttagatgaagaatctgatgtattaggtgtactagaatttctgtggcctgttatagaacatattggtatggataatagtttaggtaagttgataggtgaaaatgcaggactatctattgccaaacaatggtgctctggtgttccttataatgaaatattattacaagcaaataaaaatggtttcaaatatagagctggtagtcagcatcgcaacttaaaaatcgaaaatatcattaatatttgtgacaatagtcttggttacgaggccatgcttatagttggtgcatgtgctgatttatttgaaaatttccttgaaaatacagctattgccgaatctattaggaaattacagatgtttttacgtatagggttaaatgatagtcttgctacagagctatatacgctcggacttgctgacagagtggttgcatcaggcatctcagctagccttactagctccggagctgagttaacagaatatggcaagaaaatggtactaactcatcgccacattatcgagtcagaattacgtaaatatccatctgtgttctttgattcactatatggtagagattaa

SEQ ID NO: 301075 - DNA, 1248 bp, Proteus mirabilis
atggcattaaccgatacaaaagttcgtgcagctaaacctgaagagaaagcttatacactgacagacagtgatggcttgtttctttatattcaccccaatagctctaaatattggcgcttccgttttcgctttggtggcaaacaacatttaatggcctttggcgtataccctgaaatttccttagcagatgcaagagaaagaagggatgctgctagaaagcaagttgctttaggtatcgatcctcgtgaactcaagaaagaattaaaggaagaacaacaaaaggaatttaatacttttgagaaggtagctcgcgattggcacgcgaccaataaaaagtggtcagaaggccatagccatcgagtattaaaaagtcttgaagacaatatctttactgctattggtaaacgtaatattgctgaactaaaaactcgcgatctactcgaaccgattaaagccgtagagatgtctggacgtcttgaggtggctgcacgtttacaacaacgtgtgacagccatcatgcgttatgccgtacaaagcggtttaatcgactataatccagcgcaagatatggctggcgcagttgccactggtaaacgagtccacagagccgctttagagcttaaacgtctacccgagttcttacaacgtatcgatgattataagggaagacctttaactaaacttgcagtcaaacttaccttgttagtcttcattcgttccagtgaattgcgcttcgctcgttgggaagaaattgattttgaaaatgccatgtggacgatccccgctgaacgagaagcgatagaaggggttaaacactcacatcgtggatcaaaaatgcgtacccctcatttagtgcctttaagccgacaagccattgagatcttaaaacagatctatcaattcagcgggaatcacgaactgatctttatcggcgatcataaccctagaaaaccaatgagtgagaacacggttaacaatgcattacgtgtaatgggctatgacactaagacggaagtttgtgggcatggttttagaacaatggcgtgtagttcgttgattgagtcagggctatggtctaaggatgcagtagaacgccagatgagccaccaagagcgtaattcagtgagggctgcttatattcataaggcagagcatcttgaagaaaggcgcttgatggtacagtggtgggctgattacctggatgcgaatagggaagggcatgtgggggcgtttgggtttggaagataa

SEQ ID NO: 301076 - DNA, 2634 bp, Proteus mirabilis
ttgttaaagaaaacaatcaaatggacagggatgatactactgggtgtcggcgcagttagcacgaccttgtggctcaccattccacgttggttacctgttgtggctaaaagctatttacctgaaggtgtttcactctctttaacacaacctaggttacaacaatggggtgtttttattgatgatatcgcattaaaaagtgatagctgtaccttggctaatgtgcagcaatttacgtttaactatcaaaaacagcaaattgatagcctatcatttaatagtcaacaacttactattaacgaaggatgtttttcacaattatcttttgcagataaaaaagagaccgcaacagttcctctcgatattcatgcgttattagctactattcctcacttatcggtcgatatcaatcatgtttctttaatggataatcagcgctataacggctattttcagcttaaaagtgatacaaatgggcgattaatcagctatcagggagataatacgcagatacaagcgctgatccgtgataatcaatggttagatattaaacaattaaagattaatttacctgacgataatcagatagagctggcggctgaaatcgcgttaccccttaatgttgattcattaccagaaaatggttctatcagcacaacactgttaacatcccattatgcttacccattagtctttattgctcaatggcaagggaatagcggtactatttctattgctgaacaaggcggaggacaagcgttagctgtgttgccttggaatgtaactgcagaaaatatcacgatagaaaaagggcgttgggaatggtttgggcttgatcaacccttacgtggtggtgtgaatatcaacattgcccagtggcagcaaggattaacgggattacgcttaactgcgcgcttaaatgttatgacgcaagggcatgcaggaaaagggaatttagtgatgacgatacctgaaacggcgattaactggttagatgctgatatacctattcaattgacaggaattgtaaataaagatctcatgcaagccagtgcacaacttcccgttaaagtgactggtatgttgacagatcctactatcgaatttcagcccggttcactattacgctttaaagggcaactaacagaaacgctgacggtaaaagatgctcgtttaccactggctggctcaacattatcttccaaaggatttaatggtcacctaaatgcgattgtgttagctgaagatactatttggggggattatcgagtccattttgctggacgttcgaccaatttcttacctgatcagggcaattggcaatggcgttattggggagagggcaatttattgccattaaaagcgcgttgggatatcgctggaactggctcttgggtagataacatggtgagttttgagacattaaataccggatttgatgttttaacttatcagcataccagtatgttagcccccagattgacgcttttaacgcaatttcgttggttaagagacgataaaaacccgttatttgaaggcaaattaaagttaactagtcaacgaattgattttcctgcggggggattcttagatagagcggattttattgccagtgtaaaaggtcaatctccttttcgtttttatatgaaaggcgagctcaatgccaagccaactattggacctataacgattaatacacgttgggatggtgaaaggctaagagggcagatgcgttggcctgcacaaccaatcaatgcctttcaatctttattgccagaaaaattaggcatcacattagataatggcgaattttatacacaagctgacttttctattgcccctcaacaaggtttagttgctggtggacatctagtggttaagcaaggcagcatgtggctaaaagatggcgtattagaaggactcgattttattttaccttggcgtttaaacggtgacgaatggcaactaggtgtaaagcagccagtgcaattacgcattaagcgcgtcaacaacttatttgaaatgacagatattaccgccgatctgcaaggattttaccctattacagaagcaaaacctttagttttatccaatgtcaaggttgccatgcttgatggcactatttctatggcaaaattagcattaccacagcatgaagcggcgattatctcattagacaatctagagttaagtcggcttttcactttattgaaggtgacccaatttgccgcatcaggtaaagtaagtggcgaattacctttctttatcaataacaatcagtggatagtgaaagatgggtggttggctaactcatcgtatttaaccctcaggcttgataaagattttgttgactctattgatgatagcaatatgacagccggtgtcgctatggcatggttacgatatttagagattagccgctcttggacgcgggttaatttaagcaacctaggtgaattagtgcttgaagcggaaatccaagggaaaaatccattggaagacaaacggcgacaagtaaatcttaattatcgccatcaagaaaatatttttcagttatggcgcagcttgcgatttagttcgcaattggaagagtggttagaaaagagcctatccgatttagggagtgagtcagaatga

SEQ ID NO: 301077 - DNA, 1647 bp, Proteus mirabilis
atgcaaaacatcaatatctttattaaagaaaacgtcagccaaattgctctgaaaggcctccatattgcgcctgatatcccagaaaaaaaactaaataacgctgcaaaatcaatgaacctacaaaataccattggttctgtcatagctttactcgatactaccgtattcggcagtggtaaagatggcttggcatttactggcgaaaaaatggtatataaacctgtatttgaatcacctatagttataaattttagtgagttggacaaatctgagtatatccgtaatgtaacaactgacaacaaaggtaaagaaaaaattatcgagtacaccataatcactcgaaaagacggttcttcttttaaagttgaaaacattagcgaatgtaatattgaaaaattgtctgagtttttaaataccataaacagccaatttgacacttttgaagaagaagaccagttagttacgttatccgaaatgccagaagagcttaaggtcgcttacttaaaagttatagtaaacatggcatattctaatgatggtgagctcgataaagatgaacttgctcaaattctattgcttatgactcgcttagagctcagtgctgaatcacgttttacactgagggaatacagcacaactggcaaactagaaaatttagagtcattaatacaaactatcgataaaacttgcatttcaagtcacaataaagttattaaaatttcgctcgttaaagatctgttcagcgtgttcatgagtgtcaataatggtcagtatgacaactttacattctttaatgacaattataacttatttaatgtcactgatgatgaagttaaattaatcatagatgctctcaagctagactttaaaatgctaaatgatgattttaatgatgatgcattgactcgtggaatgaaagagcttggtgcaaaagcaggagctgtgggtgtacctctggccgctgtttacctttcgggctcagttgtaggtatgtcagctgcggggttaacgtcgggtcttgccaccttgggtttaggtggtgtgctagggttttctagtatggcaactggtattggtgttgcagtcttactaggagttggtgcttacaaaggcattaaacatctaactggagcaaatgagcttgataaaacgaaacgcagagagttaatgctcaacgaagttattaagcaaacacaagcaactatttcctacttaatggaagatatcaacttcatcactaccaaattaagtgaagctattctttcttataatgttcaagatgaaaaagtaaaacagcttttacaaaaagttaaactgttaacctcagcaggtaatgttcttacacaaaaaagtgactcaactcaaagtaagtgttttaaactgaagtgtccggctgagcttaatcacgaaaaacttcaatcacttactcgcgatgcaactaaacaacaaatttatactttgattatgtcgttctatgaagaaaaaactattgaacgtgaaaatggtggtgaaactgtaaacgtattagtattaaaacaagatatctcgactatagatatggaaaaaatcgccaaaatatttgaagccattggttattttaaagctaccgatgtaattaaaggaaaactatcagggatattttcatag

SEQ ID NO: 301078 - DNA, 1503 bp, Proteus mirabilis
gtgattaaacgagacaaacatgtttcagccatactggtgcaaaagcaccagctggatcaatcagaaaacaaactaagtgagctagatagtgcactgaatgctttactacaaaaccaagaaaccaataatgatattcttgatcaagcgctagctgatttagatataatgctagttactcaagatatttcccccttcttggctgaaaacatcgatattactcaagatttactcgacttagagaattcaatcactcatttacaaactaagccgactattactccaatagcactactcgatactctcgatttcaatcaggatatgagctgggtacaatatcagcaatcaattgaacaatatgcttttaataatgatgtcaatttaaatgctgaccccttcactacgctaatgtcccccattcagcgaatagaactcgaaaaacgtatcaaagaagaatttaccattaaaaatgcacaatgcgataagtatgactatctcattgccggtacatgtggtgtcatcggtgggttgatcgacgtattctttgtaggtatgccaggagagggctcacttactaaagtcgcagataatgcggtcgactccgcagtcgaaaaatttgcctcagcatgtggttggtctggagctaaaaatggagccaattcgaccaagagtgcgattggttatttagaaagtaacttcaaagtcaactatgaccaagcaactacatatggtgcaaatggaacagatggagcagttaaaaacctttcgcctaaaaatcaccatttaaagagtttaggacattctcctgatcttattggactatttttctctatattaaatcaatttacagacacctccactttcatttcaaacggccagataattacgattgatactgaaacccatgagctaaagggtggtaattttatagcaaaagttttttctggttttactaactggttagggcatctattttctgatatggcaggctcctctggagcatctgggcgaggtgctggtataccaataccattctacaacttactattattactagatgtcggtaaatttggtaaacataggcaatcttttgctaccgttgccacacaagttttcgaaaaaggttacgatttcagacacggcattgccatggctatacccgttttgattacagaactcttaacccgtctaatgtggacaagcaagcagcgtttttatcatggaaaaccgtggaaagaatgcattccttctactagcaatccagagctacggcggatgctcttagttgctcatggctcactttgcctaattgatgccagcgatgctgcactacgatcaggtggtgacatgattcagtttcttcttagaaccaaccttattggttgggctagatttggcactctagcattaaaagaaatatatgcttggcacaatgccggacacattgatgcagcagctgttgataagtatttagattctgaattaaaaaaattaatgattaattag

SEQ ID NO: 301079 - DNA, 231 bp, Proteus mirabilis
atgcaatgcaatgcaatgcaaacaacaatagacttgctttcggatattaaaaaccttttaactctggaagtccgctctgctattgctggttacctgcttcgtcaatggaatgtagattgtagcactaatgtggaactaaatggggctgagtatcaactcaggttagaaaatacgaatattcttcaaggatgttcgagcgcttctgttgcaccaggctttaaagacacgtag

SEQ ID NO: 301080 - DNA, 288 bp, Proteus mirabilis
ttggaagaaataccaacattagagaaaaaagatatcacacaatttaaagaagagttactctttcacactaaaagaattttattttctggtaatgtattatctttaactgaagttaagaatgattttttaggagcaatcatcgatagcatattaaagtcagacgataaaataaaatctgaatttgggaatattaatacttataaatattttttattaaatagtataaatgagacggttagtcgtttactggctaatgataaaaatcttgtaaaaaatggtgagaaataa

SEQ ID NO: 301081 - DNA, 795 bp, Proteus mirabilis
atgaaatatttaatcaataattgtccacttattattttagggagtgttgttttactattatcaggttgtcattcactaatttctaagatagatacaacatttttgcccccagaaaatggcagaacagttaaaatttcggttgatgtaccggatatggctgaactatcaccaatgaaagtcatgtatcgttcaaatctttgccaaaaaacatataataataatgaagtacctaaatatacagtgcctggctttaatagtgagataatagcattagaaaaaagagagaatagctcattatatagtgcagagatcccttataggggaggcggaaaatgtgattggcaattaagtaatgttacattaagattgacattaaaaaagaataattcttttactaaagatattgttgatatagtaggaaccggagtaattattatttttgataataatcaacctcaaagaagtgggggaagagcaataaataaaaaaggagattttgatattgtttctgattattttccttggataaatagatcatttaaaaatagtaatgatattagtttatggttatatggaaaagctcttttcctttattatcaatctcgtgatgctcaacaaataacatggaagcccatcattcatagtgatattgtggtttattctgaatatccagcagaggaaaaaacagaaggtgtaagtacaatctattcttatccagatggtacaaaaagtgcaaatagggatgggaagcctgattacaaaaaactactctctttaattaagccgtcatcgtaa

SEQ ID NO: 301082 - DNA, 831 bp, Proteus mirabilis
atgcgtttcttaaacacttttgcactgctgctaagcctgatattgacaccttgttatgttatcgcagccactcccgcacaacgtgttattactttatccccgtctgccacggaaatggcttatgccgcaggtatgggagagaatatggttgcggcgagcgcttattctgattatccacaagcagcaaaagatctcgtacaagttgccgactggcaaggcattaatgtagaacgcattttgctattaaaacctgatttaattattgcatggccaagcggtaatcctcaacgaccgctcgatcagttaaaatcattgggtatccctattatttactctgatccacacagtatcgaagaaatcattgacgatcttacccgactttcttcttacagcactcatcctgaagtcgctttagcaagtgcacaaaaattacgtcagcaatatcaagaattacagcaaaagtacgcttcaacgacgcctcatcaagcgaagaaaaaagtctttattcagtttggtatgcaacccctatttacgacatcaaaacattcattacaaaatgagattaccgaactttgtggcggtgaaaatatttttgcgaatagtgcagttccttggccacaagtcagccgcgagcaagtgatcagtaaaaaacctgatttgattttatttagtggtaaaccaaaccaagttgccgcaatacaacaattttggcaacctcaactagatattcctattatcgctattgatgaagatagttttagcagaccagcaccacgtattatttatgcggctcaacagatttgtgaggctattaaagataataataagtaa

SEQ ID NO: 301083 - DNA, 186 bp, Proteus mirabilis
atgaataaactaaataaattaactacagaaatgctgttttttaaaagtgagaataaagatgtcaattatttagaaggtggcggtgtttttattgaggatcctcacttgacagagatattttcgattatcactaagagaatagttgagttggaaaaaagagttgatgccataagtaaagctaaataa

SEQ ID NO: 301084 - DNA, 960 bp, Proteus mirabilis
atgggaaatataaaaagtcatctagataatttattacacagcacagtaaggatattctgcaaaaatagcgatggaacatcatcggctgggactggttttatatttggctttcctgcgggtgaagggactatgtacccactgttaataacaaataggcatgttttaagtggcactaaatccatagtaataacgctgacaaaaatgctgaagcatggtgagccagatattggtaatcataacgaaatagagattcataatgtatcagatttttggtgtgggcatccagatgaaaatgttgatctggcagcgctgccattagctgggatgctaaacgcacaggagaatgaatcatatttttttgcagctttaggccctgattatattgctagcaatgaattgctcaatggtctttcctctatggaagacattattatgattggctacccaaattcgctatgggatgaaactaataaccttccaattatcagaaggggaataacagcaactcacccaaagagaaaatataatggcaatcctgaatttttgattgatgcagcatgcttccctggttctagtgggtcacccgtttttttggcgaatgtcggaagctatattgataacgatggcaaagtaaaaattggtagcagagtagctttactaggagtgctgtggggcggcccaaccactacaagtgaaggtaggatagttaactctaaaataccatcacatgaagatgccaaagtaaccacaaatacaatgttaaatttaggctttgttatacacgcatcagaaatattggaatttagtaatattttcaagaatattgatgacaatgaagattcaagtaagcatgagcactctttaagagaaggtactcgcaacaccactccaaatagaaatagcctttgctactgtaatagtggattaaaatataaaaattgccatggaaagataaagtaa

SEQ ID NO: 301085 - DNA, 345 bp, Proteus mirabilis
gtgagcgaagaacaagacaatgatagaaagctatataatctgtttaagatggtaacggaagaaacttttttaaattaccttaaacacgttggcgtggatgaagttaagtgtcaagtgtgtgggaatacaaaaatggcgatcccaaatgtatctgacaatggtgaagagccttatttaatcccaatagatacagaagaggtttcatataaaaacaaatattggatcactaattataaatacagatttatatgcagaaactgtggtcatgaaacctactttaatgcatggcctgttagtgaatggctaaccaagcaaagaaaggagtgtgaagatgaaggggagtaa

SEQ ID NO: 301086 - DNA, 1035 bp, Proteus mirabilis
atgaagcgattattacccactggtgctattaatttggccgcttatgctttttttgagccacaggagccactgatcccttttattccttcatggtataacgtatgggaatctcatatgttacgtttagcgggtaaaaaaagcgcaggaaaaagttggagtttccaacgctatggggtcaatcatgatatgtatctacgtgaaggaataagaaaaacaaattgtcgtccttacctatctgcaatagagcatgtggtcgatcatgctgttggtcaattagatacaaaatcacaattcctcttaaaaaaagagcgaaatggactgatttatattgatgcatggggagagctaacggctttcgaacagatagatagtttaagggatgtgtttactcttaatattattcctagaaatatcataaaaaaatacagtataaaaaatttctcttgcaaaataagaggtgaacgtaatggtatgatgtcggcattattattagcacaaaaacttattaatagtgatttacttgataatatatttatttgtggtggttttcgggctgtaccaattttatcttttagtgaaatagaaagacaacctataaccctttttttcaagcctaatacgttggaaaatataaatagtattgaaagagtcgcctgcatcattatcaataaaaaacagtgttcagatatttcgatttctatcaatcattatttttctatgagtcaaaatagaaaaaaggcaataaagcaattagttaaaaattggcaccgttgtattaataaacagacgggttcaatttatataactgcgttactgacttataaatatatttctatgcttgaaaccgcattcacagcattacctgttaatcttaattgctattttttaaatcgtctttatggtgatagtggatttatcacaccggctcttatgttcgatcatttacaaaaagcagcagatagtgcctctcattaccttttgagtgcgtttgatggagaaaatggtgtttggctggttgattgttggaaacaataa

SEQ ID NO: 301087 - DNA, 909 bp, Proteus mirabilis
atgaactactctaaaatagccgaattggttaataatataaaaaaatatcgtaatactctagaaaaacaagcaattccattcagaaccacagaaaaagcagaccaatttgatcttatgaattatgatgattggtgtaactcagtatttggtgatggcctaataaagcttcgtctctttaccgagaacaactttaacgtaatagagactcttagcttagtttctgttactcgatatatttttgaattaagtgtttggctgcatctttttattttagaccctcgctatgggcttgtttattatgctcaattattcaggagtcaacttcaatattgggagagatacaaagcgcaactagaaaaagagattgtttttttaaaagaattaggtgatgaagaaagtcaactaatcgctaaaaaaatgggtgaattttatgttcttcctaaagaggaacaagacattgacatcatgcaattagaaattaaaaaaatttataataaaattgactcaaaagccgctaaaaaattttcaatacatgcagaacaagctaggcataatggttataagtttcaagcatatttaattggtataaagcagctacctactattaatgattccatatcagaaataaaagcagaaaagaaactgtttgagtccaaaattactgatgatataaaaaacttaatcccaaaaccatggaagtggaatctgatggcacaaaaagtaggcctcaatgatgagtataactttatttactcatataccagtaaattacttcatgcagtcccgtctagcattacaacaaattctaagaatctagaatcagatgaaataattttgtttttgaaatatattgataacaaaatacaagagattatagagctgagtaatacctatctagaacaaggttaa

SEQ ID NO: 301088 - DNA, 414 bp, Proteus mirabilis
ttgacaacatctttttctagcaatgatgttgttaagcaagaacaaatttatagcataaaaactctctctgataatttaattgaagtaaaaataaatttttttaaaaaaagtggcgataaaataaatcaaaatattcccttggctcaaccatttgaaagtaagttatataattttatctatgatatggttgctattaataataatattgaaagaacagatgataagagtttaaatgaaaagatgaacgagataaaaaaacaactaaataataaagaatcaaggctaggagagctattcttcaatctactagatcgatataaaatcattaaagaagacagcgttgatattacgttaaaactaaataaaggacaactagtctcattaggtggagaatgctcatataaattttattaa

SEQ ID NO: 301089 - DNA, 654 bp, Proteus mirabilis
ttgaccaacagtgacggtgaaatagtttggcaagggcaatacagtgcttgggggcatttacagcgtcaaacccgccccacaagcacatttaatcgtgaacagaacctgcgttttcaagggcagtatttcgacaaagagacggggttacattataatacgttcaggtactatgccccagatttaggccgttttacccagcaagacccgatagggttggcaggggggataaacttatatgcttatgcgccaaatccattgacatgggtggatccgtgggggcattgtgcggtcaaactttctaaaaatatggtagctgatggtacgcctagacctgccaataccgcagctcatcatattgttggtgatacatctaaaggtgcccagccagccagagatattctgaaaaaacatggtattgatgttgatgatgctagaaatggtgttttcctgccaaatagaaataatgttgatgaagcattgtcaggaataaaacataatggcagacatccaagtgattatattgacgcagtaaatacaagaattattgatgctgataaattaaatggaaaacaaggtgttctggatgagttatcaaaaattcgtgacatcctgtcttctgcaaatcgagatgcaagctggtatacaatattatga

SEQ ID NO: 301090 - DNA, 768 bp, Proteus mirabilis
atgacaagtatctggggagccgaactctattatacgccagattactggcctgtatggttaattgcagcaggtttgatcattgtcgccatgatagccatattggtgctacatggttttttacgttatgcactggcacctaagcaaagtggtcactatgaagaagagcgtgtttacttatactctaaagccattcgtttttggcattggggtaatgccttactgttcattcttctattaatcagtggattgttaggccatttttctatcggtaatgttccatcgatggtactactacataaaatctgtggttttattctcatcgctttttggataggttttgttgtaattaacctaaccacaaataatggtgtacattacaaagtcagaccacaaggattaattggacgctgtatcaagcaagctcgcttttatctttatggtattatgaaaggtgaaccacatccttttgccgcgactgcaacagataaatttaaccctctccaacaacttgcttacttaggtgttatgtttgggttagttccactacttcttatcacaggcgtactatgcttataccctgaagtcctaggttatggctattggatgttaaaagtacactttatattaggcatcgttgcactcatgtttatttgtgcgcacttctacttatgtactttaggcgatacttttacacaaacattccacagcatgattgatgggcatcatcgacatcaaaaacatggtgaaagcacaacaacaaaaaattga

SEQ ID NO: 301091 - DNA, 1086 bp, Proteus mirabilis
atgttagaggcggcaagggttggagatattatcggtcactcaaaatcgatgtgggggatgctcgttggtactatattaggcgctgctatcgccatcggtggcgccatgatttctggtgtattaatgggtgcgggtattgctgcaagctgcattggtattggcgtgcttgccattggtgcttccattgccgtcggttacggaactaccctattagccgactgggttcgggataaatgtgttgaaacaggttcaaaatctttaagcccctgtggggaaatccttgacggctccaaaaatgttcgtattaacggcaagcctgccgcaatgtccacccgtagcaacgtcaaatgtgataaagaaaacagtgaacgccaaatcgctcaaggctccggtagtgtctatatcaacggttttccagcctctcgggtcggtgataaaaccacctgtgacgccactattatggaaggctcccctaatgtccggattagtggtggtacacaagcaaccgaagatattgaacctgaaattccctcttgggttaccaccgcatccgatctcacgatgttatttgccggtttcctaagttttggttcagcggcagccaaaggccccggggcagtagcgaagttgtggagcaaattaccgggtagtgccaaaataagtcgctttgcttgtcgttatggcaagatttttactgggcttagtctcgctattccggccattggcatcttaacccgccctgttgaagtgattggcggacaaaaaatcctcaatgacgaagatgaattggattttagctatgaggcggaattaccactttattggcaacgcaattacttaagtagctattgctatgagggtgcactcggtcgaggttggagtttcttttgggaaagccagctaattaaaagcgaagatggctttgtttggcaaaatctatccggtgatatccttccatttcctgacattccactcggacaccgtaactttaacgaagctgctcaaggctggatcatccaccatgaggatgacagttggacgtttcaggatgctggtgagctacgctatcattatccccccttttga

SEQ ID NO: 301092 - DNA, 405 bp, Proteus mirabilis
atgactttaaaaccacattgcgccccactatacgcattgatgccaagcaaggacgcagtgagtttctctggaacaaacgtgggcaattactgcgccatactgattgctcaggcaaacaacatatttggtgttatgatgacgaaggccgtgttgtttctcaaaccaacgccttgcaggaagccaccgagtaccagtacgatgaggtgggacacctcactcgcatcatattgcccgataattctaccgtgcaactggcatggaatgccgcaggattacttactcatcatcaacgcaatgacaataccccgcgtcaatggcaatacaacgcctttggtcgtgtcaccacagaaattgataaactcgctcggcatatctactaccattacaatgcacaaggtgcattaa

SEQ ID NO: 301093 - DNA, 678 bp, Proteus mirabilis
atgagtactcctgcaaatttcaatggtcaacgtccagttattaatccagatgatgctgttatgttattgatcgatcaccaaagtggtttattccaaaccgttggtgatatgccaatgacggaattacgcgctcgtgctgcagtattagcaaaaatggcaacattagcgaagatgccagttattacaacggcttctgtccctcaaggtcctaatggcccattaattccagaaattcatcaaaatgcaccacatgctaaatatgttgcccgtaaaggtgaaattaacgcatgggataaccctgagtttgttgaagctgtgaaagcaacgggtaaaaagcaattaattattgctggtactattacgagtgtttgcatggcgttcccagcaattagtgctgttgctgaaggttatcaagtttttgctgtgattgatgcatcaggaacgtatagcaaaatggcagaagaaattaccttagcacgtattgttcaagccggtgttgtgcctatggatacggcagccgtggcttctgaaatgcaaaaaacttggaaccgtgcagatgccgctgaatgggctcaagcttatacccaaatattccctgcttatcagttattaattgaaagttatagtaaagctcaagatgttataaagaataatgaaactttagattcacaacgttaa

SEQ ID NO: 301094 - DNA, 1230 bp, Proteus mirabilis
atgctgatgagtcacaacactgaaacgcaaattggcaatatcgatcttgttaagcaacttaacagtgcgattgtatatcggctcattgatcaacacgggccgatttctcgtattcaaatcgccgagcagagccaactcgcccctgccagtgtcactaaaattactcgtcagcttcttgaacgtggcttgattaaagaagttgatcaacaggcttcaaccggaggtcgtcgcgcaatatccattgttgtggaacatcgccgttttaataccgtcagcgtccgattaggacgcaatgatgccactgttgctctgtatgatctcagtggtaaagccttagtagagcaacactaccctttagaacaaagcacccaacaagaagttgaaaccttgcttattaatgctattgatgattttattaaacaaaatcaacgtcgtattaatgagcttatttcaatttcaattatcttgcctgggttagttgatcctaataaaggcattgtccactatatgcctcatatgaaggtaaataactgggcattagttgatagcttagaaaaacactttgatctgccttgctatgcgggccatgatattcggagtctcgccttagcagaaaactattttggtgccaccagagattgtgaagattctatcttggttcgtattcatcgtggcgcaggggctggtgttattatcaacaacaaaattttgctcaaccagcgtggtaatcttggtgaaattggtcatatccaaatagatccattaggagagcgttgccactgtggtaactttggttgtttagagaccattgcgtccaatagcgcaatagaagctaaagtccgctaccaacttgaacaaggctatcccagccagcatttatctgcaacacaatgccaaattcaagatatatgcgatgccgcggtaaaaaacgatcccctcgctgttgaaaccattaaacaagtgggtcttcatctaggtaaagccatcgccattgcaattaacctatttaacccacaaaaagtggttctggcaggagaagtgaccgaagcggctgaaatattactaccgtcgatccaaagttgcattaatacccaagtattaaaagagtttagagaagcgcttcctgttgttatctccgaacttgatcatcgctcagccattggggcatttgcacttaccaagcgagcaatgcttaatggagagttactacaatatttattcgacaaataa

SEQ ID NO: 301095 - DNA, 1164 bp, Proteus mirabilis
atgtttgccttaacaaatgctgttatttatacaggttatgaccgtttagaagatcacgccattattattaacgggtcacgtattgagcaggtttgcccacaggatcaactaccaaaagatatagccactcgtgatatgcaaggtgcgattgtctcccccggttttattgatttacaagtcaatggctgtggcggtgtacaatttaatgacaccgcggaaaatgtcacagtaaaaacgctagagattatgcaaaaagccaatgaacgcttaggctgtactagctatttaccaacattaattacctgttctgatgaattgatgaaaataggcattgaagcaactcgcgcttatatgcaaaaacaccaaaataaagtgttgggattacatttagaaggcccttatatcaatatcattaaaaaagggacacatgatcctcaatttattcgtcaaccaagcgcacagatgattgactatttgtgtgataacgctgatgtcatcgctaaaattacactcgcaccagaaatggtcgatgaaaaatatgttcgtcaattaatcacagcaggtattgttgtttctgcaggccactcaaatgccacctatgaagaagcgcgtaaaggctttcgtaacggtatttcattgtcgactcacctttataatgcaatgccttatatttcaggtcgtggcccgggtcttgtaggggcaatttatgatacccctgaggtttacgcagggatcattgccgatggtttacatgtttcatgggcaaatatccgtaacagtaagcgcttaaaaggtgaaaaactgttattagtgacagatgcgacagctcctgcggggcttgatccaaataaaaatgagatggatagcttcgtttttgctggaaaaacgatatattatcgcaatgggctgtgtgtggatgcggacggtacattaagtggttcatcactcacgatgattgacgctattaaaaatagtgtacttcatgttggtattccattagatgaaacgttgcgtatggcaacactttaccctgcccgtgcgattggtgcagataacgaactcggtacaattgaagcaggtaaaatagcaaatattgcttcttttgataaggacttcaacctttgcacaacatttgtcaatggtattgaaataacagataactaa

SEQ ID NO: 301096 - DNA, 333 bp, Proteus mirabilis
atgaaaacactgactgaagatactcgtctcgctaattcacgattcttcgacaacgatatcaataaagtgcctaaatatgcgctaactgtcggtgtaggaacattattagatgcagaagagttaatgattttagcgactggcatcaataaggctcaagcagtacaggtggcaacagaaggtgctgttaatcatctatggactatctcttgcgtgcaattacaccctaaagcaattttagtctgtgatgatccggcgacaatggaactgcgtgtgaaaacactgcgttattttcaacaaattgaagcacaagagcgccagcaataccaagattaa

SEQ ID NO: 301097 - DNA, 975 bp, Proteus mirabilis; identical to SEQ ID NO: 298579

SEQ ID NO: 301098 - DNA, 1914 bp, Proteus mirabilis
atgaagttaaatggctctaataataggagtttttatcaaggtgattttaaaacaggtataaatttttataattggattttacgtaataacagtagcttttcttcaggtgatgggaaaacttactatagatttaatgaaacaacgctttcacgtacaatagagcgcatcaaagccattttacaattaggccaaatcacatctaatagtgagttattagatagtgctgatgtgaatggttttcaattatattcagatagtagctatcaaaacagtaagttgacagttcctattactgggatgtctgaaaaaccggctaccgttgaagtcactcaaaataatcgattgttatatagaacgataatacctgcaggccctttccaattaaataacattagtggtgtatcatcaagtcaaccattacatgtcaaagttattcaagatgatggtactattcaagaatttgatgttatcacatcaaataaagacttaaaaaatccacaaagtagtaccagctttaacttttttatggggaaatatagaaaaaactcaagtgatgaacgcatacatactccttttattaccggttttgaaggtggcattaattatttaaatcataattttctagggggtatggaaatatcatcaaaatataagtccattgtaggtagcgtaaatagcgtttttggtgaacatcgtcctttatctactggctttggtattaaatatgcgtcttcttctaataaaggtgatggcttccaagcaaatgctaatttaagtttacctgtatcagtattctcactaggcttatcaacaatatatcgttcacgtaactattcgacactctatgaatctctacaaatagataatatagaagacccattagatgataatcttgctaataatcagacaaaaacatcaagctcattatctctaagcttaggaaatcaacgttatggatcactgagttatagccttagctatagccaatattatggtgataaaaaagacaattattcaaataccatttcttatggaaaaagatttccatttatgtcttttaatattagctatcaaaaaagtagtaattttgaagatcgtacatttgtaaacatcaacgtacctattaataattcatcatcatttagtactcaataccaacattataaaacatcatctttaacaacaaattatagtaattatcataatgatttatttagatattctatcggggcaactgctgataaagacagtaaagataagaatattagcggcaatatcaatgcaacaaccgcttacagccaaattagtgcgacaggctcctttagtaatagtaatcaaaaatcggcgatgctgacagcatctggtgctattgcttatagtgatggattatttgctacttctcctgtggagttaggagatactttcggtattttacgtgttccaggacaatctggtattttagttaactctatgggtggtggtacgacaataactaatcactttggtaccgccgttattcctaacttacctgtaaataaaaaaacaactgttctattaaatactaaaaatttaccactcaatgttatgttaggcacaacatcctttgatattgcattggcaaaaggtactgttttttctcgtgagatccccgtcaatacaatgaagcaagttttattagaaataaaaaaaccagatggtaaacctgttaatacagcaaatagtgtgattgatgataagggaaatctaataggtgttattatgggggacggtaatgttataataagtaatgagcaaatcggtaagccactaaaagtaaaatcagataatggtgacatctgttctgttgattattcagttccagaagaatttaatccagactttttatatgaaaaagttgatgcaatttgtaagtaa

SEQ ID NO: 301099 - DNA, 294 bp, Proteus mirabilis
atgtatttagtaaaaataaaatgggtacaaaaaaaagatggcggtcgaacaagacctccaggtgtaggtcgatattatgctgtatcaagattccccgaagatattacttggcaaaataatgcttggagtgtagtttttgatatacattccacaaaatcagaaaataatgaatttataagtgaagctagtgttgatttcttaatggataacgcaccgaaagaacgcatggaacaacatcgtacttttgatatatacgaaggccccaaaaaagtagccaccgtttttttaaaataa

SEQ ID NO: 301100 - DNA, 423 bp, Proteus mirabilis
atgcctgacccaattggattattgggtgggattaatctgtatcaatatgcgcctaatccgatgtcatgggtggatcctttcggattaatgaccttgtatcgaggcatgaatattaccgaatatgaaagcttgatgaaaactggcacttggacttcacctccgaatgcattagaaggtaaatggtttgctacaacatttgataatgctgttatttggggtaacaaaatggggcatggaggtgatacatttaaagttgtacaaataaatgtaccagatgaaattgctaaaaaatggcattttgaccctcatttagatagtattggtccagctagatttgccacattagataatcttaataattctaatgtgaaaataacttggagtaaaaatgttacagcgaaaggaaaccaaagatgtatttag

SEQ ID NO: 301101 - DNA, 537 bp, Proteus mirabilis
atgaacatctatacaattagtagtttctcattaggcaatggagttattgacttctcagatccaaagtcaagattatcaagttttttcatttggaatgaagggaatggtaagtttctcttatattcacaaccaaaaggtaaaatacaaagtactatgcgaagagataaactaagagcaccagattattttccttctaatatcggagttcctgttttttcgcaaaaagcggtatctatatttgaacttagaattgcatctgaaatgtcattctataagtgtactgtggaaaatacgcatgaaacgatgtttttatgtaaggtgaataattaccttccgattattgacgaggagaaaacaacattcagggaacttattgatggtactaaattgatcgatattcccacctataaatgtgataaagatttctttatagcgagagatagcgttttttgtgagcaaatgattctctctcaacaatttgtcgatttatgtaatgatgagggattgaatattgaatttttcaatgttaatgaataa

SEQ ID NO: 301102 - DNA, 444 bp, Proteus mirabilis
atgcctgacccaattggattattgggtgggattaatctgtatcaatatgcgccgaatccgttggtatgggtggatcccctaggtctagatcgcttcccttcgtggatggatacaacccaaggttaccaacgtcagcatttaattccttattcactcagaaatcatcctatttttgtgcaatcaggaatgaatattaatggtgcaacaaacatgatgcgacttcctgtagcaaaaggaatagatcctaatcaggatttgggacttcatcgtggttggacaaaagagcatgcaatatataatgaaatgatgaaatcaaaactagatgctttagaaagagttgcaattaaagaaaaatgggattatcgccgaatacaaaatgaaatattgaacctacaacatgaggctcgtaaaggatttaaaacaggaaaacttacatgtgcttga

SEQ ID NO: 301103 - DNA, 1722 bp, Proteus mirabilis
atgttggattcaagagaagaaagagaacacactattaagagaggtgatttgttcctaagtgaatttaataacatattgataattgataatgcagggatgggaaaatcaaccctgatgaaaaaaatagttattgatactattgatcattcagaatacattccaatttatatagagttaagaactctcaccaataatcctattgaagagcaaattaataaattattaggttttgatgatgttaatgatagtgatagcattttaaaaaaaataccttttatatatttctttgatggtgtggatgaaataccatttgatttaaagaatgatttaataaagaaaataaaggtgtttagtgatgagatgagtaattctaaaattatcattacttctaggccagatcaatcattacttgaacttcattcttttaatagatttaaaattaagccattagagatagagcaatcatatgatcttattaagttatatgacataaacctagtcaaaagaggaagtagcctaattctttcaaacaagttaattacagaaattaaattaatgagagaaaaggaaaataatactattttagagtttttaacaacacctttatatgtatcccttttattttgttcttataggtataaaccagttataccaaggcgaaaagatttattttatagtcaagtttttgaagccctttttgaaacccatgaccttagtaaagaaactggttatgttcgagaaaaatcttctggtttggatataactgactttagcatcatacttcgtaggcttgcattttggtgtttaaaaaataatggcaaactagaatttagtagggcagagcttgaaagtattttaactaatataacagaaaaactaaaaggagttaatgttaaacctatttcttttattaacgatttgacatattcagtacctttatttattaaggaaggcgctctttatcgatggtctcataaatcacttatggagtattttagtgcagaatttatttgtattgaagttaaggataaaagagatgaccttttattaaagttatatgagagtggtagtgctgttaaatataaaaatataattgagctctgttctgatattgactatgcttcttttagaaaatcaattcttcgtaaatgtctcactgaatattttgagcatttagaaaaactagaagatcttgactttttagatgattgcaacaaagaaatatgggcaagcattagttttttttctgatttaaaattacttttaacaccatatagtaatgctaatttgggtgatctaaatattcttgataatgtatatgtttttgaagaaagtgatttttcacatagttcttttgaaaataattttatagggtttcgtgagtatattactcatataacttatccagtttcgttaaaaaatactgtttttgatatacttaggctaaagaataatgagtatttctttaaagaaaaagactattataatcggttatctttagattctttaaaaatcccagaaaacgtaatgatatcaactaattcaggctatgttaagggatacagtaatgacataattcctgacattataagtatattattgcaatttagacataccttaacaattcccgtgatatacaagtctttagccatgaaagcattagatgatatcgtttcagatacatctaatggtgtgaatgatttattggaaggctttgattga

SEQ ID NO: 301104 - DNA, 465 bp, Proteus mirabilis
atgcctgacccgattgggttattgggtgggataaatctatatcagtatgcgccgaatccgttgggctggattgatccgtggggactagcaggtaatccggcaacagcaacgcatattacttatcaaggtatagataaagcgacgggtaaaccttatgttgaatatgccagtatgcaaggtaatcaaacagctcaggatgtcttaaagtaccgttatggtaatgattttagtcgttttggtggctccccccctgaaataatttatgatggttacggtcaaaaagggaaagacattgcacgaggcatggaacaacgtacatttgaacaattaggtggtttagaaagcaccgccaataagcaaaaccctgtaggccaaggtaatgcaagaagaacagaatatttgagtgcagcagatgaacatatagcagataaacaaactggtgctaacaaaagaggcggatgctaa

SEQ ID NO: 301105 - DNA, 615 bp, Proteus mirabilis
atggggaaaagaattgtttggaaagtcggcgacttagtcaatatcaagctgcgtgatgacctgtatacgataggccaaatgctaacgagcccagctatgcgattttacgacatatctaatactgatggagtatggaaaaatatagatctaaatgaagtaaccccattatttcgggtttttgtaggaaacgtaattaataaatatttaattacggagaaaataaaagaaaagtcagtcatagctagtaataaaccctatgagccctattggataaaaccatacaatataatggattttgagcattaccaaggtgaccgatttagctttccttttcttggaggtaaaattatcgatcttagccctgacggtaatattagcgtcacaagagcgcctgtaattaaagaagatttaacgcttcctaaagatcgtgaattaatagagcaatacgaattaaccaatatgtggggacatgaaccattgagcgaccgattatgtcgctattttgatactggtatcaacagagatgacctaaagtttgaagttttccccggtctctgggatgacagagaaaaattacgccccttgacgagtcgcttacctgacccattgagataa

SEQ ID NO: 301106 - DNA, 939 bp, Proteus mirabilis
atgccattgagagagaaaaagtatcaccaaaatcaagagagcattttattttttccaggtcagggtaggccttatttaggtatgggaaatagggtatatcgtgacgttccatcaataaaagaagtatggaattgtgcgagtgaaatagcagggttcgatgtaaggacggtttgtttaaaagggcccatgaataaattggtacaaacctgttatcagcaagtggcgttaacaactatcaatattgcttctctttatttactgcgtgagcattgttgtgtgaatgaggcgggttattcagggcacagcgctggagaatattcagcgttatttgcggcgaacgtactggaacttgaatctgtctttaagttaattagttatcgcgcatctatcatgcaacagctcgctaagaataacaaaggggtaatgtatgtcgttaaaaattgcccttatcagacgttatcaacattgattgcccagcaagatctcgcaacaaaggtgaatatttgctgtgataacagtgaacttcaccaagttattgggggggagtatgcaagtgtacgtaaggttgttaatcaattagctaatatgaaaatagaaaccaataaattagccgttaatggtgcttggcatactgaattgatgagcgaggggaaaaatttacttgctcattttttacagacaatccctttttcaatcccagataaacccctagtgatgaatgtttctgctgagattgttagcgatattgagacaattaaacagaatttagttaatcaactcacagaaaccgtaagatggacagcaactatggcgctatggtgtcatttaggctatcacaattttattgaacttggtgatagcaagtcattgtattatttagcgaaaaattcacatacgctaaaagataaaaatatattgcatgttaatgattatatttaa

SEQ ID NO: 301107 - DNA, 204 bp, Proteus mirabilis
atgactaaaagcatcataactaatgaagataaacctaaaaaattagcaacactatatgcaattatcggtacaataagcaaccgagtcactgtgttaatactaatcattttactttctgcttttagtgttgataaatgtaatgccgcaccaatacagataagccctaaaggtaaactagtcgcagctaacaattttagaaactga

SEQ ID NO: 301108 - DNA, 420 bp, Proteus mirabilis
atgaaaaatgaaactaatattcgccttggcagacattgtgtattcctgatgcacgtccatttggtctttgtcacaaaatacaggcgaaaaatatttgatcaggatgcaattgaaaaattgcgaggctactttgccagtgtttgtgctgattttgatgttgaactggttgaaatggatggggaacgggatcacgttcatttactgattaattacccgccaaaactggcgatatctaatctggttaacagccttaaaggggtatcgagtcgattacttcgacgtgatcgtcctgatattgcccaacgtgattactacaaggggttctttggtcgccgagttatttcgcggggagttgtggtggcgcaccaatatccattatccgccagtacattgagcaacaggaaacaccgagttagttaa

SEQ ID NO: 301109 - DNA, 756 bp, Proteus mirabilis
atgcagagttatcactctttatcggctcaagtttaccaattggataaaccgataggatgcagttttggcgatgttgaatactatcaacagcgattgaaagatgttaaaggtaaaattttagagccggcagtaggaacaggacgcatccttattcctttattgcaatcaggttttaatattgagggatttgatctttccgaagagatgcttgaattttgtaagaaaaatctaatcgagcatgggtttacaaccaactacgtaactcaaaataatttagtcacttttgaagtcaatacccctgtcgaggctattattattcctacagggacattcctcttattaaatacccaacagcaggcgatccaagccttaaaacagtgttatcaagcgcttgagtttggtgggcgcttattggttgatattagtcttgcccatcattttgttaaaggtgaatgtactagtcgccaatttaatacaccagaaggcgatctaattaccttacagataattaatgctgaaattgattatataaatcagttaactacttcacaccatcgttatgataaatggcgagatggcaagatcattgaaagtgaatgggaagttttcagcttaaaatggtttggtgtgtctgaatttgaacaaatactacgcttgattggttttaaacagatcacaatatcagccgattaccagtatctgcaaacccccagtaatacgacagaaattatgacttttgaagcgtataaaaaatag

SEQ ID NO: 301110 - DNA, 543 bp, Proteus mirabilis
atgaaatatagtttaatatattctattgtcctattttttactctttcatttacagcctattctaatgacagggaaaatatctctttagacgatggtattgtgacttttaaagggggaattgtagagcctgcttgtacagtatcttctgaaagtgaatatcaaattgttgatcttggtgttattagtagtaaccaatttcatggagtaggaagtcactctataaaaattccattttttattaaattaatgggatgtaataaaagtattacggataaagtcagtataattattataggtgatgtaaacaataatgataaacgattatttagcatcaccgatcaacaaaattcagcttcaggattaggtgttgcattatttaatgatgaaggtgaaataattattcctaataaattcaataagtataaatttattgaagagaatgaattaaaactaaaatttaaagcaagttatctggcaacgaaagaaaacgttatcggtggaaaagctgacagcgtagtttggtttgttttcaattatcaataa

SEQ ID NO: 301111 - DNA, 129 bp, Proteus mirabilis
atgcgtgttgcagctaatgcaacacctcccgcatatgatagcgatgaaaaactgaagagaaaaaataacgcaataaagtgtttagatattaaatgcatattaacctcaaatgataggtttatttattga

SEQ ID NO: 301112 - DNA, 1227 bp, Proteus mirabilis
atgtctttgaaacgtaaaattgcgctggggaaaaatgtattagaagctgctcaagagagagttcagtggatatttgatacttttgaacaaatcacgctctccttttcgggagggaaagattctactgcgctttttcatcttgttgccgcacaagcgcgaaaacagcatagaaaatttaatgtgatgtttcttgattgggaagttcaatattctgcgactatagatcatattataaaaatgaaatctatctaccaagattgtattgaacagttttactggatagcactccctatcaccactgaaagtggcatctctcaatatgaacctacatggacagcatgggagccaggtaaaaaatgggtaagacaaccgccagaagatgcaataactgaccctcactttttccctttttatcacccaaatatgctttttgaaaattttacccctgcatttaaccagtggatcacaggtaatcatcgcagttcgattatcctgctaggcataagagcggatgaatctttaaaccgatttattgccattagtaataatcgaaagttacgttatgccgatgatattccttggacaacggcatcagcagaaggcttttattatatggcctaccctatttatgattggcatgttaaagatatctggacttatatagcgcgtttcaatttaccctataaccctatttatgatctgatgcaccaagcgggcgttagtttaagtcaaatgcgtatttgtgaaccttttgggccagagcaacgcaagggactatggttatatcatgtgctagagcctgaaacatggagtcttgcttgtgaacgagtgagtggagctgatgccggaatgttatatacgaatcctcgtaataaatcaggtttctatgggcgacatcaaattagcaaaccttcccatcatacgtggaaatcttatgctcactttttattagccagtttaccagagaaaacagcagaacattatcgtaataaaatagcggtctatcttcgctggtatgccgaacgagattacccaaatggcatacctgatgcacaagaaggtgatactagcactaaacagataccttcttggcgacgaatttgtaagaccatcttgcgtaacgatttttggtgtagaacattagcatttagtcctactaaatcacactgttatgatcgatatttcaaacggatacaaggaaaacgaaaagactggcaacttatttag

SEQ ID NO: 301113 - DNA, 891 bp, Proteus mirabilis
atggatgaaaaaaaaatacaaagcttactatcaaatgttgactcattaataaaacatacctaccatttccgattagatgtatcaaaactaaaaggaagtagccgtcaaggtatctcgataaactttactgatgttcaagaacgcaggaatgactttgtaagagaattaaagaacacggtatgtagctgggtttacggaaaagaaaagtatcgtaagctattccaaaatgaactaaaaaaaagagggttcgatatacagaatgccacttcacatattgactttttagctaaaaataaatttagaagaggtattcctcagggtcagtttggtgagctacttttatttaattttatacaatacctattcaaagctcctgccttgcttagaaaaatgccacttactacaagtaacagacatgaaagatttggtgctgatgcaattcactataaaaaagatggagaaagaaatgtaatatatattggtgaatccaaagcatataaatcaaaatacaaattcaatgcagccctagaagactctttaaatagtataataggaacttttaataaccttcaagacgaattacttctgtatacctatgatgattttatagatcccacactacaaaatattgctgaaaagctaaaagaaggtgagcttgaacaaacaagatatgagctagtgtgcttaatttcatataatgaaaccaataaatattgtggtaagtgtgaagatgatattaaagaagacataaaaaagattgtaataaataggcttgagtcaaccaatgatagcttaactgaaaatattgatgaagtcttgttagaaagaattcattacattatttttccattctgggagtttgataaactactcgaggaatttgactcatga

SEQ ID NO: 301114 - DNA, 1233 bp, Proteus mirabilis
atgtcttataaatataaacgtaaaatttttcttggaaaaaatgtattagaagctgctcaagaacggattaagtggatatttgatacttttgaacaaatttcactctctttttctggaggaaaagattctaccgttctttttcatcttattgctacagaagcacgaaagcgacataaaaagtttaatgtaatgtttcttgattgggaagttcaatattcagcaaccatagagcacattacaaaaatgaaatctatctaccaagattgtacggaacagttttactggatagcactacctatcaccactgaaagtggtgtttctcaatatgaacctacatggacagcgtgggagcctggtaaaaaatgggtaaggcacccccctgaagatgcaataactgatcctcattttttccctttttatcatcctaatataatttttgaagattttacgccagcttttaatcagtggattacgggggaacatcatagctcagttattttattaggtataagagcggatgaatcattaaaccgctttattgccattagtaataaccgaaagttacgttatgccgatgatattccttggacaacagcatctccagaaggtttttactatatggcctaccctatttatgattggcatgttaaagatatttggacttatattgcgcgtttcaatttaccctataaccctatttatgatctgatgcaccaagcgggcgttagtttaagtcaaatgcgtatttgcgaaccttttgggccagagcaacgcaagggactatggttataccatgttttagaacctgagacgtggagtcttgcttgtgaacgagtgagtggagctgatgccggaatgttatatacgaatcctcgtaataaatcaggtttctatgggcgacatcaaattagcaaaccatcccatcatacctggaaatcttatgctcactttttattagccagtttaccagagaaaacagcagaacattatcgtaataaaatagcggtctatcttcgctggtatgccgaacgagattacccaaatggcatacctgatgcacaagaaggtgatactagtagtaaacaaatcccttcttggcgacgaatttgtaagaccatcttgcgtaacgatttttggtgtagaacattagcatttagtccaacaaaatcacattgttatgatcgatattttaaacgaatacaagaaaaacgaaaaaactggcaacttatttag

SEQ ID NO: 301115 - DNA, 579 bp, Proteus mirabilis; identical to SEQ ID NO: 297499

SEQ ID NO: 301116 - DNA, 555 bp, Proteus mirabilis
atgcagtggcggaatacatctactcgctatgggcacttgtcgcttcttttacattgggggacagcattaaccgtctatggcatgtttgccctaggattgtggatggtaaatttaggctattacgatagctggtatcattcagcccctgaaatacataaaagtatagggataattctatttattgttcttcttttccgagcaatttggcgttggatttctcctccaccaacagcattatccagctatagccgacttactcgcattagtgcccatgtggctcatatactgttatatctaattttatttgccatcattataagtggctatttaatttctactgctgatgggcagccaatatctgtattcgattggttctcagtacctgctgttttcacaggggaaggggagcaagctgatttagccggtgatgtacatctttatttagcctgggcggttgttgtgttatcgctattacatgccgcgggtgcattaaaacatcactttatagataaagatattacattgaaacgtatgcttggcataaaaacacaataa

SEQ ID NO: 301117 - DNA, 996 bp, Proteus mirabilis
atgcccaaaactcttatgagtcttaaacaaaatgattttacgcataaaaaaattatcgtaggtattagttcatgcttattaggggataaagtgaggtttgatggtgggcataaatgttgtcatcttgctgctgatgaattatctgagttctttgaatatcaatctacttgcccagaaatggctattggtttaccgacacccagaccagcattacgattagttcagtctaagacaggtgaagtcaggttaaaatttagtaatggaagtgaaggtgacttaacccaattgatgaatgattactctatcgaatatttggggaggtttaatcaatttagcggttatatcgtgtgtgcgaaatcacccagttgtggattagaacgtgtccgggtttatgatccaataggcaacggcaataaaaaatcgggtacaggcatttttactgaaaatctgaaaagaataatgccgtggttacctatagaagaagatgggcggttaaacgatccctatattagagaaaattttattacacgggtgtttgcgcttaatgagctaaatcaattgaaaataaataactttactcgccaggcattaattgattttcatacaagacacaaactattgttattagctcattcgcaaccgctttatcggcaactagggcgctttgttgctaacaataaagattgggattcattagagactttctttgttgaataccgtaatcgatttatggctctattacaacatcaagccacacgtcgtaatcacactaatgttcttatgcatgtgcagggatattttaagcaagatttaacttctaagcagcgacaagcattaagccaattgatcttagagtatcgtcaaggaatacaacctttattggcaccattaacattaattaatcattacttatcagaatacccagataattatctgagtaaacaaaaatacttttatccttatcctcaatctttaagattacgttatggtttatga

SEQ ID NO: 301118 - DNA, 552 bp, Proteus mirabilis
atgaaattgaataaattagcgatgttcgctattgcatcaatggctttttctgcgactgttgctcaagcagcttcaggtgatggtactattactttcactggtaaagttattgatgcaccttgtggtattgctaccgaaagtgctaaccaagctatcgattttggtcaaatcagcaaaagcctattagagaaagatggtatttctcaagttaaacaaatcccaattaaattagttaattgtgatttaactaaagccggttctgatactggtgctgctggttcttataaaggcgtaaaagtaacctttaatggaaatactattactggtgcaacagaagaattagcaacaactggtaatacagggactgctattgttatttcaggaacgacaactggttcaatggttaaattcaatgaagcaggtgaattacaagcactgggtaataatgataatacgctgatgtatacagcttgggctaagaaagcaacaaacggaacaattgctgaaggtgagtttaacgctacaacaaacttcacattagcctatgaataa

SEQ ID NO: 301119 - DNA, 339 bp, Proteus mirabilis
atggtagctgcatatgatattaaaacaggaactattatagtaagaggaagtgtgggttctgacattaaaatagaaatgcttcataaagatactgtggttctactaaaaaataaattaggtgatgttaaagttggaacaaaaacagtacattgtgataatattgtaggaggatgcggtgaagtattagccgcagatcagctgattcgaaaaggggtcaaacctcaagatatcagaatttctcaggcatatcgccccagaaaagcttacggatatgatttatctactatgccagaagaagcatttgttgatacatgtaaaaattgtattaaagttttttag

SEQ ID NO: 301120 - DNA, 690 bp, Proteus mirabilis
atgatggaaaatagtaatatttatttatctccgccattacaacaacacgcatttttatctaatttgcttaaacataattcaattcaaaatattgaattattacctgttatcgatttgctaacaggtgatgatatgttgataaataaaaatcaaggttgctctgtaattgccggaggtaaaggcaacgatactctaattgttgagggcggacagcatattttatttgccaatgaaggggatgataagctctatggtggtaaagggaatgatgttcttatttcagagagtggtaatgattatctggaaggtggagagggggatgatatctacctaattaacaaacatcatggtgagatcacgattaacgatcatgtagggaaaaatgttatttttattactggcttggataaagatgaagtgatgttatcttcccgtgataatgatgatgaagttcttctttctcaggataaaagttttactgtgagaataaaaaataaatataaagaggagctgcagagcacttatcagattgaacaaagggaggaggtgctgagtgatgaagcattagtctctattgtgcatgaaatggctcagtttaatcaaactcagttgtcttctatgcaaggaacctttttgcctgaagctaaagaatggactttaatgccaatcatcactaagcatttaggttaa

SEQ ID NO: 301121 - DNA, 837 bp, Proteus mirabilis
atgggaagtgataaagataattatattgatgcagcttcaggtaaagattatgtcctaggattaaatggaaatgatacgatcaagctatctgaaggtttcgctaatggcggtgaggggcatgatacttatattatttcacgtctaaatactttttataaagggaaagcagaagtatctattattatcgatgaagtaactggagatgaaaaactagaaaataatcaagatgcgtctgagcaaaatattgttaaactagaacataacttaaaagatataaaatcaataaaacgtattggttcagatattatttttttattagataatggctttattatcaatgaagataagacacaaacgccacttcctgcaacatcgatacgtttaaaaaacatatttaaaaatgagaacagttttgatgtactaactaattattgcattattacaaatgatgggtttattttaaataataatagcgatgctaattgtaatagtgatccgttatttaactttagctatatggagaattattcaaatcttgatgataaatatgaatatatatacataaatagcaataatcgagagtttaatctccgttcacgctccggttctgttaaatataatatattgcctgaattaaaatacagcggacttgctaacggtaactcgatagagttatctattgaaggagatagtggcaataatacttatttagccattgatcataatgcgcgaataacattaaccgcaggtgttgatgtttatcagctaaaaacgtttatagcgatgagagataacaccgttttcaaacttaagatcatacccactaacatccggtaa

SEQ ID NO: 301122 - DNA, 309 bp, Proteus mirabilis
atgattatcgcttattcaacagctcctaatgaaactgtcgcccatgaaatagctcaccatcttatacaggcaaagcttgcagcttgtattaacgtccttcctaatatcaaatctatctatcattggaataatgaaattgttgaagataatgaggtacttatgatgatcaaaagcgagagttcaaaacaacagattttgattgatatactagtaaaaatgcacccttacgatacaccagaagtcattattgtccctatagaaaatgggtttcatggttatctagaatggatacatcaaagcctaaattaa

SEQ ID NO: 301123 - DNA, 378 bp, Proteus mirabilis
atgttatatacaaatcctcgtaataaatcaggtttctatgggcgacatcaaattagcaaaccttcccatcatacgtggaaatcttatgctcactttttattagccagtttaccagagaaaacagcagaacattatcgtaataaaatagcggtctatcttcgctggtatgccgaacgagattacccaaatggcatacctgatgcacaagaaggtgatactagcactaaacagataccttcttggcgacgaatttgtaagaccatcttgcgtaacgatttttggtgtagaacattagcatttagtcctactaaatcacactgttatgatcgatatttcaaacggatacaaggaaaacgaaaagactggcaacttatttag

SEQ ID NO: 301124 - DNA, 309 bp, Proteus mirabilis
atggcggacacgatggagctggcgctgacgatgcgccggatgctgatcaccggccagggggagccgaatgccggtaattttccgaaagcccaggagatcggtaaccagtcggttgaccagctggatcgcgaaatcgggatgctgcaaacggaaatggaagtgcgtaaatccattgccaataacgcgatgctgacggtgattgagcgtgatcagcaacggacacaggcgaaccctgccacccagaccccagataatacggatgtgcgtgtacagggactggagcaaaacagtgacaccggaggacgttaa

SEQ ID NO: 301125 - DNA, 420 bp, Proteus mirabilis
ttgaggatctttttaacagaagaagggctaccaagtgatcaagaatctcttttttggttaaatataaaaacgatccctgctacagaaaaaacagaaaattcattacaaattgcatttaaaacgcaaatgaaattgatctatagacctaaaagtctaaaagacgttaattttgaagaagaacaaaagaaattatcttggtcaaaggaaagagggaaagtcatagtttataatcccacaccttattttatgaattttcaaacaatcaaattcaatggaaaattggttgatgatgtttcttatgctaaacctttttcaactaaatcatttgatataaatgataataatgaacatggtcttataagctgggagcttattaatgattatggggctaatgtggatttatccgaagttagaatataa

SEQ ID NO: 301126 - DNA, 324 bp, Proteus mirabilis
atgtgtataagagacaggtgttatatagatgctctaggcggtataaaaatcggtaataatgtatctatagctcaccaatgtagtctaatatcttttgaacataactataatgatgagcaaacaataccgataaaatatcagagaattataaaaaaaaatataatattacatgataatatttggattggatgtggtagccgtattttagctggtacaattattcctcaaaaaacagttattgcagctaacactgtaactaaaggtgaattaaaacaaggagtaaatgcaggaagcccagcaagaaaaattaaggatatactatga

SEQ ID NO: 301127 - DNA, 303 bp, Proteus mirabilis
atgcccgtgacgctgttaattttaagttccacagaaaaatataacggtgtattagatgaatttatgtccgcacatgaacattatagaaataagaaatataaagagacattaaatgattgtttaaaatcatttgaaagtctaatgaaggctatccatgaaaagcgcaactgggcttatactcccaatgatacggctaaatatgtctggaatgcttttaaatggaacaaaatcaaacaatcaatcagaagtttatgttgttgcatcattaaaaaatttaacaaatcaaacatgtcaagcgaatga

SEQ ID NO: 301128 - DNA, 390 bp, Proteus mirabilis
atgtctaaatcggcaaaaggtacgacagaacggcctggacggaacgtaaaagctaaatctggtttaaaccgctcaatactggagcagggctggtatgaaatgcgccgtcagcttgagtacaagcagctctggcgaggtggtcaggtactggcaatacccccagcctacaccagtcagaagtgcgcttactgtggtcatacagcaaaggaaaaccgccagtcacaaagtcaattcgagtgccttgaatgtggatatacagcgaatgctgatatcaacggggcacgtaacattttagcggcaggacatgccgtgcttgcctgtggagggagggtgcagtcagaccgcccgtcgaagcaggaacccgccgaggtgattcagacatcagtctga

SEQ ID NO: 301129 - DNA, 150 bp, Proteus mirabilis
atgccttggcgatcagtacaggcttttcttaatttaacacgtattggcacattttcacgtttatttattgttaatgtattgatatataaattattatttacaacccatgagccccaggcttccattagttttgatattttttgcatataa

SEQ ID NO: 301130 - DNA, 219 bp, Proteus mirabilis
ttgtcggataacagcaatttttttattctatccgataaaaatatatctcttcgtggtaaaattcgagggtatggtcatgttattttagagtcaaatgatgattacatggatattaaaaataaagaaatgttaataggaacagacaaatcaaaattagaggggggaacaaaatataaattaggtacaacaactattatagattatagtaaatacaaataa

SEQ ID NO: 301131 - DNA, 648 bp, Proteus mirabilis
atggccagagcctgtacgatacggcaactgatagcggatttatcccgctgcaatccggaggcattcgtcttgtgtgagatgtggttccccgatgatgttacctatgttgatgaaacggcttgtccggcagagacacgggcaacattaacgcatgttgcacatcattttgatgcggagctggggatcaactgggacacgctggcgtgtgcgttatcgtgtgtcagagatgctgagcagaagggactcgatatttacttttatgccagtgaaaagcgtggtacagacaaaagccggatacccgcctcacgttacgcagaagcggacagcgacggcgatattgaagtcgggtatttccgtaaggttaatgcgctgtttaagtgggggcatgaccatatcggggcttttgagaactgtgaaaaggtgctggtgacagaggcccatctgcgggctttacagcaggacttgcaggcactgacaccggaaaactgtcagacacggttcccgaccactgagggctttttctttggttcaacggcttatgatgaggcgtactgggctgatgtggaaggcgtcagacgctggctgtcagagataacggagacgtttgactttgacgcagagtcactgttttttgtggcctggtggtaa

SEQ ID NO: 301132 - DNA, 141 bp, Proteus mirabilis
atgaaggtatctacatttccggaatcgtctttttttgacgatctgcactctctcacgcaactgcatcacctctcaggtgagctcgacatggttcttgcttttgtccgtctggataattggcgagcacccggacgaagataa

SEQ ID NO: 301133 - DNA, 612 bp, Proteus mirabilis; identical to SEQ ID NO: 14549

SEQ ID NO: 301134 - DNA, 300 bp, Proteus mirabilis
  misc_feature (248)..(257): n is a, c, g, or t
atgaaaagttataaaatagcggtcagctacgatatgtctgactatatttcaacccatcgtgaatgtgtcgatattctacatactgatttttctgatgttgccgtgattattatttcacttaatgacattcagaatggaaagcttaatttaattgaacaaaatagctttgaacagcctatttttgccgttattaataaaaatgaagttatccctgctaatattattaatcgattaactggtgtaattgnnnnnnnnnnacagaaaatgaagttatccctgctaatattattaatcgattaa

SEQ ID NO: 301135 - DNA, 624 bp, Proteus mirabilis; identical to SEQ ID NO: 296788

SEQ ID NO: 301136 - DNA, 570 bp, Proteus mirabilis; identical to SEQ ID NO: 53713

SEQ ID NO: 301137 - DNA, 267 bp, Proteus mirabilis
gtggttggaaagataataaaagaaatggaagagcgtcagttaagacgctcagggaaagttggttcaaattacaagccatgttggaaggctacgaatctgctaactcttttgaactggacttgtgatcaagagactgctgataaagtggcttttgtcgctttatgcgttatctttgttaataagagaatggtctattattcttctaataaatcatcatctaagcctaaaggctcttcagataagataatgccagtattatcagcataa

SEQ ID NO: 301138 - DNA, 501 bp, Proteus mirabilis
  misc_feature (448)..(457): n is a, c, g, or t
atgtcattaacaaaaattgttatagtcggtggtggagctggtggattagaactagcgactaaattgggtgataagttagggcgcaaaaaaaaagcagaaattacccttgttgatagaaataatagtcacttatggaaacctctgttacatgaagttgccacaggctcgttagatgatggtgttgatgcattaagttatctcgctcatggttataaccatcactttaattttcaattaggcactttaacagggcttgatcgccaacataaaaatatcactttggctgctatttatgatgaaaatcaagagctattagttccagagcgtcaactcgattatgatattttagtcatggccttaggcagtaaatctaatgattttggcaccccagggatcaaagagcactgcatctttttagatagcccacagcaagcacaccgctttcatnnnnnnnnnngcaagcacaccgttttcataatgaaatgctcaatttatttttaa

SEQ ID NO: 301139 - DNA, 855 bp, Proteus mirabilis
atgctcaatttatttttaaaatattcagcagactccaacgcagaagctgaaaatcgtaaagtaaatattgcgattgtgggtggtggtgcaactggagtggaattatctgccgaattacacaatgctgttcgccaactcaatagttatggtttaaaaaaattagcgccatcagcccttaatatcacgcttgttgaggcgggtgagcgaatattacctgcattacccgtgcgtatttcaagtgcagcacaccaagagctgactaagttgggtgtgcgcgtgatgacgaaaaccatggtaacaagcgccgatgaaaaagggttaaataccaaagatggcgagcatattgatgctgatctgatggtttgggctgcggggatcaaagccccagactttatgaaagatatcgctggattagaaaccaatcgtattaaccaattagtcgttaagccgacattacaaacaacattagatgatgcgatttttgcgattggtgattgtgcatcctgtccgcgaaaagagggaggttttgttccgccaagggcacaatccgctcatcaaatggcaagccgttgttatagcaatattttagccatgttaaagggtaaaacgttaaaagaatatgtgtttaaagatcatggctcgttagtttcgctctctaaatttagtacggtagggagtttgatgggcaacttaatgaaaggcgatatgatgatagaagggcgtattgcacgtatcgtttatatttctttataccgtatgcatcaaatcgcgttacatggttatcttaaaacgggtttgatgatgttagttggatcaatcaatcgtgtgattagaccaaaactaaaacttcattag

SEQ ID NO: 301140 - DNA, 924 bp, Proteus mirabilis
atgcgtatttgttctttgttgctatgcaccactttcttagtatcatcaataacatcaagctacgcagaaataagcacacataaactgattcgccaagataatagcgaactgatttattatctagataaacaagctgaacataacaaaacactgttagttttaatgcaaggttctgactgtaatagcataaaaaataatacttttattcaagaaacctttggtagatggctaccgagtagtgatgttttaatggttgaaaagtatggtattacagcacaattgacttattttgacgataatggtgaaagagaagattgccctaaaaactataaactgcatgataatcctagccaaaggcttgctgattatttagcagtgctagataaattatcccctaattacaccaatattgtattacttggaggaagtgaaggcgcaacaatggttcatttagttgttgctgaacgtcatgatattagcgctgcaatcgcattaaatggcggtggtcgttttttccttgatgatgtactgtacaatatacgcaatacaacacctaaagagcatgtggaagaagcaataaatagctttcaacaactcgctaatgcaataataacgaatcaaattggtgatgagcaatttgttagtgaacatagcaaattatggtggcaacaatatcttgctattgatctacttgaggtgattaagcgcaacacgcaaactccggtattaattgttcaaacattagatgatatcaatgtagatgtggctgcattccatcaattatctcaagagataacgcaacctaatgtgacatttattaaatatgataaattaaatcatggtttttataatcaacaaggtgagcgattaaccggaaaagtcgttcaagatatacagcaatggtatgcacaatataataaataa

SEQ ID NO: 301141 - DNA, 564 bp, Proteus mirabilis
atgtcatctcagttcaatggacttatcccttccaattctttatcttcgtttaatatagaagtgattaaagaacttctgctctggatcgaggtaaatctagaaaagccgttattacttgatgatgtagcgataaaatcaggttatacaaaatggcatttgcaacgggtgtttaagcaagcaacgggcttaacattagcctcttatattcgtggtagacgactgaccaaagccgccactgaattgcgcttaactaaacttccggtattaactatcgcactacgctatcaatttgattcgcagcaatcttttacacgccgctttaaagctgtttttggcgttactccttcggaataccgtaaagttgatgtgttgtgtagcgacaattttcagccccccatcaattttgaagttaccgacctccctattccaaatattatcgagctacctgaaagctttctttatgttattcaataccaatacttttgctctatcgaggatattggcaagctacatgaagatattcgtcatcagttttggaatgatttttttgttgtacacagataa

SEQ ID NO: 301142 - DNA, 624 bp, Proteus mirabilis
atgaaattaaaatcacggcaacaagagaattcagaacaaacacgcttagctttacttgaagccgggcaatatctctttgtaaatcaatgctattatgatgtttccattgatgaaatatcacgttatgcaagggtcactaaaggggcgttttatcatcatttcagtaataaaaaagcccttttgagagagtgttatttactgcaagttaagcatgctgttcaaaaattagatgaagtgcctacttatgatgataaatggcaagagctaacggctctcttctctctttgtgttgaccatatttatcagtgtaaaaacgagttaattcccttacaagaagttatctcggtattaggttggaaagagtgggaagagattgacgccaacattcttattcctcgtatccaacactgtgttgatattctctttgctgaaaaacagatctgtgcttattcaccggctattgtggtgaatttaatttatggttttattactcatattgctatcaatctaaaaaatgaagcgtcattgccgaaagaggcatgtagtgactttaaagctatttttgctgattttttaatcggagtaaaacaagcatcaccacagcgtcatcaccatagggcataa

SEQ ID NO: 301143 - DNA, 453 bp, Proteus mirabilis
gtgaataagttaaagccctggtttcccattttattatggggagctttgtgtgttgctttattcttttcaactaaagaaatgattgaacttggtaaagagaataaagagctaaagaaaacaaacgactctctcgtggctgaaatggccgactacgaaaagcgcattaactcacttcatgaacttgatacaaaacacgcgacggaacttacaaatgcaaaggctgaaatcgataggctgcgcgttagtgctgagcgtaatcctgacagggtgtacatcaaagccgaatgtccaaagagcgctaccacttccacctccggcgtggctaatgcaaccaccgcccgacctactgacaccgctatcagaaattattggttactccgagagcgaattgcagaatcagagcaagtgatattgggattacaggattatattaggacggagtgtgtgaactaa

SEQ ID NO: 301144 - DNA, 579 bp, Proteus mirabilis
atgactaatacaattactgttccattttatgataacgagctttatgttgttgagcataacaatgaaccgtatgttcccatgaagccaataattgaaggtatgggattaaattgggcatcacagtttactaagttaaaaaaacgctttagtaaaggtattgtggaaatcgcaataccttctaagggtggtgagcaatcaatgatttgcctacaacttagaaaactttcagcttggatgctgactatttatcccaacaaggtcaaatctgaaatccgcgataaagtaattcagtttcaagaggaatgtgatgatgttctttatcgatattggacagaagggcgagttgttaatcctagaaaattaagcgtgatggaacaactcaatgaagcttgcgctgattttaaaagagatgaagcaattgcgagtaagtttggcaaagggttaaatgcttggaaggatgttaagcctcaacatgaaaataaaattcagagcctaaaagaaaaagcaggggaaatggtacttgattttattttgatggaaacgggtaaaggtaaaataacgaggggtagttgtgaataa

SEQ ID NO: 301145 - DNA, 420 bp, Proteus mirabilis
atgactaaaccagcacgcggtgaacgcaataacaacccaggcaacattgactataacccacgtaataaatggaaaggtttagtcggaattgaaacgggagttcctaaccctcgattctgtgtctttgagtcgcctgagtatggcatcagagcaatttataaactaactcaaacatatcaacgtaaatatggtttgaactcagtatcagcaattattaataagtatgcaccgccagttgagaacaacacgaatggttatgttagccgtgcatcaaaagagattggtgttggtattaatgacaagatagatactcaatcaaagtcagttgctatctctttagcaaaagcaatcgtgggcgttgagttgggctatcaaccgtattcacaaaaagtctttgaagatgcttggttgttactttaa

SEQ ID NO: 301146 - DNA, 1167 bp, Proteus mirabilis
atgagcactaacatccctccatttaaagctgatgtcgttggtagttaccttcgacctgaatatctacataaagcgcgtagcgattatgctaatggcactatttctagccatgaattaaaaaaaatagaagataaagcgatcattgagttagtagaaaagcagaaaaaagccggattacatgttattaccgatggtgagtttcgtcgtagctggtggcatttagactttatgtggggattaaacggcgttgaaaaagcctttttatctaaaggatattcattcgatggtattgaaactcgtccagagacggctcgattaacaggaaaaatatctggaaataaccacccttttattgaacatttttcatttttgttgaaatttgctgaggataatattgttcctcgtttaacgatccctgcaccagctcaatttttcaaagagctttatcgaccagagaatttagatagcactaatgcaatttatccttcaaaagatgagttaattaacgatattattggtgcttatcaagaatttataaaagagttatatcttgtagggtgtcgcaatttgcaattagatgattgtacttggggtatgatggttgattctcgatatcacaactcaggtattgctgagagcgaaagtgtaaatagttgctcatgccattcagatcatactgtaataagcaatgatataaactcattagcggaaacgcttgtttatttgaataatgaagcgattaaaaacgcaccatcagatttagtgttaacaacacatgtttgccgaggtaattatcgttctacatgggccgctagtggtggctatggaccgattgctgagatcctttttggaagagaaaatgtatcagcatattatttagagtttgatacagatagagctggtgatttctccccgttatcttatgtttcaggcaataaaaaagttgttctgggattaatttcttcaaaaactggagagttagagagtaaacaaaaagtaatagagcgaatctatgaagctagtaagttcgtaccattagatcgactatgtttaagtactcaatgtggatttgcatcaactgaagaagggaatgcattaactgaagagcaacaatgggataaaattgcattagtaaaagagattgctcaagaagtctggaaatattaa

SEQ ID NO: 301147 - DNA, 1566 bp, Proteus mirabilis
atgttaacaatcacaccaaattttgcacagaaacgcggattgacgatgttacgtcaggcatggaagcaaaatagaacattcatgatttatagcccaacaggaagcgggaaaacggcattagccgcgtttattactgacggacatattcagcgtggaatgagagtgatgtttcttgttccttacacaattttgattgatcaaacagccagccgttttattgagtatgggttgccagccgaagagattagctatgtatggcgcgatcatcctaattacgatccgacccgttttattcagatagcgtcagcagatactattattcgtagagattttccagacaacattgatttactcataatcgatgaagcgcatttgcgtcgtaagaaaatattagaagtgatcagtgaaagtgaattcaaggtaattggtttgtccggtacgccttttgcgccattccttggtcattactacgaaacactaatcaagcccaccaccatgaaagagttaatcaagcgtggtgatttaagctcatacgagttctatgcaccaactaaaccagacttatcaaaagtaaaatcgtccagcaacgcagagttcggcagtgattacaaagaagctgaaattgctgaaattatgagtggtgctgatttggtgggggatattgttgataactggttggtgaatggtcgaaacctacctacgatttgcttttgcgtcacagtcagtcatgccaattttgtcaccgtcgaatttaatcgtgcaggtgtgaatgctgaggtgatcactgcagatacgccacatgatgagcgtcagatcattattcatcggtttgagcaaggcgcgaccaaggtgcttgtgagcgtgggaacattgattgccggctttgatagtgatgtccgttgcattatttacgcccgtccaactaaatcagagattcgttggtgtcaggctattggaaggggattacgtaccgcaccaggaaaagagacttgccttatttttgatcactccggctcagttcaccgcttaggttatcccgatgatattgaatatgacgaactgcctaccaaaaacgacggtatgagtgaatcttcgtctagcagagagcaagaaaaacgagagaagaaaccgaaagaatgttcctcttgccattacatgaaacctgcaggtgtttatgtttgccctaaatgtgggtttaaacctttagtgggtgaagatatcgatgttgatactagccgaaacattaaaaaactgaataaaaaagagcgcacttacactcgagaagataagcaaagctggtggtctcaattgaaatactaccagaatcagcgtgcgacacagggcaagcccatcagtgatggctgggttgctaataccttcaaggataaatttggtgtatggccacaaggttttcacaatacgccacaagaaatcacacctgaagtgagtaatttcattaaatacaaacaaatcgcctttgctaagtctcgcaagaaggcgcaagtcaatattcaaaatttacgcactcaaattagccaccagccacagcaaggaggtttactgtga

SEQ ID NO: 301148 - DNA, 270 bp, Proteus mirabilis
atgcaccaaatcaatatgccgatgcctgatcactactttcctgatgatgctaagtggattcaggaacaactcacgaagttaagcccaagcatgaggcaaaaggcattagttaaatattcagaagtgtatcaaacggaatgggaacgagaacaagttccctaccgtaaagacaacaaagctcgtcatgaggctaacgtcagattaagagagttcataaagcgttatcagagagcaatgcaagggtatacagcaaagccgttatcgatttag

SEQ ID NO: 301149 - DNA, 225 bp, Proteus mirabilis
atggaaaaaataccattatcggttttggtttcaaagttggggcaaaaaaaagtagctgacttatttggtattcagcaaagtgcaataaataaagcattaaaaaacaaaagaaatatttttgttattcatgttgatggagaagtggtgggagccgaggaaattaaagtttttcctaataaaccagaaagggaaactcatgcaccaaatcaatatgccgatgcctga

SEQ ID NO: 301150 - DNA, 711 bp, Proteus mirabilis
atgaaaaagaaacctttgactgatgaacaaaaagcagacgcaattcgcctcaaatccatatttgaatctaagaaaaaaaacttgggattatcacaagaagttcttggggaaatgttggggatggggcaaagcgctgttgcgcaaatattgaatggcgttaatgctattaatcatgagcatgttgcaaaacttgcaaaaatacttgacgtttcggtagaagaaataagcccatttcttgcaaaagaaattagggaggtttaccaacctgttttatctcacacaacacaaagctctcaaagttttcatcaatacccattgttcacaaaagttcaggctggtgccttctcgacagaatttaattcatacacaaaacaagacgcagtgtcgtggataccaacagccaagaaagccagtgagcgcgccttttggttagaggttgaaggtcaatcaatgacagcaccaccaggaggtaaaccaagttttccagaaggtatgctaattctggttgatcctgaggaagaagtggagttcggagatttctgtgtcgctcgtttgctaaatgatgagttcacattcaaacgactgattagagagggtggtattgagtatctggagccattaaacccacgctatgacctgatccctattaacgggaactgcacaatcataggtaaggtaatcaagtcacaatggcctgacgacacgttttag

SEQ ID NO: 301151 - DNA, 342 bp, Proteus mirabilis
atggcgtttaacaatattgagatagcaaatattagacggtgtatggaatttttcatggaaaaacgccgcccagcagagcacctaagggatgaattagatttacagtatcgtatcgaggacgactcagtaattatctttgaaattaggcaactaatatggagtgatggcagagtagaagaacctatagcaaaaatcacacataataggtattcgaattcatggtctctgctttggatggataaaaatagcaactggcataactacgatgaaataatgttaggtagtttctctgacgctattaagctcgtcgaagatgatgtacaaggctgcttctttgggtga

SEQ ID NO: 301152 - DNA, 849 bp, Proteus mirabilis
atgaaaaaagaattattaacaataaagtatgatggagaggcgctgtctgagcataagatagatcttgcagtcttatctgaatccctttcaggattgcaattacttattagcgaagtaaatctaatactcaacggaacaaatgataaaattgatgtaaaggttgaaccgtttaaagctggttcttttgaatatctacttgatatagttcagcatccatctgaatacttggatatattgtcggtaattggattaacagtaacagcaggatctgcggctaaagattcactaataagttacataaaagaaattaacaatagaacaattaagagaatgtcttttactcaagacggcgattgcaaaatagtcttagaagacgatgagagcttagtaacgccctctttttttgggaaattactcaccagtaagactatcaggaaaagcttagataaggttatttactcgccattgcagcatgagggatatgagttaataaaaataaatgatagtgaaggaaatgatatcgttgaatgctcaaaagaagaaagcactgctttcaaatttaacaatagaagtaagattatcgacccaatcactcatgaagttattattgacgatgctcctataacatttttaactgttcatagagataaaaacacaaattggagagcagaatatgaaagctccccagtaacaataactatgaatgatgatgctttttatactaaaataataaaaggtatggaatctctagtattcagctctacttacttagttaagttaaaaataacagaagaactaaatactggtgaaaaaacatactccatagagaaagtataccaaattcaataa

SEQ ID NO: 301153 - DNA, 240 bp, Proteus mirabilis
atgcatacattggcaatttggctgatatttttcggctcacttcctccattgtacttaatatttagaattttttttgattggatactgtaccaattgttgcctgaaaaaaaagtccttgttgagttcgagggagggaatggtaaagcagagcagattgtacttacagggaaaacacaaaaagaattgtataaaaaagccatacaagccctaaggagcagggatgtcactggaagagaatag

SEQ ID NO: 301154 - DNA, 474 bp, Proteus mirabilis
atgtcactggaagagaatagtaattctgcagacaattctgtgtccaataaaatccagcaaaatactgcaaatatgtctgcaatgttactttctggagctatctctatttttcttagtgaatgggattttattctttatggctttaacttatcccagttgaaacctgttgcttttgctgctttaccagcctttgcactatccatatcttacgcagtaagaaaattatggttaatgaggaaaataggcgcctctcaaagaggtatattgtcagaaagtgaaaaagccatcgatagaataaagaaaaggcttgaagatcaatccctgccagatagtgttaagaaaatgcttgaagatgagctcttaacagcaataaaagacgatattaccctatctaaaacatcaataacgacccttaaaaagaatcaagataatgtaataaatgatctagatgataaaccacctaatataaattga

SEQ ID NO: 301155 - DNA, 207 bp, Proteus mirabilis
atgaccagtatatattctaccgcaatccctaatttgccgaaacctgacatgcatacagccataatgttacctatgttcttgtttcgtttctggactaaaactgagcatccagagaaaaaagaagttatggccaccagcgcagaacaagctaaagaattactcggtggcaacgttgttttctctgctcaatttccttgtgaggcttaa

SEQ ID NO: 301156 - DNA, 198 bp, Proteus mirabilis
atggctcacaaactcaacttagaagctgttgcaaaaaaaagcgaccaactaaacgcccttttattccagctcaacgctgagcgcatatcgggtcaacctgaaatagaaagtttaattggactggcttacgaattatcaggtgatatttcagtctggttaattgaagaaaatgcacagagagataatggcaatgaataa

SEQ ID NO: 301157 - DNA, 405 bp, Proteus mirabilis
atggcaatgaataacactgaactaaagcaatccgcttgtgatgaattactttatgcaacttctattttaaacctcattatcaatgataacgtaacacctagcgataatatgtttaatgcgattgaatcagcagtagccaatatagaaagagctaaagaaagtgtatcgaatattaatactgataaatcaccaaagcctatcggtgaaattaaaataagtgataacgatacaattgaaacagctgtcggttgtattttaaatacattggaaactgtaatcaatttaaaagttgccgaagaaagcggtcatattaaaaattacgatattcaaattacaaacttaatccagtcagccaaattaaatttaaaaactgtttatgaaaaaattagtttcacggaggcgtaa

SEQ ID NO: 301158 - DNA, 300 bp, Proteus mirabilis
atgaatattgatgaattaattacccttcctgatttaagtaaattaacagaaggtgaactgggtaacttaagaggtaatttagatttagctatcgattcacttgttacaggaatgaatatattcggtgagtttatgttttgggctgatgctaatgaaaattatcccgatggtaaagatcatcttggggatgtgggattatttgtaagtcagctatcgtcatttatatcaatattaaatgacagacttggtggaattgaatacgaaatatcaaatcgaaaaataaaaggaacaagaaaatga

SEQ ID NO: 301159 - DNA, 423 bp, Proteus mirabilis
atgagcagacaacacgaagctattgagaaagcaactgacaatcaaattactattgctatgcgccctgtttatattatttcaggtgctaatcgtgcttacttaagtgagcgttcagcattaaataagctagcaaatatcctcaccgagcgtgaacttcataaggaaggcattgagactaactatgaaggtgaacaatgcgaacttgaaaatggcacaatcgcttttaagcgtggcgaacctaccgaacactttatggatcgcaaggaagctaaactaaccgaactccaagagcgattaaagcaagagcgtaatattgaacgattacaaaaagaatatgctaaagctgtcgctaaatatgatgatgcagaaaaagaagctgatagactatattacgaattaaataatgctttaaccaataaataa

SEQ ID NO: 301160 - DNA, 354 bp, Proteus mirabilis
atggataaagttaatttacttgaagtaagaagaaagcgttttatcaactcagtgcttatttatattaaacaaaatggaaagaaagctgagtttaaatcaaagttaaataataaaactgttattacagaaattagctttgaaaatttaaataatttcttccgtgatgtctatgaagaaaaagattgccgtcaacgttgtaagtggagtgataaagatatctacaatacttatgaatggttatataacttaaatggctcgatttctgatatgggtaaattcatgattgattatattgttgagtatttacctccttacttaaatggagaggaatataaatatcatgacgtattctga

SEQ ID NO: 301161 - DNA, 207 bp, Proteus mirabilis
atgacgtattctgaattcatgaaaaaaggtaagcaattagaggggaaaggattttatagacgcgcactagagcaatataaccaagcttttattatcgcagatccaccagctaaaggcgcaatgagttatcaacaaaaaataagtaatcaatcatctaagcgttgtttagataaagccaaaattaaaataccgggtggcatgttatga

SEQ ID NO: 301162 - DNA, 477 bp, Proteus mirabilis
atgaatagtaaaaaaatgacaataaatgaaatcatcgaatatttaaaagaaaaaggtttccctgattccttattagataaagaagctattaagtcaaatcgtaaattaacaccagaagaacaagagatatttgttaagcacattgttgataatttaagaacgattgtagcaaataaatatttaatctcctgtgtaacgcgattcggtcctggtcttaatgagcagttttcatttagacacaaaaatattgttgtcgatttggatttaaaaattatcgagaagctactcattgtaaaagttgagtcagtcattctcgatcagtcaggcgatggcgtattcgccctgttccgtttttacgaaggtaacaaagcaaaaggcgaagaaggtgataaatggatgcaagacacgcttgatcaactactcatcaatagcgccactttgcttatctcacaaggtaaaagtcaattaatacactaa

SEQ ID NO: 301163 - DNA, 699 bp, Proteus mirabilis
atgaataatttaattagcaccaatgcgtcaatgacctctaaagagatcgccgaattagttggtagccgtgaagatagtgttaaaagaactatcgaacggttggcagagaaaaatgttatatccgaaccaccaacggtggatgggattaaagcagcaaacggaaccactccactacattatgttttcacaggtgaaaaaggtaaacgagacagtatcattgtcgttgcgcaactgtccccagagtttacagctcggttagttgatcgctggaaagaacttgaagatgaacgagtcaaaccaaaatcacaagcagaaattattgctgctatggcgctggctaacttagaaagcgaacgccgtatatctcatgtagagcaaaaagttgaacaagtgaatgaagtcgttgagcaaataaaacaaggaacgatccctgtaggttggattgggtactctctggcgagaactaaatcaggtatgacggtggataaatgcaaaacactcaccaaacagttcaatgttcgcaaaaataaaataactattcttacgcccgaaggtatgcctaggcctatggccattattcatgaagctgattttatatctgcattcaaggcaatgatgagtgaagccgaaaaacgtggcactcgctggcatcatcctaaaatgggattgtttcaggcaattggctgggagggtaaataa

SEQ ID NO: 301164 - DNA, 582 bp, Proteus mirabilis
atggcttattttactgatactagtaatggcgttatttctgatgatggtgctttaatatcttactctgaagctgtaacagcccttgaatcaggtcaatacgataaagagttattgaaaggtttatatttagccgctgcagtcatgggtaagttagctgatgaacctgaaacattaacacctgaacagagaatttctgtctggcgctgggtggtagcaacttgctttattcgtgaactacaagaaaagaatggcaccactgaaattcgtaatgaagaaggcggtgttgatcttgccactatttacagtaacggagaaaacgctttaaccatttacccaacttctttgcgcctttgtcttgcaagccattttgaaagcattcttatcgaagagttagggggtatctataaagattattgtcctgacttcatcataaaagcctatatcggctttctggacatctcccttgaacatggtcctcgcctatcagaaaaaggacgtgaagggctctgtattcttcatgatgattatattcgcgagttagaagctaataacggatttctagctatgccaactatgcactaa

SEQ ID NO: 301165 - DNA, 609 bp, Proteus mirabilis
atgacaactaaattaccttacatcgagacaagccaattaagagctgcacttacattattaaaaatgagtgatgatgttcgtcttgttactaactgtgtacatatcaacgctgaacatatcgaagtgtctaatgggcatgtagtattacgcatgaaacacaactctgaattcagtgatgatattgttattcaatttgatgaagcaattcctagcgatgctgaatatacacatattaaatcatatgacgatggttcttatgtcgctattcattataagcaagagaaggatgaaaatttctatccctactataaaacaaaactcactttaatcaaagataagtacccgtcatttaatcgtctttttgagcaggaatttattaaaggtgaagcacctttattgcagtccatgtatttagccttgccttatctactatttggccgtgttattacgggaatgctgaaaacaaaagatagcaaaagtgtgcttttcgatttttcacttctgacaaaaaaatcatttggtgatcctaaattacttgtattagcagtggctgataatgcttttgatattgctgataaagtttacagcttaattaaggatgatgattaa

SEQ ID NO: 301166 - DNA, 318 bp, Proteus mirabilis
atgacaactttagatttcaatctcgttagtgtcatcaaaaatgcaggtagtgatcccggtgatataactgatgcagtctggaaagccggttatcgtaaaacagattttaccactgagcagatcattgatattgcagtaagcatgacgggtgattctatttgtttaaaattaccccatgacaccttacctaagactttagatgacatcagtaaatatcatttaaacgatatcatttttgatgcccattgggataacccaccagcgactatcgcacagtgcattatggagaacgggtatagggaaggaaataaaaaatga

SEQ ID NO: 301167 - DNA, 189 bp, Proteus mirabilis
atgacaactgtgactcgatacattaagtggaaggaaatgatccagttaactggcaaaagcaaacctacaatttggagaatgtacgcaaaacgaaatgagtttcccagaccagaaagaacaaaaggtggtacgtttttaggctggccagaacatgtctatgaagagtgggttagaagtgaaaaactgtaa

SEQ ID NO: 301168 - DNA, 345 bp, Proteus mirabilis
atgaaaattaatacctcaaaactaaaaggattagcacttgattgggcggtaggtaaagccgttggcgtcgatgttcgtattggcaaagagtttgttgttgatgctaataactgcgtatatagcccatctagtagttgggtaatttgcggtgagtttataaataactactggattgatttaatgtttgaagaagttgacggggttaattattgctatgcatcaccgccacatttaatgggtgattatgccactgctaatactgctcaagaagctatttgccgagcggttgttatgcttgagataggtgatgaagttgagatacctgaggagctagcaaatggctaa

SEQ ID NO: 301169 - DNA, 270 bp, Proteus mirabilis
atgaaacatccatcaattatacgaattagcaacgatagtattcaaacgctactaatgaaaggggagcataccgccagcgaggtgattaattcagccattgagtctggggaaatagatgagagtgaccgtaaattttgggaaaaatacgatgatgtcaaaatttgttactttaaagcggtacctaagtctggttattcagcgtattaccatgaatcaagcaaagatgttaaaggtgcatttttagcaacggctgtcatgatttattggtaa

SEQ ID NO: 301170 - DNA, 627 bp, Proteus mirabilis
atgaatgaggtatcacatttagccactgataaagatattgtaagtatatggtctggaataattaatgttgtttatttacttatcgctggagtgataggtggctttcttactaattggtggaagagaaaaaaatatcttttagataaacaaagactagagtatgaaattgaattatcaaggaataaaattgaagcggataaaaaatctcttcgtcagcaaatgataacaaataacattgcaccgatgagacaaatttggattaatgatttaagaaaatcttgtgcagattatttttctgatatcaactttataattgtatatggaaattcaaaagacgatgagtttaagtccgaaattagagaggaatacaaaagcagggtgttttctttaagtaaaaaattctcatatatagatttattattgccatttaaaagggataataatgaagaggttgaagccgaggagttcagggcttcactaagtaaaattgacttgttttttaattctactgaagataaaccatcatacgaagatatgaaggaaaatattgttaacagtagagagaaattaaaaaaattactaaaaaaagaatgggatgaaacaaaatcacttaaagagatagactaa

SEQ ID NO: 301171 - DNA, 1197 bp, Proteus mirabilis
atgctgaccgatacaaaactaagaagtttaaagccacaagacaagctttataaagtgtctgatcgagatggtttatacgttgcagtgacaaaaagtggtgttatttcatttagatatgattatcgttttaatggaaggagagaaacggttacttttggtcgatacagtgctgacggtatcacgcttgcagaagcaagggctgaattaattgaagcaaaaaggctactaaacgcaggaatatcgccagcttcaaataagcgtgacggtattgaaagtaaaaaaatagggacggtattcaaagactataccgtcaatttccttcgtgatgcccaatatgccgactcaacaagggccatgaaagaagcgattattgaaaaagaaatttatcccgtattcggtaagcttcaactagaagagatcaccacaccacggcttagagcattgtgtgaaaagataaaggataggggcgcaaaagcgaccgcattacaagtacgtgagattgttggatccgtttttacttatgccatagatagaggttatgaaattagtaacccagcagatgcaataaaagcctcttccatagggacttttcaggcacgagaaagggcaatgtcaccgaaagaaatcggtatcttatttcgtgaactagaaaactatagttgttatccaaccttaaaattggccgttaagtttgtattgctaacattagtcagaaagtctgagtttattcatgcaacatgggatgaaatagactttaaaaatagacaatgggtgatccctaaagggcgaatgaaggggagaaaagagcatgttatttatctctctgaccaagcaatggatatcctaactggtatgaaagtttgtgccatgggaagcgattacttaatgcctggtcgatatgatattaaaaagccactatctaatgctgcattgaataacgtgattgatggcaccgtaaaacgtatcaatgaaaaaggtattgagttcgaaccggttactgttcatgatttacgacgcacagcaagcacgctattgcacgaagcaggttataactcagattggatagagaaatgtttagcacacgttcaaaatggcgttagagccgtttacaacaaagccgaatatgctgaacagcgcaggaatatgttacaagagtgggctgatatggtagatgaatggataaaagagaaagattaa

SEQ ID NO: 301172 - DNA, 2250 bp, Proteus mirabilis
atgaaaactcaattaacaaggaaaatacttggctcttgtattctattttctggtattcattctctggtgtttgcggctgaaacggaaaaaacagttcaatttagtagtttaaaagtctcatcggcacaaaaacaaacaccagagcaaaaagcgttagctaagccgggggcttatagcgctattggtgaaatcaataatcttagctcggtagaacaagcattacgatctacaccgggaacttacacccaaatggatgccagtcagccgggtgttggggttaatatccggggattaagtggttttggtcgagtcaatatgatgattgatggggtgacacaaacgatgtatagcacgtcacctagccaatatgcgcatggtggacaaccatacaaccagtttaatagcatgatcgatcctaactttattgtgcaaattgatatttctcgtggtcaacaagatggtgaaaatagtattaatgcgttagcggggagtgctaattttaaaacaataggtattgatgatgttttattttctaatcatcgttggggaataagaagtaaagcggctcgagggactaatggattaggttataacggtatggttgcgattgcaggaaaacagccgatatttaatcatgatggttatattggtgctatgtttgccatcagtggacataatattgagtcttcttataaaaatggggcaggttttaatagtcatgaatttgcaaccactaaagactttaaccaaaagccacattctgaattagcaaaaatatcgtttaaacccaatgattctcatgaaatagagttaagtggtcggttttataataataaatttaatcgaagaaccatagagagccaagattattatgctaaatatcgttataccccactaaacgatctttttgatagtgaaatattattgagtagaagccaagcttcgcaaaaatttgccggtgactctttaatgtcattacgcaatgggcatgcgaaaaatatttccaatgcacttgtcgctaaaaataccagtcgatttaattatcatcagctggatatggcactaacattaggcactaaattgatgtcgattgattataatcgagaagtgacagctccttcgagcgatccatggcaatcacaaaatatgattgaatacaatgtatttgctccgcaaggaaaaaacgacatcagcagtcttttttcacaaataaaatttgaatacgatatttataccctcgcattaaatttaaactatacggattatcatattaaaggatataaacccgcttgtgatcccaaagcagcgtgtttccctgaaggtgcgatgaatgttaatcgccacgaaaaagcgtgggagccgggagcactcttttctgcacaaattatccctgaatttgaaccatttatcagctatgcccatacgacaagggcgccgaatccacaggaaattttctttgctaatgaaggtggggcatcgatgaacccctttttaagaagtgagaaagcggatactttccaaataggttttaatagttatcgccctgatttaattgttgctggagacagccttcgtttaaaagcactttggtatcataccaaagtaaaaaattatatttctagtgattcctattttgtttgtaaaggtggcaaacgttgtaaaaacgatggtactttgactactgatgactatggtgatatggaatacgatggaaatatctatttatacacaaatagccttgatcctgtcacgatgagaggttatgaactacaagtaaactatgatgctgatgtattctataccacactttcttatagcaatgagcgtacctcacaacccacgtctcttgcgatgggtgattttgggcaaagtcctgcatcagaacttcccaaatactacgcaacgattgatgctggtgtgagattattcgatgaccgatctctcgaattaggcaccatcattcaaattactggaaaaagtcgtaaggcttcgcctgaagggctcgattatgatacaggagccatccctatggtcgaacaagaaaaaatccctactgtgatcaacgcgtacgctaactatcaaatgaataaaaatgtgtcattaaaatttgcgatacataatctcatgaataaaaattattcaaatgcacttgatagaagtaattcagcgccagatatgtacgaacagggacaaaataaacaaacggctagaggcagaagtttcctgtttggtggagaaattcgtttttaa

SEQ ID NO: 301173 - DNA, 204 bp, Proteus mirabilis
atgattttctcaccttttggccaagggcgtgacagtgcattagccagtgttgaagagcttaaaccagcttggcgagagatggctgccagtgttgtgcctcgttttctgagtgcggcaataatatcggcaggatgccaatcagatttccttgaaatcatttttaatcctttttctataaaattaaatgctgtgttagtggtataa

SEQ ID NO: 301174 - DNA, 282 bp, Proteus mirabilis; identical to SEQ ID NO: 286958

SEQ ID NO: 301175 - DNA, 177 bp, Proteus mirabilis
atgattacatttttactgtgggcgactatagttggcatgtttaccggactcgttggtctttttatgttttttcatacatcagataaatccggtacgggaaaagatttaatctcaattggtatggggattgccggtatatgtgcgatcggcttgttatggatgaggacttttagttaa

SEQ ID NO: 301176 - DNA, 246 bp, Proteus mirabilis; identical to SEQ ID NO: 286960

SEQ ID NO: 301177 - DNA, 330 bp, Proteus mirabilis; identical to SEQ ID NO: 286961

SEQ ID NO: 301178 - DNA, 1161 bp, Proteus mirabilis
atgggcgttactgtcgaaaaagagtatagggtcaagcgtagccgagcaccgaaaggtaacggattaaaaaaatctgtcttggcggggaagtctgtttttgctcataaagttaataatggcggaaagctttacagcagcagagtgaaagaacgactagggaagcatggacgaagtaaagaagttttggttaaagttacaggtgcagcaaaaataaatgccggagtaagaggaagtattgattatatttctcgtaaagatacactatcattaacagatgatgagggtaataaaatcacagcggaagaagctaaagaaatcatgacagaccctgaaaatgaggaattaaaggagaagaaaacaccagatattactaaaaatattgttttttcaccgcctgcttctgcggatgtaagtccggaagatgctcttgaatctgtcagacaaacattatcaaaaagatatcctgacaataaatttgtacttgtatatcatgacgacaaaaaagaacatccacatgtccatgccataataaaattgaaaaaagaagaagaaagaaaaaaaattcatatatctaaaaaagaattgcgttcattaagaacggatttttgcgaacagttaaaactaaagggttatgatgtaaaagccacacataaacaaattcctgattttaaaaataaactgaaagaggaagatgcggtggcaccaagacggcaaaaaaatgtaagagaggtagtggattttggacgtgccccgtatcagtttaaagagggtaataaaccacaaaactatttgactgtgaaaacacttaatggcaaagaatatactgtgtggggtaaagagcttggagagcttgcagaaagagaaaaagttcaaaaaggctcactgattaaactcaaaaaatccggttcagaagaagtaaaagtaccaagattagataagaacggggagcaatcaggttggctaattacccagcgtaacaactggcaattggaaaatatcgggctaaaaggcatagacagaacacaaaaaataggaacagaaaaacaaacggatttaactgaacaactgaaacgccagcaggagcagaagcgtagatttaagcttcaagcggcagaaatgctcaagaaagaacaaaaactcaaaatagggttgaaattttaa

SEQ ID NO: 301179 - DNA, 549 bp, Proteus mirabilis; identical to SEQ ID NO: 286965

SEQ ID NO: 301180 - DNA, 186 bp, Proteus mirabilis
atggaacaacaagttattacagatatttctctctctgcccgtattattggggctgctttctattacccaccaactgaaaaaagtgacattgctgagttactctcaagcggcaaatggttaactgaatggccttatggctctgaagaagaaaaacaacgcattgcctcattattggcgcaaagatga

SEQ ID NO: 301181 - DNA, 768 bp, Proteus mirabilis
atgagtatagaattaaccgatgaagaaacgctgcgttataatcgccaaattgtgttaaggggctttgattttgacggtcaagaagcactgaaaagtgcttctgtattgattgtcggtgttgggggattaggctgtagtgtatcgcaatatctcactgccgcaggtgttggcaaactgacactattagattttgataccgtttcactgtccaatcttcaacgccagatcctgcatcgcgatagcaccattggtcagccgaaagttttatcagctaaaacaacattaaacgcgattaatccccatgtacagatagatacggttgatgcactacttgaagataaagcactggctgaattaatcagccaacatcatctgataatggattgcacagataatgtcactatccgtgagcaactaaatcgactgtgttttgtgcagaaaaaacccttagtatctggtgcagcaattcgtatggaaggccaaattagcgtctttacctatcaagatgatgaaccttgctatcgctgtttaagtcatctttttggtgataatgcactaacttgtgttgaagcgggtattatggcccctgttgtgggtactattggcactttacaggccattgaagccatcaaattactcactggttatggtgaaactttacatggcaaagtattaatatttgacgctatgcggatgcaatttcgtgaatttaagttacctaaaaatccacactgtgatgtatgtgcggctaatttgcccgataattga

SEQ ID NO: 301182 - DNA, 516 bp, Proteus mirabilis
atgttaatgggggcggcgctaatggcatccggttggttacaacgacgctattcacagtctcattatggtttgatagcggtttgttttttagtcataagtttacttttccaagggacgcttgttattaccgattattatttagattggcattatatgtggtctgcggtagtggctcagcctatcaccatggtgatccaaattattcaaagcttaggttatattgctttactctattgggcatggccttatattcaacacagttttatcgcctatgctttacgttgtgtggggaaaatggcgcttaccacctatttactacagagtattattggcacgacgcttttccagcggatggggttatttaaccaatttactttattgcagcttatgctatttgtgatggctatttgggggataaatattatctttgccgtaatgtggttacgctatttttctcaagggccaatcgagtggctgtggcgccactcgtcaacagggttagctaaacgcttttaa

SEQ ID NO: 301183 - DNA, 1614 bp, Proteus mirabilis
atgaaattaagcagtaacaatgctgaaactatggagagccttcgcagtgagcggaatcaatatcgtatacttgtcgatattacaaattctgtattagcgcatctagacatggatggcctcatttctgaagtatctaaagaaatacatcgttttttcggacttaatcatattagtctgatgttatgtcgtacttcatcacaaaatagtcatgaaggtattctttattctagtcgttatcagacaggaaaatctgtcattcgtcaacaacgtaagttcagtagcgccaataacaaagccgaagaaattattcatcaaaacaaacccgttttaatcgatatcaataaagaagatcaagacgatgttttgattaaacgtctcgtaaaacaaaatatgcagacggctttgttattgccactggcttttaaccgtaaaccgctaggtttattaatcctagcgcatgaaataagtagtgtttttactgaagaaacttgtcaattattgcaacaaattgccgcgcgcatcgggattgcaattgaaaatgccgccgcttatgaagagataactcaccttaaagatagccttaagaacgaaaatatttggcttaatgagcaaataaatagaaatggtagttttagcgagattatttatcaaagcgatgccatgcataatgtactagaacaaattgagttagtcgctcaaagtgacagtactgtacttatcttaggcgaaacaggtactggtaaagagttaattgcacgagcgatccatcgtttaagtcatcgtaaaaataagacgatgataaaaatgaattgtgcagcagtaccttccggtctgttagaaagtgacctttttggacatgataaaggcgcttttacgggtgcaacacatgcccatgtgggtcgatttgaaatggcagataaaagtacgctttttctcgatgaaattggcgatatgcccattgaattacagccaaaactattacgggttctccaagagcgtgaaatcgaaagattaggtggtaataaagttattcctgtggatgtacgcttaattgcagcgaccaataaagatttatgtgaactgacggatgaaggggaatttcgagaagatctctattatcgtctgaatgtttttcctattattatcccgccattacgggagcgacctgaagatatccccttattggcaaaatattttacgcaaaaaattgcccgccgcatggatagaaaaatagactgtattccaacacatgctttggagcaattaacccattatccttggccgggaaatgtacgagagcttgaaaatattattgagcgcgcggttattttaactcgaggctctacgctaaatttgcaactaaaagagttaaatatcaataaaccatctcgtttaaaacaagtgctttcgcaaccatcagccatagaaaaaaagatgcaaactagcgcacctgaaagtgatgatgaagagcgtgagcggataatacaagcccttagagaaactaacggtgtagtggctggtgccagaggtgcggcattaaaattaggattaaaaagaaccaccttattatcacgtatgcaacgcttaggtatttccattcctgaaattctttag

SEQ ID NO: 301184 - DNA, 1281 bp, Proteus mirabilis
atgaaccaaaagcagccagcaaaacccttatcaaccaaagccattgaggcaatgaaacctaatagtaaagataggtctgatacaggtgaaaatacaggtttacgtgtattttgtggtgcaacaggcattaagacatttatttatcgatatagtagcccagttacacataaacttgtacagataaaaattggtaattttcctcaaatatcgttgagtgaagcgagagttaagctacaagaattaaaacaattacgtcaattaggacgatgtcccgcgacagagctaaaagaagaaaaacagcataaaaagcagaaacaactacagcctcaagaaacaaagctagcggtaaaggcgcttatcgagctctaccttgttgaacgtatcgaagatcgcaagggaaaagacggtaaaatcattgcaggagcaagaaagaagaaagggcaaatagaagtccgtcgtatgcttgaagcggatgttattcgcgttttaggtgaacgaatggcacatgaagtgacccgaaaagatgtcattgaacttgtacgtgaaattgatgggcgaggtgctaaggttcaagcgggtaatgtattacgtgaattgtcagcagcctatgagtttgcaattggtctcgagtattttgaagataatttcgctaatccagcattattggcgaaatcgagtttgcagcaagctaagtttaaactaacaagtaataaaggctctcgttatctagatgataatgaactcaagaaatttttagcatggttgcctagttcagcttacaccaatgttatgaaaaatgttttccgtctgacgctttggacgggctgccgaactggtgaagtgtgcgcaatggcttgggatgatgtggatcttgaaaaaggaactattcatttgaaagaaaccaagacaggaattgaacgatacgtgcaattacctgagcaagcagtcatctacttgaaatcaatgcgcatgaactccgataaatatcttttcccatctcaagtaaccaagttgccgattcaacaaaaatatctaacagaatgtgcgtggcgtttacgcaaagaaggcaagatgctagatatccctgattggtcacctcatgatttacgtcgaacagtacgtactgggctagctaaactaggttgccccaatgaagtgggggaggcgatacttgggcattcacgtagtggtatcgaaggaacgtatgatttatatggttatgagagtgaatgcaaagtgtggttgcagaagtgggcggatcatatggggagtttggtatga

SEQ ID NO: 301185 - DNA, 1548 bp, Proteus mirabilis
atggctaaaaaaccgaaagaaaccaaatctgaacagttagaagttatcctgtggaaagccgccgataaattgcgtaagaatattgatgcagcagaatacaagcatgttgtgctggggttaatattcttaaagtatatttctgattcgtttgagtctcactatgaaaagcttaaagcgggtcaaggcgagtttgtaggggcagatcccgaagatagtgatgagtatcttgcttacaatgtgttctttgtgcctgaaaaagcacgttggacaaatttactcaataatgcaaaacagcccaatattggtaaattagtcgatgacgctatggaagccatcgaagaagataacccgcaattaaaaggggtattaccgaaggtttatgcacgtcaaaaccttgatgcaaccgtacttggcgaattaattgaccttgtaggtgatattgcactaggtgatgctaaatcacgttctgcggatgtactaggtcatgtttttgaatatttcttaggtgagtttgcgttagcagaaggtaaacaaggcggccagttctatacgccaaagtcaattgtttccttactggttaacatgctagagccttatgaagggcgtatttttgacccgtgctgtggttctggcggtatgtttgttcaatcagaaaaatttgttgaatcccaccaagggaatattgataacatttctatttatggtcaagagtctaaccaaaccacatggcgtttggcgaaaatgaacttggctattcggggtattaactctgagcaagtaaaatggaacaatgaaggctcgtttttaaacgatgcccataaagatttacgtgcggattttattattgctaatccaccgttcaacgtctctgattggtcaggtgaacaattacgtaaagatgcccgctggcaatacggtgtgccaccagcagggaatgcaaactttgcgtggatgcagcactttttataccacttgtcaccgaaagggcaagcgggagtggtactagctaaaggcgcgctaacctcgaaaacgtcgggtgaaggcgatatccgtgctgcattagtgaaagatgctaatgtgattgattgtattgttaacttgcctgctaagttattcctaaatacgcagatccctgccgctctatggtttatgcgccgtgatcgtaataactcttcggtttatcaagatcgcagcggtgaaattctgtttattgatgcacgaaatcttggtcatttaattaatcgccgaactaaagtgttatctgatgaggatattaaactgatttcagatacctaccataattggcgtaataaagacggtgtttatgaagatgttgctggtttctgtgcctctgtcgctatcgagaaagtagctgaactggattatgtgctcacaccgggtcgctatgtgggtcttgctgatgaagaagatgactttgattttaaagagcgctttatccagttgaaagcggagttcgaagctcaattagaagaagaagcaaaactcaatcaagcaattgctgagaatttggcgaaggtgatgatatga

SEQ ID NO: 301186 - DNA, 1119 bp, Proteus mirabilis
atgagtgagtggcaaaatgtgactcttaaacagttagtcaaatttggaaatggtaaaagtagaccaaaagaaaaaggaaaaatacctgtttatggtggtaatggaatattagactttactgataagtataactatgctggtgaaacactgattattggtcgggtaggggcgtattgtggggcaacgtatttagagaaaagtcctgtatgggtttctgataatgcgttatcagccaaagccttagataataataatcctgattatttatattatttatttaagtatttagatttaaaccagtatgctcagggttcaagtcatcctttgttaactcagacattattaaatgcaattgaagtagaaacaacacttgatggtatagaacaaaaagctatcgcctcggtgttatcttcgttggatgacaaaataaatcttcttcatcgtcaaaataaaaccttagagtcaatggctgaaacgctttttcgccagtggtttgtggaagaggcgcagaatgattgggaagaaaaaactcttgctgattttggtaaggtcgtttgtgggaagactccttctaagaaaaagagtgagtattacggtaatgacattccatttttaaaaatacctgatatgcatggtagagtatttatttcctcaacagaggataatttatctctactaggggctgaaagccaattaaacaaactattaccagagggaagtctttgtgtgagttgtattgcaacagttggtttagtttgtattacgagtaagccgatgcaaactaatcagcaaatcaattcaataattccaaaatcatcaaaatatttatactttttgtttcttctaatgaaaagtataaatgatgaactacatagtttagctagtggtggaactactactcttaatctaaatacaggtaattttagcaagattaaaatttgtgtgcctccaaaagaagatattttttcattcaatcagtctgtttatgatttttttgaaaaaataaaatcaaataccaatcaaatccaaacattagaaaaacttcgcgataccttactgcctaaattaatgagtggtgaagtacgcgttaactatacaacggaagaaataaaacaataa

SEQ ID NO: 301187 - DNA, 3243 bp, Proteus mirabilis
atgtcaaaaatgacagaatccgatattgaaactatgaccattgagcagttgcaaggcctaggctatgaatatgtgtatggcccagacattgagtcatcaggtataaatcccctgcgtacttatcagcaagtcattcttcagcaaaaagtattagaagcgatacaacgcttaaacccgcatttaacagaagataaatgtgaggaagccttaaaacaagtcatacagattaactcgccagatttaatggtaaataaccttagctttcaccgtttactgacggaaggtattaacattgaagtcagtaaagatggcaatactcaaggcgaatatgtgtggctggtggattttaatcagcctgataataatgagtttctagtggttaatcaggtcactattcgagaagatcgcaaagaacgtcgccctgatgtgattatctatattaatggtttaccactggtcgtcattgaactaaaaaatgcgattgatgaaaatgccaccattgaaggggcatataatcaaattaaaacctatcagcaacaagttccttcattatttacttacaatgcctttagcgtgatttctgatggattagaggcaaaatcagggactatttctgccgattttagccgctttatggcatggaaaacccataatggcatgacggaggcaaaaaatactcagccacaactggaagtgttaattcaaggcttgcttaaccctgttacgctattggatatgatccgctattttatcgtgtttgaatccagtaaacaggaagacagtaacggtattatttctattaaaactgttaaaaaaatggcagcttatcaccaatactatgcggtgaatgcggcggtactttcgaccattcgcgcttcaaatgtcaatgcgaattcaccctctgcggaagtagcgttacggcaacaaggtaggaaccaacagcacctcgtattagaacaaaaagcaggagatagaaaagcaggtgtggtatggcatactcaaggttcgggtaagtccctctcaatggtgttttatacaggtaagattgttttagccctcgataacccaacggttgtggtgatcaccgaccgtaatgatttagacgatcaattatttggcactttttcttctgcggtacaactgttacgccaaaccccgaaacaagctgaaaatcgagaagaattaaaagaattactgaaagttggttcaggtggcgtgatatttaccactattcaaaaattccaacctgatgatggcagtagcgtttatgaattactgtctgatcgcagtaatatcattgtcattgctgacgaggcgcatcgttctcaatatggtttttcagcaaaagaagtcgatgtgaaagatgagcaaggtaacgttgtcggtaagcgcactgtctatggttttgccaaatatatgcgtgatgctttaccaaatgcgacttacttaggctttacgggcacacccattgaaaaaacagatgtcaatactcccgcggtatttggtaattatgttgatatctatgatatcgctcaggctgtagaagatggggcgacagtgcctatctactatgaaagtcgtttagcaaaagtccaaattagcgatgaagggcgagagttgatcgaggaatttgatgaaagcttcacagatgaagacttaacacagactcagcaacaacgggctaaatgggcgcgagttgaaagtattattggcagtaaagagcgaatcaaagcgatcgctaaagatttagtcactcactttgaagagcggttagtggcgaatgcggatcacggtaaaggcatggtcgttgccatgtcacgtcgtattgccgctgctctgtataaagaaattgtggtattaaagcctgagtggcacagcgatgatcttaatgatggtgtgattaaggtcgtgatgacgtcttccgcatctgatggccctgatatagctaaacaccatacaacgaagaaagacaggcaagtactcgctaatcgcatgaaagatgaagatgacaagctgaaattagtcattgtgcgcgatatgtggttaacgggttttgatgcgccgagtatgcacacgttatatatcgataaaccaatgaaagggcacaacctgatgcaggcgatcgcccgtgttaaccgtgtgtataaagataaatctggtggcttggttgtcgattatttgggaattgcggctgatttaaagtcggctctgtcgttttactcagatgcgggtggtaaaggtgatcctgcacttacccaagaaaaagctgttgaggtcatgaaagaaaaattagacgtccttgacggaatactctttggttttgattatcgtgaatatttcaccgcatccacatctcgtaaactagccattattttagaagcagaagattttattttagggattgatgaaggtcaggggaaagtgcgttttttaacagcggtcaccgctttatctcaagcctttgcgttagcaacgccacaccctgaagcgatggaggcagcacctgaaattgcctttttccaagcggtaaaagccagattgaacaagtttaattcaactgggggaagtggcattattggtgatgacagcatggaagttcgtgttaaacagactattgatcaagctttagtgaccgatacggtggtagatgtatttgatgctgcagggattaaaaagcctgatatatcgatcctttcggatgactttttaatggagatgcaggattaccaacataaaaatatcgcgttggaaaccttgaaaaaattgttagcagatgaaatcaatgtgcgaacaaaaatgagcgttattcaaggtaaaaagctgatggatatgctcactggggcgattaaaagctatcaaaataaaattttgacagcagctgaagtcattgatgagctaataaaattagcaaaagatatcaataagcttgatagtgaagcgaatgacctgaatttatctccttatgaatatgctttctatatggctgtggctgaaaatgatagtgctcaagaactaatcggaaaatcaaaactaagggaattggctgttgtactaactgaaatgatccgtaataacgtcacattagattggactatcaaagagtctgcaagagcaaaaatacgcgttatcgttaagcggctacttaaccgttatggctatccgcctgatatgtctacattggcaacagaaaccgtcttggcacaagcggagcagctatcgaatgaattgttgaaatcaaattag

SEQ ID NO: 301188 - DNA, 1020 bp, Proteus mirabilis
atgagtcaaaaaatgtggatggttcgtggtgatttagggaagttatatgatgattttcgagaaaaagaactggttggtttaggctggtctggcttagctccattattgaaaattgggcaacctagaaaagagatactgaaattataccgtcaagtagacccagcagcgaaactcggtacagcacgttcaggcgcatctcaagtatggcgttttattaatgaaattaaagttagcgattgggtaatcacttattcacctgctaaccgtacctatttattagggcaggttgtttctgagtttcaatatcgtgctgatctttgttctatggggatgggaattgcgcgtcagatcaaatggaatactgatgaaattgatcgggataccttatcaactaaaaccaaaaataccctaggttctacattgaccgtttttaaacttcctgattttgcagtgaaagaattattgcaaaataaaccatcatctttgagtagtaaagtcgcggatatttcatatgcagaagatgaagaaatgatatctgatccattaaaggatatggaaattcaagcgttagaacgtattaaagataaaatcattacgcttgatgcagatgaaatggaattattagttgccggtattctgcgtgggatgggatataaaacccaagtttcgccaaatagtggttcagatagaggcaaagatattattgcatctcctgacggttttgggtttgaaaacccaagaattgtggttgaagttaagcatcgtaaagggcaaataggcagccaagatttaagaggatttatcggtgggcgtcatcacgatgatcgtggcttatatgtcagtactggcggcttcacaaaggatgctcgttatgaagctgaacgttcaaaaattccgttatctctttggactcttgatgatttagttcgcactttgattgaacattatgaacaggttgatattgagactaaattgcttgtaccattgaggaaagtctttttacctgcgttatctgattaa

SEQ ID NO: 301189 - DNA, 411 bp, Proteus mirabilis
atgaaatattcatcactagtcattgccactgtaatcaccttcttatcaacagcacaggcagcaaactcacctttccaaaatcctgcagaatacaaaagcaaacatggaatactagaaataacaccaagccaaaatgatgcgccaaagttcgatttccagattaatgccaatgttggtatgtatgtctgcgaagctgaaggaacagcctatattacagaaagagacttatcgtcaaatacttggaatgctacagcgctagtcagcacagatagtgactatggagaccaatattgtaaaatggaattttctatggataaagcgggaaagatagcaatcaaaacaaattttggttgctcggctcaatgcggtataggggctgtcggggcaatggatggtacatacaaaaaatag

SEQ ID NO: 301190 - DNA, 798 bp, Proteus mirabilis
atgcagttatctcatcacaacatgctagacagcagctatgacccattaacggctaaagctattgattatgtcattctcattaacagagcctcaccgaggcgtttacagcactattttcggataggatttcaccgtgctgaacgcattattgatcaattggagtatttgggtgtgattacccccttaaatcagtatgattatcgtgaagtgctcggatacccaactcactatcggccttttgatgcatcagcctttgctacgcctattgaaacagtgcaagaacccttattcactgaatcaccgctggatacgcaatccctagaataccgttgcttgattcaggctatcgtctggcagcgtattgtggtctgggttgaagaaatcgagattgaaggcggtacagctaatattttgaaatctgtttccccctttgaatacctgattgatacgcacagcgatgacatttatcaggacacactccgcaacaacgccagttcttatcgttttcttgctactttgcgccctgaaaccccgttggacgtactgcggcaacatggacgaattagttatcagccctgttggaaacttcctcgaatagcacaagaagaatggcaaggtttatgggtgccaaatgaagcaggatgggaaagcctatctgaggaaaatattcatcatccaagagggattggtaactggcctgacttaccccataaaagcatgaaaccgttggtgcatgggctgcaagaggatggaggggactatttgcggtacttgatttattggaaaagccagttttaa

SEQ ID NO: 301191 - DNA, 417 bp, Proteus mirabilis
atgattgataaaaaacaactaactgaaatggataatgcacccaagatctggtttaccagtggggagctagctgctataggaaaagaaaaagctggcgatccaacacgttaccctgaatataaagatatggatatccctaccaccgcgaaaggcgttagagtccgtctagagtcaatcacagctcttcatccccactttcgcaagaagaaccctaataagcgtggcgacctctatcatattgatgcatttaaagtgatcctaaacacggatgaaaaagagctcatcaagcaaaatacgctatcttctgaaagtgcagatcttaaccttttacttgaaatctataaatcactgtcagttgagaaaagaaaagcgttattaaaaaatgcactcaccatgaaacaggaagaattagattag

SEQ ID NO: 301192 - DNA, 285 bp, Proteus mirabilis
atgtctaaccctgtagcatctcaaaaaaagccccgaaaaggaagcgctgcggattggcaccgtgcggatattgtggcggctttgcataaaaaaggggtcacactagcgcaattatctcgtgagcatggtctttcttctcggacgttaaataatgcgctagagcgagcgtacccaagagctgaacagatcattgcggatgtgattggcacggctcctgaaacaatatggccgagtcgttacatcaacaagccaccctctaataatcatggacggtcattgaaatag

SEQ ID NO: 301193 - DNA, 342 bp, Proteus mirabilis
atgtctatcaaaaataaattgcaaaaaatccgagaagaaaacgaagcgaaaggattaaatgatccggctttatttaaacagcgtttgctcaacggtggttttggattagcaaaaaccttttggctattttggtttttaccgattttattcttaaatatcgttgaattttttatcactaaaaaggtgacattgaataaagtggaagcattgattcttatttgggatgtttgctgtttttactttatcgttaaaataccggatcgtcgtgcttggtcttacgtggcgttggttgtgattgcactcgatatattagcaggaataaccgtaaattttctgctgtaa

SEQ ID NO: 301194 - DNA, 312 bp, Proteus mirabilis
atgaaacttaaccagtggatgaaattaagcatattaacggcgatggttggtttaacgggatgtaatgagagtaccgttaattgtaatagtgatggtgcaaaagcattagcgttacaagtggtcaatcaacatgtcggttgggcgatgtatgagcagcttgtgaatgtgcgaacgcaacgtcaaaatacacaacgaggcgtttatctctgtgctgccgaagcaacgggaaaagcgggttctgtcacggtaatttattccgtgcagctcacggatgataaaaaaagttttgtagttacgttactcaacggttaa

SEQ ID NO: 301195 - DNA, 435 bp, Proteus mirabilis
atgactattcatcagtcagggctacgcttgcctatcgcacaagtatttagccaattgttattacatgaactggacaattcagtgattaactcagcaattgatttaaccattgttcgggcggtcacaatgaattttcgagacccattgtatagtgctgaaacaggcggtttccatcctgtcgaaatacgtttgttgcggctgcatgagcaatggcagtttgattatgtgaccgatttttcatacatgggaagctattatcctgagcttgaaaaggaactcgatatttgttggtcgcagggttatgtttatcattttttgatgggggatattgatgaagaagagggcggagcactgtttgaactgtggcaacgcaattttattcaataccacaaaatgaaatgttatgacgtcagtattcagtgggaaacccactaa

SEQ ID NO: 301196 - DNA, 522 bp, Proteus mirabilis
atgttgataccgtccaagcaaggggatttagattgcctctgtggaatttacagtctggtgaatatgagtacatggttttatggagatcgcattaaaccccgcccgttatttaactatcttttgcgtgaatacagcgaatactggtcactgtacaagtgtttaacccaaggtattgatattcctgaaatggattacttgattaagcgcctaacctcaaaatacccatcacaagcccctctacacgtcaccacgccatttcgttacaaagatggatttaccacacaaaaaatactgtttgcttgtcaggcgttcttagacgcacatacaacgtcacgtcggcttatccttctgggtgatcagtggcattggtcgctggtggagcgtatggacagtgaatatctctatttctttgatagccaccagcaagaaagagtgagccgtgcccgttatggattaaggggtaacaaggtacggcggttgtatagtgaatcattatattgggttgaaatatcacctttataa

SEQ ID NO: 301197 - DNA, 141 bp, Proteus mirabilis
atgactgaaaaaggatattatatccctccatatttatttaataataagtttaatgcaagagataaaaacgaatgggaacctaaggatgttttatatttattagatactcaagatgttatcagtaaaatacaaaaaatgtaa

SEQ ID NO: 301198 - DNA, 408 bp, Proteus mirabilis
gtggatccttggggttgggctgaatttgatgttgatagttatgaaaatttgagagcagcagtaaagggtggaaatactggtttagatgcccatcacgctggtcaaaaagcaataatggcagatcttgtttcaggatatgaccctaaaacagctccagctattctagtttctaaatcagggcatacagtatcaaaagagggagtaggtattgtttcacgcagtaaaataaattcctcgacaggtttgccgtttaaaaatgcccgagaattattggcaagggatattagggagttacgacgtgtatactcagatattcctaatagcgctcttaaagaactgatcgcaaaaaataaagaaatgtaccctgagatgagaaaaacaaataatacgacgataaagggatgttag

SEQ ID NO: 301199 - DNA, 1236 bp, Proteus mirabilis
atgcgttattatcaaaggctaataaagtcattatttattattaatatcttatttcattcgtcacagggggcggcaacacaacctaatcaagacccgcttaataaagagaaggtcgctcaattaggtcaacaactgtatcaccatttacagcaacagcagtggtatcaagcggaaaaaatattagttaattatcagcaattaccattacacgaaactttattagtctattatgctcaagcactattagcacagaagaatggtaatttcttacaagctgaattttattatcagcagcaacttaagcagcaagcagattttattccggcacaaactggcctaattcagctctacttttctcaaggagaatataaaaaagcacaataccagctaaatcaattaagtcgtttatcgggattatcacctaccattaatcaagcaattatctattatcagaaacagcttaacgattattttaaagctaggcgtttttatcaaatcagttttttttatgatgataatattaatcatgcaccttatcttgatgagcaaattgtttcgcaatcaacacaagtcatcatgaccagaaaaggcgctcaacctatagcatcgatgggggttagtcatcttttttctttctatcagcccacttttatttacgctaataataccttatcaggctatttttcagcacgctatcgtgattattttgcatataaacaagctaattttacacatttatatactcaattaagttatcagtaccaaaaaaaggattatcggtggactttatccccctattatgaaataaaatcatctaaaaaggcgtttgagtatcaatctattggggtatataccgggctatttttctccattaataaatatcattctattaatttatctataaattattatataaagaaatataataaagaattaataaacttaaataatcataagcagctatatgctattagctattactatacattagcagagaatgttcaattttttttacaatatcaatttaaaagttttaataattataatccattattaaataagaaaagaaaagataatggctttgtttttacaacaactattaaaaataaagcacctattatctggggtttttatccagcaatagaattaagttatacccgtagattaagcaatgtggattggttatatcaatatcagcagcatgaagtcttatttaaattagaaaaacaattttaa

SEQ ID NO: 301200 - DNA, 2010 bp, Proteus mirabilis
atgagcaaagtttttaaactgcattcagaatttaaacccggtggtgatcaacctactgctatcgcttcattatgtgaagggttagaagatggacttgctcaccaaaccttattaggggtaaccggatcaggtaaaaccttcactattgccaatgtgatagctaacctaaatcgtcctactatggtattagcgccaaacaaaacgctagctgcacagctttatagtgaaatgaaagagtttttccctgaaaatgcggtggaatactttgtctcttattatgactactatcaacctgaagcctatgtgccaagctccgatacctttattgaaaaagacgcctctgttaacgaacatattgaacaaatgcgtctatcggctacaaaggctctcttagagcgtaaagacgttattgtggtctcttcagtttcagctatttatggtttgggtgatcctgatagctatttaaaaatgatgctacatttaagcaatggcatgattattgaccaacgtgcgattttacgccgacttgctgatttgcaatatacccgcaatgatcaggcttttcagcgcggtactttccgagtccgtggtgaagtgatcgatatctttccggctgaatctgatgactacgctttacgtgttgaattatttgatgaagaggttgagcgtttatcgctatttgatcctctcacaggacaaattcattacaatgtgccacgtttcaccgtctatcctaaaacccactatgttacgccgcgcgagcgtattctggatgcgatggaaaaaatcaaacaggagctagctgaaagacgtaaggtgctattagccaatgacaaattggttgaagagcagcgagttacccagcgtactcaatttgatttagaaatgatgaatgaattggggtattgctcaggtattgaaaactactcccgctatctttctggccgtgggcctggtgagccaccaccaacgctatttgattatttgcctgctgatgggttattagtgattgacgaatcacacgttactattccgcaaattggcggcatgtataaaggcgaccgctcacgtaaagagacgttagtggaatatggcttccggttgccttctgcgttggataaccgaccattgcgttttgaagagtttgaagcattagcaccacaaaccatttatgtctcagcaacaccgggcaaatatgagctagaaaaatcaggtaatgacattgtagaacaggtggttagacctacaggcttacttgatccggtggttgaagttcgccctgttgccacacaggttgatgatttattatcagaaatacgtatacgagcagctaaaaatgaacgtgtattagtgacaacattaacaaaacgtatggcggaagatctgaccgaatatcttgaagagcatggtgaacgggtacgttatttgcactcagatattgataccgtcgagcgggttgaaattatccgagatttacgtctaggtgaatttgatgtgctggtggggataaacttacttcgtgaagggttagatatgcccgaagtctctcttgtggcgattttagatgcagataaagagggattcttacgttcagaacgttcgcttattcagacgattggtcgtgctgctcgtaaccttgaaggtaaagctattttatatggcgataaaataacagattctatggcgaaagccattggtgagacagaacgtcgtcgggaaaaacagcaacaatttaaccttgaacatggcattgtgccaaaaggcttaaataagaaaattggtgatattcttaagattggtcaaccgactcaaggccgtaataagaaaggacataaagcggttgatactcatgaagattatccattactttctacggctgaattagaaaaagaaattcagcgcttagaaactgaaatgtatcaacatgctaaagatcttgaatttgaaaaagcggctcaaacacgggataaattacaaactttgcgtgcgcaatttattgctaattcttaa

SEQ ID NO: 301201 - DNA, 531 bp, Proteus mirabilis; identical to SEQ ID NO: 297320

SEQ ID NO: 301202 - DNA, 1074 bp, Proteus mirabilis
atgaaatttactcctcaacataaaatggatgctgcattaatggcaggcgcatccttaaacacacccaataatcattcaatacaagagcaacatcatcgtttaaaagatgatgctaccgttagtgcttatatgagccagaattatatttctgtttctgtcgcagattcggttgaacatgtaaaagcacagctggttaatgatttaaaagatgaattaattccaacttatctgtatgtcgtagataaagataattatcttaacggtattttgccggttaaatcattactacttgctgataatgggctttttgtttcggatattatgcgccaaacatttttctcagtttcaccggagcaaagccgacatgatgtttatcagttaattagccaaagtggtttagacagtgtacctgtgatgcattttggtaagttagttggtgtattacgacctcaagatattgctgatttaattgaagatgaaaatacgctagatgcacaaatgcagggggcaacgtcgccattagaacaaccttatttagagacaagtccggtcactttgtggcgtaaacgtgttgtctggctattaatgctgtttattgctgaagcttataccagtacggtgttacatgcttttgaagacagacttgaagctgctatctctttagctttctttattccattattaattggtactggtggcaatagcggtacacaaattacctcaacattagtacgtgccatggcattaggtgaggtgagcttgcgtaatgtatggtcagtattaagaaaagagatcacgacctcgataatggtggctttaaccatgggaatagcaggatttattcgtgcttggaccttaggggttggcatggaagtgatgatagtggtgggattaacgctaatttcaattacggtttggagtgctattgtctcttctattattccaatggtattaaagcgtattggtgttgatcctgcggtggtgtctgcaccttttattgcaacatttattgatggtactgggcttattatctactttgaaatagcatctcataccatgagtgtgtttgcttaa

SEQ ID NO: 301203 - DNA, 3276 bp, Proteus mirabilis
atgatgtggcgcatttgttatcaatatcgccaatatctccttgctcttggtttgctggcaggcatattgcctgtcacgcaagccgcagatgatccgactgaaacttttttatatgagcaagttagactaggtaactcgaaaagtaacgatgttttagtttctcaatcactgtatcgtttatcacttataaaaccgaacgatcctagtgtgttgttaatgcgtatccaatttgctgtaaaacaaaaagaaacagcaaaagcacaacaactgattgagcaattacgtatgcatggcgaaaatactgaacaatatcaacgtgcgattaagctactatcattaacccatgaagataaccgccaaatcctacaaaaagcctacctttatcagactgcgggtcgttatgatgaagccttgcaattatatgatgatatttaccaaggcacgccccccgatgaagggttagcccttgagtatctcaaagtattaattgctgcaaaccatgccaacaaaatggcacgtattaagcagatttatcacacttaccccaataaccaacagatagttaatatctatcagcaatatcatcttgcccctgcattatctactccctcagcgacctctgcccccaataacacaatatctattcgtgcattaaaacagcagttacgccagcagcctgataatgcagatataatcggaacattaggcgtgcgctattcgcgcgcaaatcaacgagcacccgcgatttattatctttctcaagcactcacattggctcccaaacacaacgatagtgatttgtggcgtacgctgttgcaatcaaatcaatattggcatttacttgccaaggctgatgaagcgttattaaatcaagagtactctaccgctaagcgctattttacccaagtacgtcaactcagcccctataaaagtgaagcttatattggtttaggggatatcgagttagcgcaacatcaattagagcaagctgaacgttattatcaacaagcgctacaatatcagcctaatgatgcggcgactttgcatagcctgaccaagctctatcgtcaacaatcgcatcaaaaagccgcccaatttatggctaacttaacatcacagcaatacaaaaatttagcccaagactatgggtatatcatttcaggtatacaacaagacttagctgctgatgatgaacagcaacaacactatctcagtgcgattgagaaacgtaaggctatcgctaaagcgtatcctgatgaagtctggaatatttatcgtctggcggatgatttacttatcactcaacaaccccaacttgctgaggattactttaatcaacttaatcaacgacgacctaatgatccctctcgacgatatgcctatgcgttatatctcaataaaacagggcgagcacaacaagcacttaacaccttaaagacgatccctttatcgcagcgcagtgaaagtatgaacgccttagatagccaattacgttttggtcaaattatggcgcatgcacaatcactaagagaacataaccaacaacagcaagctgtcgaatatcttttcacccatattcctcctgagcaaaaaatagaaagctatctgttattagcgcaatgggccgaagaagatgaccaactcaatcaagcattaaattattatcatacagtattaaatttagcgcctaataatgaaacagcactattaggtgcaacagagatatctttagcgcaacatcaaatagatcaagctcgttattacttagctcagatagaacaattatctcctgaaaaatttaaccactattcactaagacgtttagcaaacgctgaaaaaacggcgggaaatattgataaagccaaacactattttatctatttagctcgccaagttgacaaggagccagatagtgctgatggattaattttacgtgatattggtcgtttttatcgtgatagccaacaagttcaatccgctcatcactattatcaacaagcgatgctaaaagagggtatcacgcatacactgccaaaaaacaatattgaatacaccacacttatgcgcaacaacccaaatgataattggctatcacgtagtgtacgtgatgatgcgagtaccctttatcgtcaacaagagtggcgttttaccctagagcatgattattggggatcaaatggcagtgagggatactctaaattacgcgctcataccaccatgttacaatcggagcatcctatttatcatggccgtttcttttggcgtactgattttgtgcacttaaatagtggcacattaggtacagcgccatacgatgctaaatttggtagttgttatcgcacaggttgtttccctctaaagcaaaaagcctttggtgttagtcctgctatcggttgggaaaatgagcaatggcaatgggatttaggtaccacgccactcggttttaatgtgactgattgggtaggtaaaattgcttataacgatagtttttatcatctcggttggagtgtagatcttcaccgtcgcccggtaaatagctcattacttgcctttgcaggccaacgtgatagttggaccaatcaagtttgggggggagtaagaaaaacggggcttcgtttaagtggcagttatgatctgggaggcaaggatgggtattggggagaaatatcgtttgatagattaacaggaaaaaatgttaaaaataacagcagtgtgaaagccatgggcggttattactataagttaatcaatgaaaatgatcgccgcatttctgttggcttaaatagcatgctttggcattacaatagagatcttagtggctacaccttggggcaagggggttattatagcccacaacaatatctctcattctcactgcccgttaattaccgtcaacgtactgaaaattggtcatgggaagtatctggctctctctcttggtcttattcaaaaaccgatgatagcagacgttatccattacaaaatctcgtttcaagcgataaatttaattctgatcccataaaagaaatatttaagcatgagagaaatatcattgataagggggattcgggtcatggttttggttatacagcaagagcattaattgaacatcgaataacaccacattggtttataggtgccgctatcgatatacagcaagcgaaaaactatacgccaagccatgcactaatgtatttacgctattcatttgatggatggaatggtgatttagatcttccgcctaacccgcttattccttacgcagattttaaataa

SEQ ID NO: 301204 - DNA, 1341 bp, Proteus mirabilis
atgcatcaatctgatgtagcggatcgctcacttttttcccttagctggcctatttttattgatatttttcttcatcttgccacgctattgattaacacttacatgataagtcatgtctctactgcctatttagctgcaatgggcgtaggtaaccaagtttttgatctttttatcaccatatttaactttattagcgtgggatgtagcgttgttattgctcaatatttaggcgccggtaagcgcgataaagccagtcaagctattcatatttctatcgcctttaactttttgctgggctttagtagtgccattattattctcttttttggctacaacattctaaatgtaatgaatacgccagagcatttagtacaagatggctataactatctccatattttggggatttgtcttattcctgaagcaatttcaattatcttagcagcctgtttgcgggtttatggtaaatcgaaagcggcgatgtatgtgacgttaattgccaatattgtcactgttatcggcaatatgattgtactatatggtttctttgggcttccacaatacggtttagtgggtgttgcatggtcaacggttgtcggtcgtattattgccgttgtcttattatgtggtcttttattctatggattaagaattaagttcgatataagactattagtgatttggtctaaaaatatgttagctaaaattctacatattggtttacctgctgcaggtgaaaacctagtgtggattctacattatatgaccgcctctgcctttataggattaatgggagaagttcctctcgccgcacaaacactctatttccaactatcattattcttaatgttatttggcattgcgattagcattggtaatgaaatattagtcggtcatttagttggtgcaaaacgatttgatgatgcatttacacggggttttaaaagcttaaaagcaggtgtgctatttactattggtgtggtgattatttattggtttatgcgtgatcctattttgtattctatcaccgaagatcaacgcattatcgaccaactgttgcctttatttattttatcggtctttttggagcctgggcgtacatttaatattgttatggttaatgcgttacgtgcagccggagatgccaaattcccactcattacagccgtttgttttatgtggggagttgctattcctattggctatttccttggtataaaaatggaaatgggtttaattgggatttggataggttttctttgcgatgagtggctacgaggcttaacgaatgcatggcgttggcgctctcgtaaatggcaagctaagcgcttagatatttga

SEQ ID NO: 301205 - DNA, 900 bp, Proteus mirabilis
atgaatactaaaataaaagtcgctattgtgggctatggcaatattgggcgctttgcactagatgcagtacttgcagcacctgattttgagttagtgggggtggttcgccgtgatagtcaaaatattccagatgaactgcgaaatataacagtaacaaatgatattaaaagcttaggtaaggtggatgttgctttattatgttcaccaacgagagccattaaagatttggctaaatcgatattgagcttaggtattaataccgttgatagttttgatgtccacagtgatatcgttgcattaaaaacagaactggatgaggtggcgaaaaagcataaccgtgttgcagtgatttcagcgggttgggatccgggttcagactctattattcgtaccttaatgttagctatggcacctaaaggtattacctacactaattttggtcccggtatgagtatgggtcatagtgttgccgctaaagctattgatggtgtaagagatgcgctatcaatgactattccattaggtactggtgttcatcggcgtatggtttatgttgaattagaaacgggtgctaactttgcacaggttgagcaagccattaaggccgacagctatttttcatctgacgagacacatattaaacaagttgatagtgttgatagcttaaaagatgttggtcacggagtacaaatgacccataaaggggtgtcaggcaaaacacacaatcaattatttgaatatgctatgcatattaataatccagcattaacatctcaatttatggtttctgcagccagagcaagtatgaaacaacaagcgggtgcctatactgtgattgaaattccccccgttgattttttagcaggggatttaactacattaatcgcaaaactggtgtaa

SEQ ID NO: 301206 - DNA, 828 bp, Proteus mirabilis; identical to SEQ ID NO: 296283

SEQ ID NO: 301207 - DNA, 1212 bp, Proteus mirabilis
atgaaacagtatgctggcttcatttatattgcgactacgcttgatactaaaagcgctgaaattttttatgtcagtgaattaataaaaaaagcaggccttcctgtcaaaaccgtagatttgacaaccaaacctacagcattagaaagagaagctgacgtcacagctgcacaagttgctagttaccatccagatggaaaaaacgccgtgttttgcggtgaccgcgggaaagctatcgcagcaatgtccgtcgcttttgaacgttatttaacccactgtgacgatgtcctcgctattttaggattaggcggctcagggggaacggcattgattacaccagcaatgcaatctttgcccattggcgtacctaaattgatggtatcgactatggcttccggtgatatctccggatatatcggcgctagcgatatttcaatgatgtactccgtaacagatgtatccggcttaaaccgtatctctcgtaaggtattgagaaatgcggccaaccaaattgccggcgctgtttatttttaccaagaagaaaatagtgttgataaaccggctgttgcattaacaatgtttggtgtaactacgccttgtattcaacaactgactaaaaaacttgaaaataattatgactgtttagttttccatgcgacagggagtggcggtaaagccatggaaaaactgatagacagccacttacttcatagtgttcttgatctaacaacaaccgaagtatgtgattatttatttgagggtgtccttgcttgtgatgaagatcgttttggtgccatcgcccgcactaaaacaccttgtatcgtctcttgtggcgcgttggatatggtgaactttggtcgccctgctaccgtacctgagaaatataaagatcgtcatttctatcaccataattcgcaagtcaccttaatgcatacaacaccaagggaaaatcgtcaaatggggatctggatcgctgaaaaattgaatcagtgtgaaggcccactgacgtttatttttccacagggcggtttttctgctttagatattgaaggggggccattctgggatcctcaagcaaaccaagcattttttgatgcatttataacaacatttaaagagaccgagactcgtcaattagtcatcagtccttaccacataaattctgctgaatttaatcagcaagtttatgatttacaccaggaacttatttgctaa

SEQ ID NO: 301208 - DNA, 636 bp, Proteus mirabilis; identical to SEQ ID NO: 296596

SEQ ID NO: 301209 - DNA, 633 bp, Proteus mirabilis; identical to SEQ ID NO: 296595

SEQ ID NO: 301210 - DNA, 1026 bp, Proteus mirabilis
atgagtgataatcttcctgaagcaccacagggtgaatttattttgttccgcagtgaagatggtcaaactcgtgtcgaatgccgctttgagtctgatacgttgtggttatctcaatcctcgatttgtgagctttacggtaaagctaagtccacgattagtgagcatattcgcaatatttttactgagggtgagttagtcgaagattcagttgttcggttttaccgaacaactgcggatgatgctaagcagtacaatgtaaaatacttcaatctctcaatgatccttgccattggctaccgtgtccgctctgtccgtggtactcagtttcgtcagtgggcaacgcaaacgctggaacagtatctgattaaagggtttgtgatggacgatgaacggctgaaaaatccgcctatcggtcagtcagtcgtaccggattactttgatgagatgctcgaacgcatccgtgatattcgtgccagtgagcggcgggtatatttacgggtgaaagagatcttcaccatggcagcggattacgaaccatccaataaagaaacaactcgtttcttccaaaccatccaaaacaaactgcattttgcttgtactggcatgactgctgcggagcttatagctagtcgcgcagatgccagtcagccggatatgggcttaaccagctataaatttgatgaggtgcgtaaaaccgatgtcacgattgcgaagaattatctacgcgaaaatgagctgaaagaattaaaccgtatcgtcaatatgtggctggattttgctgaagaccaagcgctgcgccgtaagcaagtttttttacaagattgggatactaagctagatcagtttttaagtttcaatgaccgtgatgtattacaaggcgcaggtggaattagtaagaaagccgctgatgaaaaagccaaagagatatttgatacttatgctcaaaaacgtcgtcggttaaaagaaaccgaaggggaaagggcaaatattgcggcattgaaagatttgctaaaaaaaggtaagtaa

SEQ ID NO: 301211 - DNA, 906 bp, Proteus mirabilis; identical to SEQ ID NO: 296025

SEQ ID NO: 301212 - DNA, 2754 bp, Proteus mirabilis
atgaactggattggttctcggtggtggaaattcgactttcataatcacactcctgcatcggacgattatggaaaaggccctaatcaggcccagtatatgcagatcactcataaagattggcttctcaactacatgcgacaaggcatcgattgtgttgctgtaacggaccataattcaggtgcctggattgatccgctcaagcaggcactcaaggaactggcatctgagggtcatgaagattatcgaccactctacttattcccaggagttgagcttactgttcaggggaatatccatatcctagccattttcggagaagacacgacaacctctgatatcgactcactgcttggtgctgtcaagtatcgcgccaccaaaggaaagagcgacggctgctctgaatgctcggcagttgaggtgatcgatgaaattgctaggtcaggagggcttgcaatacctgctcatgtagatcaggctagcggactttttacggtctgtacgggcaatacactagagcaagtacttgataataaatgtgtttttgccatggaagtaacagaccttgctaacgcaaaaccacagctctacattggcaagaatttgaattggacagaggttcttggaaccgattcccatcatccgtccggtactggaaatcaacgttacccgggtagccatttcacttggataaaaatgtcggagccatcttatgacggattacggctggcgctcattgatggggctctttcactgaagcggtcggacaacttcacaggtgatcccaatatccatggacaactcgctatcgaaagtatcgtggttaatgatgcgaagtacttagggcgagggcaatccttatcctatcaattaaacccctggctcaacactatcattggtggacgaggcacaggaaaatcgacttcgttggaattcctgcggattgctcttaaacggaagggagaaatccccaagagcctcgaaaaggaatttaccaaatacagtcaaacttcgaaagaccgccaagatgaagggctgttaaaagattccacgaaaatcactgtaggctttcgaaaagacggtggccgttttcgaatcacctggtctaataccgacgacatatacagcatcgaggaagagaccgctcccggagtctggtgttcttccgagggagacatagcacaacgatttcctgtcaggatttacagccagaaacagatattcgaattggcaaaacatccccaagcactcttgcagattgtcgatgatgccccggtggtcaatcatcgcgattggcagcttaagtgggatgaattggtttccaaatatctctcgcttcgcgcccaggagcgtgaagttcaggccgggcttcaggaggaatcggtaactaaaggtcggcttgaagacgccaaacgcaaactcgatatttttgaaaaggcgagccacgcggatgtccttaaggcataccaactcaggctgaaccagagtaaggctatggactcctggggagcgacttgggagggttatgccgaacaagtccgagatatttcaggaagcctactgccagcagaattggatttacaatatttcgacattgaaaatgcggatgacaaagaactcatcgataccgtcgagggcatccgtgcgatgtttgagaggcttcagatagatatgagctcgatcgcacagcagattgatgatgtgaagaactcatggaatcaagcacggtcaaacttgggaatatcgaaaagaattacagcggcgagccaggaatacatcgacctcctcggtcaactcagcgcagcagacgcaggtgatccatctgcatatagtgttctggttaagcagcgacaagatttagaagataagctcaagggattcgacaaaaagagagaaactcttgcgcagcatcagaagagcgcgggagaatacttggtcaagctccatgagcatcgagcattgataaccaagcttcgtgaggactttctcaaggataccctcgtcggcaattcatatgtacagatcagtgtcgttccgtttggaaacaaacttacagttgaggaagaattccgtaacctgatcggtcgcagtagtggcggatttgaccgcgacattggggttgttgacggggatgagggcttgctggcttatttaacgcaagaccaatccaaaactatggataataaaattgaaaaattaaaatcaacgctacttgcaatccatgaaaacgatactatagcggtggattcctgcaaagatcgacgttttgtatcccacattcaggggctaactccggaacagatagatcgaattcaatgctggtttccaggcgattctctggatatcagatatagccttaagaacggcgagagtttcaaacccgtagagcaaggatctccggggcaaaaaacagcggctctccttgcatttatcctttcatatggcaatgagcctcttgtacttgatcagcctgaggatgatcttgataaccacttgatctatgatctgatcgtgacgcaattgcgtgagatcaaacaaaaacggcaagttttagtggtcacgcacaacgctaacatcgtcgtgaatggtgacgcggaaaacgtcattgcccttgatattcggtctggccaaaccagaattgtgacgcaagggggtcttcaagaaccttctatacgcgatgagatatgccgagtgatggaaggtggcagagaggcctttacccaaagatataaacgaatcaatgcaataatcacatag

SEQ ID NO: 301213 - DNA, 1107 bp, Proteus mirabilis
atgtctatctctaaagagaagcttgataatttgaagaaatcaattgctattcctcatgaattaggtcattacgaaatgatgcaaaggatagataaacttagcattgtaggtgatcttgaaattgatgataccgatgaattgttcgataggctaaataagatgaaaggtaatcctatttattcaatgaaaagacgaaaaacgaaaagtaaatatattaagaaattgtatcgctatcaaattaaaataaaaaacaaatataatccgaagcaagcatttatgatttattatatgccgactgaaatcgatttcaagaaaacagataaatatcaaggaagaggtgctgttagatttgaattcagtcctcaatatttttcttttgatgatattaataaattagttctttatttaggaaagaagaagcgcctaggtaagtatctatataaaatattgaaaagcgcatgggtgactcgcattgattatgctttagacatatatgatatgcgtctctcagactatcatattggttttaagggggcatgttgtggcgaacgttactcaagtgaaggcgagtttcaagggcaacgtcttggtagcggtaaatctgagtatcatgccgcgtgctatgagaaggtggatgttggtgatgatttagactctcttagtaaaggcgacatacaactgataaccgctaattggcgcgaaatacagaattaccgtcgtttcctgcgcttagaagttcgttataaaccgagaagtaaggcgcttttattacgagatattcacaatcttcacaatttgctggaacgtattgggttctataaaaagccattgcgcaccaaaaaaggggatttagattgggagtcgctactgtcgggcatgacattacctgagttacgcgattatgtgaaggaaacctacccaaatgaggttaaaaaaatctttaaacgtctagataatagattgaaaaacaatcaagttgatcttttcgataaagatgaaatttggtgcgactttcatttattggttgagaagctcggcattcttggagttccagctctttggcagaagagtttgcgtgaaaagtgggctcgcaaacacgggtattaa

SEQ ID NO: 301214 - DNA, 198 bp, Proteus mirabilis
atgcaacaagatacatttttgactctcaaacaagttttagaaatcactcaggtttcgcgcgcgaccttataccgttggattaaggcgggggattttcctgcgcaatattcattgactgcatctgggcgctcggttcgttggaaagctagtcaaataaatcagtggtatgaaaaatgcgtaaaaaaaggggggcaataa

SEQ ID NO: 301215 - DNA, 1302 bp, Proteus mirabilis
atgcacctcattatgagcttggtcggaatggccacattgatattgatagccattcttttctccagcaaccgacgtgcaattaaattacgcacggtcggtggcgcattccttattcaaattggtttaggcgcatttgtactttattcagaaagtggccgtaaagtgttattggctatttctgatgccgttaaaaatgtcatcgattatggtgaaaacggcatgagcttcctttttgctggcttagtttccgacaaaatgtttgagctatttggcagcggtggctttgtttttgctttgcgtgttttacctgttattgtgttcttctcttcattgatagcagtactttattacttaggtatcatgcaatttgtcattaagattttaggtggcggattacaaaaagtattaggcacttctcgtactgaatcaatgtctgcaacagccaatatcttcgttggacaaacagaagcaccactggtggttcgcccctatattgctagaatgacaacctcagaactttttgcggtgatgtgtggtggattagcatcagtggcaggttcggtactggcaggttatgcaagtatgggtgtgccattggagtatttgatcaccgcttcatttatggcggcaccaggtggtttactcttcgcaaaactcttggttcctgaaacagaaacacctgatgatcaaaaagatgcttttgataacttaagtgatgaagaaaaacccgctaatattattgatgctgcggcatcaggggcttcttcaggattacaacttgcgttaaacgtaggtgcaatgctactcgcttttgtcgcattaattgccttaattaatggtattcttggcggaattggtggctggttcggttatgaagacttctcgctagaattaatcttaggctgggtatttgcaccaatcgccttcttaattggtgtgccttggagtgaggcaaccattgctggctcttttattggtcaaaaactggtgatcaacgaattctatgcttactcggagtttagtaaatatctgcaagatgaatcacaattagcagcagcaggcttaatggccttgtctgaacaaacaaaagtgattatctcttttgcgctgtgtggatttgctaacctttcctctgttgcggtattactgggtggtttagggggaatggcaccaaaccgtcgtaaagatgtcgcacgcttaggtatgaaagctgttttggcgggtacactctctaacttaatgagtgcaaccatcgccggcttcttttttgcattaaccgcaatggctgtggttgctgcttaa

SEQ ID NO: 301216 - DNA, 1404 bp, Proteus mirabilis
atggcgggggcaatgtcggcacccgctatcagtgattttgctatccaagcaccaccgcctcctgagcatattgatgttacctctggcttatttaatctgaccgttgcaccgaaacaaggcgatagtgctgtcttgggttatacctttgaattttggtttagtgaggaaaaactcgctaatctttctgaaaatgaagtgatcaccaaaacaaataaagttggccaagggaatttctggacgcaagagaatttaaaagcaggacatacgtattatttttatgttcgaacaatcaacagctatggcaaatcgccgtttgtggaggcttctggtgtttgctcagctcaaaccgatttaattcttgaagaattagcggggcaaatcagccgagaccaactcgcacaagacttattgggtgagataaatagcaaagctgaccaatcagccgttgttgagttaaatacgcaagtgaaagcgaaccatgatgcgattttagcggagcaagttgcacgaggagcagtaattaaccaagagcaacaagctcgcgctgaagctgataaagcggaggctcaacaacgccaattcttagctacacaacttcgtggtgattatacaggcaatgatttatcgaaagtcaccgcaggacttatctccgctgagaagcaagcgcgagttacaggtgaccaagcggaaaccaaagccagacaatcactggaaacacggatgaatgggaatgtttccgcaattaataaatcactagaaacactcacctcgaaacagcaagcgcaaacgcaagagatttcaacgctcaattcaaatttgaaagggaaagctgatagcagtgcggtaaatgcgttaaatacgcgggtgtcgaatatcgatggaaaaatgacggctaccgctcagcaagtcactcgcctagaaagccaagtgggtacaagttcagccaaaatagagcaaacctcgaaagtggtcacagacataaatggcaaaatctccgcatcatggacaatgaaagtccagcaggatagcaaagggaataaagtcattaccggcattggcttaggatttaatgcgcaaggaaatagccaatttctggttaatgcccaaaactttgcggtgatatcgtcattaaacggcaaagtggtgacaccgtttgtcgtgaagaatggacaggtggttattcatgaagccttaatggataaagcgtggatacagaaactagtagtactcaattattttaaatcatcgggatttgataaagggaatggctttttattggatgcaaaaaacaatattttccgctttacgggtggtaatggggcattaaatatcaccaataatcaattggtcgtcaaagatgagaaaaaacgccttgtgatgaaaatcggttatctagggagttga

SEQ ID NO: 301217 - DNA, 480 bp, Proteus mirabilis
atgaaaattccacattctacattataccttttaaaatctgaatattatgaaagcaaagaagattataaaaattcattgctatatttagagaagtatttatcaaaaggaggcaattaccctaactatttggtaaggaaaagttatatatatctttgtagtggtgattatggtaaagctatttctattattgatagcaatatggataaaattgtatcaagagaggtaaaggataacttaataatcaatagggaattagctaaaaaggaattagatttagagatagataaagtagctttgaggaatgtaatatctaatggtcattctaaagatgaaagagctatgggagcttattttattttagatgacactttaaatgcagaaaaaatattgaatatagaaatagaatcagattatatgaattactatatttataaaagatggcctgtagttcctaataatgtactggacaaatataaatag

SEQ ID NO: 301218 - DNA, 807 bp, Proteus mirabilis
ttgtataaagaattagaaataaacaatgttaaattaaccgcattaaataaccccaaatcattaaatattgataggttagaagggcagatcctaaacggagatttttcactgcctacggtgatttctaccagcattgtgccagcgcatattagtatgaatgtcacaatgaataatatccctttgcaacctttactccgtgtctttgatcagccagaaaatttcagcggtttaatttctgctaaagggcacctagaaggtgccggatataatcgcaacgcgtttcttaatagttggcagggtacactggatacgtcattaagcgaatttaaaatgctaggattaaatattccacaagtgatccagcaatctattgcacaaacaaccgatcaagtggtttatcctgaagatattgagaactataccaaagccgatagtgtgattgcccagtttaaactagcgcctaaaggccgagtgacgttaaatcagttagatgctcaagcaagtgcttatcagatcagcgggcaaggtcaattagatctacaacgtcataatctagatgtgatgctgatggttaatatcaaaaaaggttggggcaaagagaatgaatttattcgccaactggccaaaatagatattccattaagattgtatggtaattggaatgctatccaatatgagtttaacgttgaaaaattactacgtgatcaattacagcaaaaagcaaaacaggccatagataattggttaaataagcaagatgatagccccgaagttaaagcgcttaatcaattattgaaaaaaatataa

SEQ ID NO: 301219 - DNA, 495 bp, Proteus mirabilis
atgaaaacgataaacgagctcagaaaagaagcatcaaaatttcgagaactacttaacaactgtgataaatcaaatacagaacttgtaatagattgttttcctattatgagctgtaagctttcttcaatgcttttagcataccattttttaaaaaaatggccaaatctagaactaaaaggtatctccgcagtaacaggcaagaatgaggaaataagccattattggctagagatcgaagatattgtaatcgatataactggagatcagtataatatgatcgatgataatgagctgaacaaaaagatcataaaaaatagaccttttccttcagtgcatgttgagctgatttctgacagctatttatataacctatttaaaataaaagaaaaagaaatactaacatcaggatttcctgatattagtactgatttcatagaaaaaatggaaattggttataagcaacttttgagtcaaaaagcaaaagtccatacttga

SEQ ID NO: 301220 - DNA, 957 bp, Proteus mirabilis
atgacaacgtattggcatatgcaaattcatcctgatgatacttcgttcgctgatgaacatctttattccatacttgaaaataaaaaaataatcggtttaggtgactggcctgaaggtgaatcatccatttctaccttccgtaatgaagtggaagtgaatgacattgtagcaattaaaaatggtgcaaggctgatcgcgttagtccagattattggtggtacgtataccgttctagatgataagctagaagaggaatcacttaaccagtcccatcaaattattatcgtcgcagtagaactcgacccgtctactgaacgtatcgtgtactatctaagcaaaaatggtatttcgatcaacgttctgttttttaaagtattccaacacggcgatgaacaatttctaagtcgtgtttggcttattgacccaagcgaaacacaaaccaatgcggcactcgcaaccactgggtcaaatgcgaataccaaggaaccttggaacggtgagttttatgtctcttttggaggccgaatttgggaagaggcgcgccgttacggattcattagcgcaggtggtggaagctggtatagtcagacattaaaacaacttcaaccaggtgatcgtgtgtgggtaaaaattccagcgacaggttatgttggtgtcggcattgtacaaagcaccgttgaacctgctagcagctttaccatcaacactgatgatggtgaaaaactggcaatggatatactcaaatacagtgaactttatcaacaaaatgcaaatgcccctgataaatctgagtattttgttcctgtaaagtggctagaaacccgtgatgaacaagaggcagttaatgaagtcggattctttggtaatcaaaatacggtctgcaaacccacaacaccgaaatggcgtcacacagtcgaaaaactaaagcgctatcttacaaactgggacgcgaaatag

SEQ ID NO: 301221 - DNA, 690 bp, Proteus mirabilis
atggctgttaatgatgcacttaataaattaagtgactatcttgttggtgaaagtggtttgaatgcagcaacaactcaaatcgtatctttaactgccgatagctattccgacagcggtcaaagcatattatatgcattaaaaggtagacttgaaaggcgtcattggagggaacaccttgctattaatagatttggtgcatcctacaaagaatttaataggactgggaaaaggcatacaaacattgtttttgttgacgagtatataggtagtggtaaaacagttattagccgtgtagatgaaataaatcgaatttataagggtaatggcattaataatataacaattaaagttatgaccgtagcagcatcaacggttgggttagataagataaaagaaaaaaatattgaagtaaaatgtatttatgagataaaaaaaggaattacagatttttttattgatataaatgaaagaattgaaaaaatttccacaatgaataatttagaaaatttgttattaactaattacaatggaaaagcattaccaaaactgggatatggagaagtagaatcattgtattcaagagattacgggaatacaccaaataatgtattcccaatcttttggtggccattttacagagactcatcctcaagaaaaactattttaacaagagccatgggagatgcctaa

SEQ ID NO: 301222 - DNA, 348 bp, Proteus mirabilis
atgcattcattcagcaatgatatagaaaaagacattatgcatatattatataaatctgcttatggccttgatgcgtacactatttttagaagattaaaaataccattttcaaatttttccaaagcattattatctcttaatgaaaaaaaattaattaaagaatcaagagaggatttttatacaatttccacagaaggaaaacttctaataattaaaataaattcgaaaaatgtagacaccgcatggaatgaaatacctaaaaaatacaaatctaaaaatattcctagtaactcaaagtatattccaagcattcatttattggataaatctacttttaaaatcaaataa

SEQ ID NO: 301223 - DNA, 1011 bp, Proteus mirabilis
atgaataaaacatggagacattattttatagatagagggataaatgatgatttgttagatcaatatgtcatttacgctgataatcttgaaaaaaatggcttacctgtaatattcgaagttgaacacttatccaacttagtgggaatcaaatatccagaaattaataatttaatatttggcacaaaaagtttttaccgggaattcaaaattcccaaaagaagagggggatatcgaacaattcaatctccttacccatctttattatcttgtcaaaaatggatttatgataatattctacaaaagatagaaacccacccatgtgcatatgcatataagaaaaattgttctattattaaaaatgcatcagttcatttaaatgaaaatgtcgttttaaaattagacctatcagatttttttatgtccatccccaaaagctgggttattaattttttttcaaacataggctattctggtaatgtttctattgctctagcttctttatgctgcctaaatgattcattaccgcaaggtgcagtcacaagccccgccttaagtaatattttggtttcatcattagatgaacgtctatacaggctagcttctgtatttcaactaaattatactcgatatgctgatgatatggttttttcaggaaagaaaatatcaaaatctataattaaatatatagcagaaatcattgaaagttttggatttacactcaacacaaaaaaaacaaaattactaataaaaaagaaacagaaaatagttacaggcattgacataacaggatcaaaacttacccttcctagaaatacaagaagagaaataagaaaaaccatgttttttataaaaaaatatggattaatctcacacatgaataatgagaagattaaaaatgttaattatttatcgtctttagaaggaaaaataagattttggcttcaagtagacccagaaaatattcaagcaaaagagtttctacatgatctaatcagaataaaattcagttaa

SEQ ID NO: 301224 - DNA, 195 bp, Proteus mirabilis
atgtctgaatacttgatttcggactttatacatagaaacaatattgttcgtagtagtgatgcatttactattactccagttccatctgaatatggtcaatatagattagaagtcactgttctgggcgaatggcctgaattagaaataaatgggttaagttattttattactataaaaacctatgttaataactaa

SEQ ID NO: 301225 - DNA, 258 bp, Proteus mirabilis; identical to SEQ ID NO: 300509

SEQ ID NO: 301226 - DNA, 417 bp, Proteus mirabilis
atgagtaaatctaatcttattgcctttcgtctccctgctgaactacaaaccctgtttaatgatgctgtatcgaactctggtagcgataaaacagcgtggatagtctccactatcaaagagaagttaaaccgtccagacagtaatcctgacgctcgcatactgtcgctggtggaacgcctagaatcgtctgtcgcatctttaattgctggtaaggcagatatcccaccgtatacctataatgagtctgctgttgtttctgtggttaactctgtgctgtctgagagtgtaaccaatgggcgcattattgctgaacgaattaatgaggctggttatcagacaaaagcgggtaaagcgtgggataaagatatttattcagcgtggaagcgctacaaaaatattgcaggaaaactaagataa

SEQ ID NO: 301227 - DNA, 468 bp, Proteus mirabilis
gtgtttacagtcaaaattattgccatttataacaagagatgcattatcatcagtgtagctttaaatgacactgcttgtcaggttcttaaggagcaaataggaaaccatcacaaatgggtatttgttcatactgaatcaaagaagagaccagacggaacattaacgccaagcgttagaaaaatgcgagttgattctaacacagcatggagagcagcgttaaaaagagcaggaatagaaaacttccgctttcatgatctgcgccacacatgggcgagctggttaattcagtctggagttccgctttcagtattacaagaaatgggcggatgggaatcagttgatatggttagaaggtatgctcacctagcgcctaatcatttaactgaacatgcaaagcaaatagacagtatttttggcacttgtgtcccaaatacgtcccacttaagaaaagtagagaatttaaaatga

SEQ ID NO: 301228 - DNA, 369 bp, Proteus mirabilis
ttgttactttctattggcactatcagtggatattcagtttacgctattggtgcgttagagccgggaaattatagtctagccagagatcattctttgcaatttaatgtagctattagttctggattttcaattgatgctaggccttattttttagattctagtgcaaagataacagtccatacattaaaagcctgcgatgtgacgccacaaacagcaacatcgattaattaccgtagtcaaatagcacaaaattttgctacaccgactaaactcgatgagaatattgccagtataaatgttgattgtccctatgctgggaatgtacatatcacattaagaccgtttaataccttagtcaaaggcaagtaa

SEQ ID NO: 301229 - DNA, 786 bp, Proteus mirabilis
atgagtagacaaaaagcagcaacacgtttacgtagagaaaataaacgtacattacgtaaagagcaacgtaatgccgcccatcgagataatgttatggttttaccaggatttggggatctagaaacaattggtatggcgagagagaaacgtgatcaacgaacactctctcctcgcaatgaagttcaacgccaatatatgaacgctattaaacatcaaaatttggtttttgcaacaggggaagcggggtgtggtaaaacgtttttaagtgcagcaatggctgctgatgcccttattaataaagagatagagcgaattattgttactcggcctgtattacaagctgatgaagatttaggttttcttcctggcgatatagcagaaaaattcgcgccttattttcgtcctgtctatgatgtattagttaaacgtttaggcgcctcttttttacaatattgtttacggcctgaaatcggcaaagttgaaatagccccatttgcctatatgcgaggacgtacttttgaaaatgcatttgtcatattggatgaagcgcaaaatgtcaccattaatcaaatgaaattatttttaacgcgaatgggagaaaatgtgacagtgattgttaacggtgatattactcaatgcgatttacctgccaatgtaaattcaggattagcagatgcactaagtcgttttcaagctaatgagcgtgttggtgtcattaaatttaatgaagaagattgtgtgcgttctagtctatgtcagcatgtattagcagcatatagtgattaa

SEQ ID NO: 301230 - DNA, 1452 bp, Proteus mirabilis
atgaagtttattattaaattattccccgaaatcacgatcaaaagccaatctgttcgtatacgttttatcaaaattctgaccagtaatattcgcaatgtattaagtacattaggtgatgatatcacggttgttcgccactgggacaacattgtggttgtcagtaaagacgaaagtaaaagcgaagcggtgtgtgatgcgctaactcgtatcccaggtattcatcactttttacaagttgaagagcatagctataccgatttacataatatttttgaacagacctttgctgcctttggtcatttagttgaaaacaaaacgttttgcgtaagagctaaacgccgtggtaaacacagttttacttctaatgaagtagagcgttatgtgggtggtggttttaaccaacacgttgaaagtgcaaaagtaaaattaactcgtccggatgtgaccattaatctagaaattgaagatgataagctgatcctagttaatgctcgctatgaaggtattggtggtttccctattggtacacaagaagatgtattatcacttatctctggtggttatgattctggtgtatcaagttatatgttgatgcgccgcggtagtcgtgttcattactgcttttttaatcttggtggttcagcccacgaaattggcgttaaacaagttgcacattatctttggaaccgctttggacgctctcataaagtacattttgttgccgttgattttgaacccgttgtggcagaaattttagagaaaattgatgatggccagatgggggttgttctgaaacgtatgatggtgcgtgcggcatctcgtgttgctgaacgttatggcgtacaagctattgtaacaggtgaagcattagggcaggtttctagccaaacattaaccaatctacgtttaattgataatgcgacggataccttaattctgcgtcctcttatcacacacgataaagaaaatatcattaatatcgctcgccaaattggtacggaagattttgctcgtactatgccagagttttgtggtgttatctccaagaatcctacagtaaaagcggttaaagccaaaatcgaagctgaagaagaaaaatttgatttttctattctcgatagtgttgttgaaaatgctaagaatatggatattcgccgtattgctgaagagacggtacagcaagtaacagaagttgaaatggtctctgagtttgcaacgaatgacgttgtactggatatccgctctccagaagaacaagaaaactcaccattaaaattagagggtgtagatgttaaagaattaccattttataaattaagtacacaatttggtgatttagataacagcaaaacttatttgctctattgtgagcgaggtatgatgagtcgtttacaagcactatatttacgtgaacaaggctttaataacgtaaaggtgtatcgtaagaagtaa

SEQ ID NO: 301231 - DNA, 927 bp, Proteus mirabilis
atggatacgttgagccaactcttatacctttctcaagggcaattgcaattagatgtgttttgtcaaatgaaaggacatttttccttaccgcatgtttcatctgttgaacatgaaactatttttcacttagttctatcagggcagtgttatgttcagattgaaaaatcagcccctatagttttatccgaaggcacttttttaatgttaaacagaaggcaatcacataccctttggagtggagaacgagatatagaacctcccccttttttgcataaaaataatggcttcttacctgttaagtacacaaaatctgaagatcagactcaacatgttgatttgctttgcgggcgaatggcttatgctaaaggaagcgggttactattattaaatgggtttcctgatatggtagtggcaaatttggtggaaatgccagggctaacagtattgaatttatttagccagttgcttcgagaggaagccattaatgcaaatcaaggggcggctgcgatactaaatgggcttgctcagactttattcgcttttgcattacgtgtttatgggcaaaaaccagatataaactcaagttggttagcattattagctgaacctcggttaagtcgtgtatttaattctatgttaaatgaaccacaaaaagggtggacacttgattctttagctaatgtcgcttcaatgtcacgagcgacttttgtgcgtcaatttaaagcaacggcgaatacgacacctggcgaagttctacaatccattcgtatgctaaaagcactttcattattacaacaaaataaatatacattatcagatatcgcagaaagagtcggataccaatctgaagctgcatttagtaaagcatttaaaagtgtatttaattgcagaccagggcagtggaagaagcaacagagtaaagtgtaa

SEQ ID NO: 301232 - DNA, 423 bp, Proteus mirabilis
atgtcaaaagagataagcgaattacagtttagtcttcactatgcctcagaaacagacagtgaaaagaatacctccgccattttaacggcgaatatccatacgactgatggtgaaactcaacaactgacacaattaatttgcacgacatcttccgcaggtaaaaagcaatatcgaatcggcttgcaaaaaattagtgatgctggtgctccattgctggtggcgattgaatcttattggcgtaaaaacacacaagagagttgtatttattttttagagaaagcaaaacagtttattcaaggacacttacaacaaacgaatacatggatatccatgtacggccttgtgattgtttctaatgcgtcactggaagaacagttgcctgaagatttattaaaagcacttaaagtatcaatacccgcctaa

SEQ ID NO: 301233 - DNA, 270 bp, Proteus mirabilis
atgcgtatggaaaaattaaccaatgtaacttatggaacagcaggcctaacggccttttttgccagtctctctttatatgaatgggtatttgttatcgggatggcgttcagcatgcttctgggtttagccacttattttatgactcgtcgagaacaacgaaaacgcactcaattatttgaagagcttgttcgtcatgttgacccacaaaacccgaccgaaaccttaaaaaagcttgctgaattaatggtgaaagcgccaaaggatatttaa

SEQ ID NO: 301234 - DNA, 471 bp, Proteus mirabilis
atgtctctcaaacagaaaatagcggcgctaacaacagcaggagcaacagccatcgcgttagtagtaatagcccattttgaaggtgtacgttatgaaccttatcgtgatgtggcaggtgttctaactgtttgttatggacatacaggcaaagacattattcaaggcaagagatacacacaacaagaatgtgatgcgttattacaaatcgattttattaagacacaacagcaagtcgatgcattaatcaaagtatcactcgatgactacaccaaagctgctttatattcctttgcttttaatgtgggtacaaccgcatttgctcgctcaacattactcaagaagctaaacgctggtgatagagcgggtgcctgtgaagaaatgaaacgttggatatatgcaggcggaaaggtctggcgagggcttgtcagtcgtcgagaagcggagtcagcactatgtcatggaaacctttaa

SEQ ID NO: 301235 - DNA, 462 bp, Proteus mirabilis
atgaaatacgggaaactctatgccgttattacgatggtaggcatcattgtgggaggctattgggtggttaattggcaagctaataggattaattcactgacagatatcaacaaaaaactggccgtagctcttgaagaacagaagtctattaatactgattatcaagcacgcataatgcggttaaaccaactggatattcaatatacgcaggagttagcgaatgccaagaatgaaattagtcgcttgcgtgatattagcgagcgtcatcctgagcgggtgtatatcaaagccgagtgcccaaaaagcaaaaccacttccgccaccagcttggcttatgcaaccaccgcccgacctactgacaccgctatccgaaattattggttactcagagaacgaattgcagagtcagagcaaatgattaaagggttgcaggattatatcaaacaagaatgcatggaataa

SEQ ID NO: 301236 - DNA, 945 bp, Proteus mirabilis
atgacggattacacatcagcaacaacgaccaataaagagtcagcagatatgcatttacgtaatgttgatcttaatttattaacggtgtttgatgctgttatgcaaatgcaaaatgtcacacgagcagcacaggtgttaggtatgtctcaaccggcagtcagtaatgcagtttctcgtcttaagatcatgtttaatgacgagttatttgttcggtatggccgaggtattcaaccaacattaagagccaaacagttatttggccctgttcgacaagcattacaattagtccataatgaattgccaggggcgggatttgaaccggaacaaagtgatcgtgtgtttagcttatctatttgcagtccattagatatcaagttagcgccaaaaattgtagagagaataaaaaataaaacccctaatattaatgtaaatattaagtcttatttgaatagtaatattgaacaccaattaaaatatcaggaagttgagttctttattaattataaacaatttgataaaccagagtttcattcacaccctttattcaatgatgaagtggttttggctgtctctaaccaacacccacgaattaaagagagcgttactgaagagatgttattaaatgagcatcattctattgtttctttagaagatgtggggtcttttagtgcggcttattataagaatacagagttagaagatttaattacttatgaaggtactgatttaaatagtgtattaaatctagtctcaaaaacttattcggtcgctattgcgcctagatggttagttgaaagctattcagaacaattgaacattaaggcgatatcattaccttgggagaaggtagaacgtccatgctatttaatttggcatgagtcaacggcgcgagataaaggccatttatggatgaaaaatttacttagtgaggtttgtcaaaactaa

SEQ ID NO: 301237 - DNA, 963 bp, Proteus mirabilis
atgtctattattcatcttgaatttgaaaagcctattgttgaattagacgagaaaatagatgcattacttgcatttaaacagtctcaagatgaaacaacggcagttgatatagacgaagaaatcgccaaacttcgccaaaaaagcctttcattaacacgctctatattttctgatttaggggattgggagatagtacagttagcacgtcatcctatgcgcccttatacattagattatatcaaagctatttttactgatttccaagagttggccggcgatcgtgcttatgctgatgataaagcgattgttgcagggttagcgcgtttagatagaaaaccagtgatgattatcggtcaacaaaaagggcgagacactaaagagaaagtaaaaagaaactttggtatgccatcaccagaaggttatcggaaagcattacgcctgatgaaaatggctgaacgcttccatttaccagtgattatttttattgactccgcgggtgcttatccgggggttggtgctgaagagcgggggcaatcagaagccatagcacgaaatattcttgaaatgtcccgattaaaaacaccgataatttgtacaataacaggggaaggtttttctggtggtgcattagcaataggagtgggggatcgagtaaatatgttgcaatatagtacttatgctaccatatcgcccgaaggctgtgcctctatcttatggaaaaatgctgataaagcgcctattgccgcccaaaccatgggaatgacggcacctaaattacaggcattgggtattatagactcaattattcctgaaccattgggaggcgcacatcgccactaccagcaagcggctgaatttgtaaaaaaacagcttctcgcagatttaacagaattgaatagttattctaaagaaaaactgcttgagaaacgttatcaaaaattaatgtcctatggttattgttaa

SEQ ID NO: 301238 - DNA, 756 bp, Proteus mirabilis
atgtatttttttcttggttttttgttgtttctaattgttttgatggttatttgcaggattagagttttatggttggcaagaaaaaacacaataactgaaaaggattttaaaaccttcaaagagtataacaatattgaagattatgaaaaagaagcaaagcaagctgtttatgcaacaacaataagcaaaactatttttgaaaaatgccaatgtctcataacattaagaacaatgcttgaatccctacacactgattatgaaaaatatgaaaaagtaaatccgttattaatggagctattacgcaaaaaatttacttttacatactccgctttcattactatctatccagaacccatcgaagaaagcgggctagaacgatttagtttaattaatacaaaaaaatactgtccagaacatgtatggaaacatattctcaaatccgctatttataccaatgaagaattggatgactattttgggtcgcaggaattacccccactggagcggatgtgtacagatatggatttatataacgagtttaaaggcacggttttatttgatgaagtgatcgggtgctatgttgatgaagaaaacgaaggatctcaaatttttgataatgaggtttattctgttaccgaagaacagttacgccagtggctagatgaagagcttgcatttctgagttatgtcactgaaggtcttttgaatatttgtattgaatacataagaaaagagaatggaattataagggtttga

SEQ ID NO: 301239 - DNA, 918 bp, Proteus mirabilis
atggtcatacgtcctaatcaacactggttttttcggttatttgattggcacggttcagtgctatcaaaaataatctttcgcttatgtcttaatattgcaatgtctattatcgctattttggtttatcaatggtatgagttattaggtattcatttaactgttgccccatttagtttattaggtattgctatcgcaatatttcttggttttagaaataatgcaagttatagccgacttgtggaggcaaggacattatggggaaatatgttaattacccatcgcaacatattaagaaatataaaagccttattaccggaagataaacaatttaatcgtgacttttccaatctacttattgcttttagttggagtctaaaacatgagctaagaaaaacaaacccaatggtcgatctctatcgcctcttaccccgacctttatttgatgagataatgaatagcccttaccccactaatcggattttattacatattggcctaaaaattggcgagttgcgagataacaaagtaataagtgatgttatctttcaatcaattaataaagatattaataacttatctgatgtattgggtggctgtgaacgtatttcaaatactcctgtaccttttgcctatacgctcatattgcaacgtacggtatatctattctgtgctctgctaccttttgcattggttgccgatctccactatatgacgccatttgtttccgtatttatctcttatacttttttatcttgggactcattagctgaagagttagaagatccattcggtgtttctgccaatgacttaccattaaatgcaatatgtaacaccatagaaaggaatttattagagatgcaagatatcactccactccccatcagagttaaacctgaccaatattataatttattgtaa

SEQ ID NO: 301240 - DNA, 777 bp, Proteus mirabilis
gtgtatcgttgggcactaataccacttttattattattatttttgatattgggatcacttattgcattaatttgccaactctcttatcacgaactcaccatggttattactgatgctgaatttcattttgccgtattgatgtcactgagcaccgcgttaacatcattgtgtttagccgtgctcttagctgtacctgcagcttggatgatggcaagatcgtcatttaaaggacagcgttttattgatgcgttactcgatttacccttagtcacgcctcctttggtaataggtattggattattattattgttaggtcatcaagggcctttaacaggggttttccctcaattatctcgcgcccttttttctcccttggggattattattgctcaaacatatgtggcaagtgcaatcattatgcgtaatagccttgcggcgtttaaagccattgaacctgcttatattcaaaccgcacagaatttaggattaacaccaacaaaaacgcttattttggttgagatcccactttgttggtctgtattaatcagtggttgtattgtggctttttctcgagcattaggggagtttggggcaacattaatgttggcaggggccactcgattaaaaacagaaaccttaccaatggcaatctatttaaatatagcgagtggtgatttctcgcttgcgataggttgcgctttagtactgatagcaattgcaattactctattgtttgctttacaccgtttacagcgtgataggaaattagcatgttaa

SEQ ID NO: 301241 - DNA, 519 bp, Proteus mirabilis; identical to SEQ ID NO: 298175

SEQ ID NO: 301242 - DNA, 1716 bp, Proteus mirabilis
atgaacataaaaaataaaatttactgtatcattggaattatcattttttatagcttctttttgccaactcaagcggcagaaggaaaggttatttatacacatcaggttaaaaaacctgatgtttttgttgcggtaaatacacatattgaacagtttttcctagtgctatcagataaattaaataaaccttttattctaagcagcgcagtaaaaaaagagcggatcagtggaaaatttgatatttcttcacctgaagacgcctttgaattaatggtaaagcgtttgtcattactttattttaatgacggagaatctatttatatttatcgcgataatgagatacagcaacagctatttcaagtgaaaaatatcagcttgagtaaactgaaagagtatctacaagatgttggattatatgatctccgctacccattacgtgcaggtcacgatcagcgtactttttatctctcaggtcctcctatttatattagcttagttaaggctgctgctgagcttttggataatgatgtacaagaacaaattaatgaaaatatcaataatcaagttccaaccggaagctctcgttatggcgatgagtttgtgcagatatttccattaaaaaacacttttgtacaagatagaacctatatattacgtgatgaaaaagtggttttaccaggtataacaacggttttgcaacagctatttatgccatcgggagagaaagaaaaaacagtcagaagagcgcgtgagattatcgaagataatgataaatatcaggatgataaaattaccaacgatatacaagatactcattcaccgattatcactcaaatgggcaaatataatgttgaactcgttcctttacctggatcaaatagcctgttggttaaaacgagtcgagaaggtttagctttagttagctcacttatttcacaattagataaaccgaaaagacaagttgaattgtcattatggataattgatatttctaaaagtaaagccgatagtttgggggtgaattggcaggggagttatggctcgggtaaaaatacatttttctttaataccgctagtttaagtgctgtatctggttttagttttttaagtaaaatcaaagcactcagtgaggaaggggaagctaaaatggtttctcgtcctattttgttaactcaagaaaatacccccgccatatttgataataacaccaccttttatacacaaattaaaggtgagcgagttgcttcattagaatctacaacattcggcactatgatcagtgtattgcctcgtattagtaatactaaccaagagattgagatgattatcaatcttgaagatggcgccgagaaaaaaagtgatgatgaagatagagaagaagggattgaaaaattacctgttattaatcgcacaaatatcagcactgtggcgcgagtttctgaaggcggtagtttattaattggtggatatacacgagaagataacataaaagcagaaaacaaaattccttttttaagtgctatacctttagttggccgagcatttagctatcagtcagataataataaaaaaatggtgcgtatttttatgttacaaccgcgtttattagataaaactgatacgcacggattggactctttaactgaacacccatttttaccgatggataaaaaaacatctcaagcgctaaaacaaattcaggcatttatgaggtga

SEQ ID NO: 301243 - DNA, 483 bp, Proteus mirabilis; identical to SEQ ID NO: 296594

SEQ ID NO: 301244 - DNA, 849 bp, Proteus mirabilis; identical to SEQ ID NO: 296462

SEQ ID NO: 301245 - DNA, 2193 bp, Proteus mirabilis
atgacggtatctactgaactaagccatgaagagtatgtaggtaatggcgtaacaacggattttgatttccgcttccgtatctttgaaagcaagcatttgattgttgtggttgctgacagtgagggaaatgaaacaacattaaagaatggtactgattacactattgtgggagctggttcttatcatggcggtaaggtggttttaaataaacctttagctcaaggctggaagatattattagaacgtgatttacccgttgtacaagaaactgacttacgtaatcaggggaaattctttgcagaagtacatgaagatgcctttgattatttaacgatgttaattcaaaaagcattgggtactttctctttaagcctacgaaaacctacctatctatcgaactattatgatgctaaaggcaatcgtattgctaatttggcgcctcctaagctcggcagtgatagtgctaataaagactacgttgataacagtattaaggatattgatagcaagacgttgcgagttaaggataaacctattaatgcgttaccaaacactgaacaacgcgccaataaaattttagcgtttgatagtgtaggacagccaataactgttttgccagaaagtggttcggcttctgatgtgttgattgaattggcaaaacctactggtgcttctaatatagaaagtgcggaaggtaacttacaagatgccttatatttatcagtacacggtatcagattatctagatacaaacataatagtgatcctctaaattctgccttagaagcatcaagagaattaaagctaccattaatcgttgatatggactgtgattacagcatttttgtagttaaagcgggagataaaattattgggtttggcgatcatacactaacaaaaaaagggaatgacatccctagtctccctaaaaatcagcaccctgatagacctattggcgtactttctgacttcaatgttgatgcagggatagttgtttatcacgaaccaaataaatccgcacagaatatccttttacaagggtttagattagaaagcaaaaatcattctcgatatgctatttatgcaccatctattagtgttagcaccatagaaagagtcagtcagcttaatttcttgacggggttaaggtttaagaatgcatatttaatgacggtacgtgattttatgtctttgtattggtactcagagagtgacgtttatacagataatatttgttatgatttttctgatggcagctacaccgctggaactagtttgatactagaaaaagtttattgtacaaattataaatggccgttttatgcaagaaatttagagtatagtacatggactaattgtggtggagagggcgttaattctcataatcaatctacaccaacaaaccttcctcgtgtgtttgaatttgttaattgtacaaacttagttttaaatacaccgagtacagagaatttgtatggtggatttattcgtgctgtttcaacagttgatgggggaagccagggtgcttcaactattactattaataacccacaggctaccgcgggaatatttggtacgtataatgatgtaattaatgcaaaacttttagatatagatggtctcgttaactgtatagtgaatggcggggttatgactggagccgcacctggatattatcttaagtttggaggtgcaaagagtgattcatgtttaattttaaatgggatggatatgcgatttgtgtggaatgaaataaggaaagatatagagaaatatggaggaataacatatacaaagggtacaaacccagttcaatgttggagagttggattaaataatcctcaaggcgataatacgattgcagaatggaaaaaaacaactgttgattattatggtatggcaatcggaaatcggataaaaacagtgctaggtggctggtatgatattgaagtgagtgtggtgctcagcgctttatctaatggagctgtactacttaaaatagctgatgatgaattgtctgatggtgttgatcacgctgctacatatgttagcaaaacagacggaaagaagtcagtaaagttaaattatacgggtagacttgcgtctggtaaatatatatatgtatcgctcgtaaatgcgcagtttgattcaacatgggaacaggattcgctaattaaagtaatactaaaatag

SEQ ID NO: 301246 - DNA, 327 bp, Proteus mirabilis
gtgactcatttcacgattgcgattgataagtgtagtgaaactgacttacagaaaagtattaaattaacctggaaaagtaacgaattagttgatatcgatggtaatcattttcttattactaaaggggatagtggagcactattaggaattattgataataatggaaggtctgttatatggaataaaccgatgacaattggagatgtaagtgttgttgatggttcacaacaatttgagtttggtgtttttgtccgtaagccagcaataggagaaattaagattggtgaattttccagtatcgtaacttttaatgtggagtatgaatag

SEQ ID NO: 301247 - DNA, 1578 bp, Proteus mirabilis
gtgctaatatggctaaataaaatgaaaaatttattgggtgtagctttattatttatttctctagtatgtaatgctgatatttttattaatatatctgcaacaatggttgaacctgtttgtaatatacgtagtgaaaatggtagtgctccattaaaaattggttttgatacattgacgatatcttcactgactaaatctcctgtggtaaaagatttttcactttatatatcagactgtaattttaataatacattagccattgttttaaacccaaaaggaggaagtacgcttttatataaaggaaaaaatatattagcaacaagtactgatgggttaggtatagatattaatgaagtgactggtggaactattcgttcactggaaacaagtaaaaagcataaaatcaatccagaacgaattaattcaactctttatcgtgttgacttacaagctcagttagtaaatacagtgcctattaatcaattaaaactagggaagttcaattcaatagttactatttcagtattattaagtgttttttttattaattttatatttacatctattgctattgcagattatgcgccaagaattcaagatataaacactggctatatgattaaattggcaagtaacagtcctattgcattaaatccagtgaaaggtacagatggtaaaaactattataaagttggtaatacgattgtgatcaataatacaccatctagtgtaagtgtatcggggattgttcagtgcatcgggcttacttggggacatgcttcaacaaatatttcttggaataatgcatatcatcgcttgtttacatatgtacctatggctggtaccaatatagaaggccatatggcatatcgtattaatagtaatttggtaatgaccattgatactcaaatgttgaattgggtaaatataagaggatctgtttgtgaacaggctacaccaacattaactgctcatgccagtgaatttactgtacaatttccaatcagtgtgacattttatataaatgatatggttattgattctcagctacctatacctgaaatggatctaggaggttatgttcgtgcatttacacgatcaggaacgagtcctcctcaaaattcttgggcattgaatgatgtcactgttcctatgcgattagcagcatcacaattaaacgtaacttcttcttgtaaaacagtaacaagtacaggacaagtaagtactttaaatttaaagcatgggcaactcaatacattaaattatgacagcttagttacagaaagtgtaacttataattgtgttttttcaaaagcaacaaaagtgagattacgtctcgattatataactgataacgatcctcaaaaaagattaccgatggtgagtacccaaaacagcaataataaaatttatagtgaattgaccatgacagatgaaataaccgggcaaaaaggtaaagattttaaaattgacattaatgatttgagaacaattaagataaccagccatcttcaaggaacaaatgcgatagctggagattataaaggttcagcttggctaatcgctacgtttgattga

SEQ ID NO: 301248 - DNA, 1521 bp, Proteus mirabilis
atgaaaagtaagcggagtagtatattaaaacttcaattatcaatgataatactcttatcatcaggaatggcaattggcgcttcaaataagacagtagaatttttattgacagagcaggaaagtggttcttctaatgcaatagccgaacttaatttacttgcgaagcaacaaaacccacatgcattgagtactctaggttttatttatgaacatggggttaatacacctaaggatgtgttaaaagcgatagattattatcagcaagcttgtgaacttggtggagactatggttgtggtaatgcctggtatttttatcagtatggtataggtgttgaacaaaatagcaaaaaagcgactcagtttgctaataaaataaataaaaatgatattccattagagatagcgaacaaattaagtcttgaattttatgatgcaaaagtagtagcagaagcgaaccctgatattcgttctgattttattgaaagcttatcacaatggttgacagctggagatgaagtaacacaattaatgtttactaggatgggattaagcaagcaagatacattacatttagcgaaagtatgggcaaatgagtatgaaaatgatgcaaaacttaactttcaaataggtcatttatataattttcgatactcagaactagatagtgaaagaaaagatctcgaagctttgaaatggtttcaaaaagcagctgaattaggagagccaaactctcaaaatattatagcttatttatatgaaaatggtgattggggaataaaacaagaccccaaaaaagcaattgaatggtatcaaaaagccgtggaatccggtgacagtaatgctactatgaatttagctaaaatatattataaaggtgtagatacaaaggttgattatagtaaagcattatctttatttgaaagtgctaaagattataacattggtgaatctgcaaagtatttaagtcagatttattataatggtcagtcagttatatcggactgtaataaagcagcagattattatgagaaatcaatcggcagatataatgaaaagatccctcgggataaatatatagagctctgtcaatccgatagaaaaatgcgtaatgaagttaaaaatgagttaccgagtattgttatgaagcatatttctacatttagcggtgataagggcgcgttaactcagtgtgaattatcgtttggtatttttagtaataaaattattcctgttgaaaatttgcgagtgaaaattcaaatgactgcggagaataactcgaatgatgagccttttatactagagcatatagttgcctttcctccttttggatttaatagtttaaataaagaggaaaatggtggaagaggttatgagaattctaaattagtaccaatctatgatgaaaaaggttgtaaaactcacaaggctaaaacaaaaattctgtctgcaacagcattaattaatggtgaatctgttgatttattagagaagaacttaatttcattcagcgataaaaaataa

SEQ ID NO: 301249 - DNA, 819 bp, Proteus mirabilis
atggctattggtttaccgacacccagaccagcattacgattagttcagtctaagactggtgaagttaggttaaaatttagtaatggaagtgaaggtgacttaacccaattgatgaatgattactctatcgaatatttgaggaggtttaatcaatttagcggttatatcgtgtgtgcgaaatcacccagttgtggattagaacgtgtccgggtttatgatccaataggcaacggcaataaaaaatcgggtacaggcatttttactgaaaatctgaaaagaataatgccgtggttacctatagaagaagatgggcggttaaacgatccctatattagagaaaattttattacacgggtgtttgcgcttaatgagctaaatcaattgaaaataaataactttactcgccaggcattaattgattttcatacaagatacaaactattgttattagctcattcacaaccgctttatcggcaactagggcgctttgttgctaacaataaagattgggattcattagagactttctttgttgaataccgtaatcgatttatggctctattacaacatcaagccactcgtcgtaatcacactaatgttcttatgcatgtgcaaggatattttaagcaagatttaacttctaagcagcgacaagcattaagtcaattgatcttagagtatcgtcaaggaatacaacctttattggcaccattaacattaattaatcattacttatcagaatacccagataattatctgagtaaacaaaaatacttttatccttatcctcaatctttaagattacgttatggtttgtaa

SEQ ID NO: 301250 - DNA, 1164 bp, Proteus mirabilis
ttggcaacacatctaacttgttttccaaaagttataaaaaaagaatatccattaaaaagtaggaatcaagtaagtagaaaagttaaagttgaaataataaataaagaagaacaatgtattgatattattattagtgctataaataatggaaattgtgtggtttggataaggaatacggttaatgatgcgataaaatcatattatgatataaaaaaaagattatctaaagataataattgtttattatttcacagtagatttaatttaaaagataggaagatacgagaagagcaagtattaaagtattttggaaaaaatagtaccgctcaacaaagaaaaggcactgtattaattgctactcaagtttttcaagaaagtttagatgctgatgctgatatcatgatttcagatatttgtcctattgatgatcttattcaacgctcaggacgattacatcgacatacacgaacaaaatatggggattacacatcagaaacgattgataaacgtcgacctcctattttatatgtacatgctcctttatttatagagaccccatcaagctgttggttaacagaacaattttcatcaacagaaacagtttatcgttcacctggtcgtttatggctaacattaagaagtttaactcgattaggtgaaattaatatgccaaaagatgcgagacagttaattgaatccgtctatagtgataatgcttacaatgaaattcctcaatctttaatacaaaaagaaaataatgatataggtgaaaaaaaagccagagtatcaaaagcaaaaattcaattattaaagataaataaaggctatagtgaagaaagttcagaattttggacagaagatcactatgatattagtactagatatagtgatatagaaatggttaatattcttttattaaaaaaaataaaagataattatgttccttggatagaagattctcatttttctattgctttaagtacagttaagatttctaaaaagaaatatgctgataaattagtatcagtaccccaagaggtaattgatacaattaataagcaatatccacaggcacgatatttacaattgtggataccagatgaagatcagtattatcaatatgatcatttaatcggtttttgtgaaagacaggaattgtcatga

SEQ ID NO: 301251 - DNA, 693 bp, Proteus mirabilis
ttgcgttttcgttcaacgggaagttgtgctaattcttcttggctgctagttcttgattataaaatatctggggttggctggaccaatttaacaggtcccggtggtggtactgattcaggcgttgtttatttacaaaaaaagccacctgtaggaaaaacggttattaatcctgtctatatgttgaaacgtaattattattctcgaattggtcaaatgggcaatacgttacaaaaggaaagcgttgctcttagtgcaccaacatcgatgacgttgataaataatgcttcttgtgcagtgtctgttaatgacgtcgcatttggtgaacaaaccgctagtgacgtaaaaatgaatactattgcaggaaaaaatataaatatttcttttacgtgtaatgctgtattacctgcatacacactcagtttttctggtaaagatggtgtgaataatgccacaacagggatcattaaggttaaagataatagttctgtggggtatcaactttcttgggcagatagcacggttaaacccattaatagtgctgtagttattaataatgtggcaatagctccgaatacaaagccaaaaaccaataattttactattccgataagggtaaaacctgttgcgttatccactcagccaatccctgggccggctaatactgcattaacgattaatataaagttaaattaa

SEQ ID NO: 301252 - DNA, 1446 bp, Proteus mirabilis
atgttgctaagtttgaaattaactaaccatttattcaaacttcctatcagttattttaaatctcgccaaacaggtattattgttacacgagtaaaagagcttgatatcattcgagagtttataacaaaaaccttattaatgttattagttgatttctcatttatctttattttcctatttgttatggcttatttgtcattaaagttaacattaatctttcttgccaccatcccactctattttatcttagctaaattaattgcccctaaaatagaaaaaaccgtacaacagctttatcaatattcagcaacaaatagtgcttttttaacagaaaccctaggaggtatagaaacaataaaaagcctttcattagaaccacgttttacacaacagtggcatacgcaaatccatcaactgactaatgaaaatttaaaattacaaaatattgataacttatcgcaatacattgtttcatttttacaaaaaataacgacagcgatacttttatgtctaggtgcttttgaagtcatttcacttgcaatgacaataggtcaactcattgcttttaatatgctattaaaccactgtctacaacctttaagttctgcaatagaagtttggggaaagtatatccgagccaaaacggctatttataatttacaagacattcttaatctcccaatagagcaagaaaaagccaataagaaaatgaccttacaaggtgaagtgagttttgagaatgtcagttttagttatcaacatgatgccccccctgttgtaaggcaaatttcatttagaataaataaatatgaaactattggtatcgtcgggacgtctggatcagggaaaagtacattagcgcgcatcatcgcagggctttatatcccacaattaggtcaagttaagcttgatggcattccggtttgtgaaattccccccgcagtattacgtcaacaaataggttttgtcttacaagagaattttttatttcatttaaccgtgctcgacaatatccgtttaacgcagccatcagcctcattagatgaggttattcatgtagctaaattagcaggtgctcatgagtttattttgaaacttcctttagggtacgacacactcattgctgaaaatggcagatctttatctgggggacaatgccaacgtattgcaattgctagagccttactctcatcccctaaaattttaatttttgatgaagctaccagcgcattggatggtgagtctcaagccatcatcgaaaaaaatcttccccttattacccaagataagaccgtcattatgattgctcatcgcctttccacaataaaaaactgtgaccgcattattgtattagaaaaaggccagataattgaagaaggcaaacataatgaattgattagaaaagatggcgcttataagaaactttggcaacatcaacaaggataa

SEQ ID NO: 301253 - DNA, 489 bp, Proteus mirabilis; identical to SEQ ID NO: 298431

SEQ ID NO: 301254 - DNA, 666 bp, Proteus mirabilis
atggcaaagtcaaaaaaccataaagcgacgcctttcctcggcacgaagatctttgtgcaaaccggcttaggagaggcgatgaccgtgacggaagcgacgttatcaccggcaactattaccatcgccaataataagctgaaagccgatgacatgattatgttatcgggactcggggagttagatggacgttttcctgttgcacaggttgatggcaacaaagtgaccctgtgcgacgaagtggattggagtgataaaacgttacccacggattttgcaaacgccaaagcacaacgtattcagtggtctaataacttttgtgcggtaaaaagcttcagcaaagacggttcaacgactgaacaaatcgatgtcaccaccatttgcagtgatggcaaggaatatgaatctggcgatacggaatacggctcaattaaattgacctttttcttacggtatagctccagtgatgtgcagcgactcttgcgtaaatatgaaaacagcaaagaaaaatttgcggtgaaaatgatcttaacacgagatgagggctccatgttttattacggctctgtcgaaacgggcatgaacattgatggcagtgtagggcaaatgatggattcggggatctcgattaaattgtctggccgtgattatttgaatgcgaagaaataa

SEQ ID NO: 301255 - DNA, 417 bp, Proteus mirabilis
atgtctaacgctttattgcgtgaattagtgttaaaccaagcactgaaagtgacgccttttacttatttagacaacaccttttatgtcaaagagttggatgttggcaccatgaattacattcagcgcaaacttcgccaaattaaaatcaagcttgctgaggcacaggacatttacttagacgaagacgatcccgaacaatttaatgaggcgataaatcgtgtctacgatgaatatgatgtcgccagaatgttggcctttaagttatgtgatgaaaaaggggaattgctttttgatgccgaaaatgaagaagacttaaaaggtcttaatcgtttaggacaagggttctctaatgcggtgtttacggccgaagcggggaacagcgaaaaaaacttggagaacggcgacaatttcaattga

SEQ ID NO: 301256 - DNA, 171 bp, Proteus mirabilis
atgacggtcgttaatcatattacggtgacgggaaatggtgacgctgtacttgcgcaggcaatgaaggaagccgcacaacaagggacagaagccggcgcacagaaagctcacgcgatgatgttacaagactttcaaagtaatggtgcagcacgcagaacattaggagtttaa

SEQ ID NO: 301257 - DNA, 597 bp, Proteus mirabilis
atgtctattcttgaatggccaaaagaggtgatccccacgcaggaaaactggcaattattgagtaacagcaaaacctttacctcaccatttaatggaagtagtcaaacggtacgctttccgggaagtcgttggcgttgtgagctgacattcaataatttaaatgaagagaaatcgcgccagttagaagcgctggtggcttcattggatgggatgtcggggcgagtcaaaatagccagttggataagaaaagggcgttatgggtatggttcgcctcgtattgtaataccaagccaattaggtcatcggctagaaacaaaggactggaagcgcaatatgcgcgtgttacagcaaggggatcgtttaactgtaggcaatgaactcaaaatggtggtggctgatgtggtcagtgataatcaggggtatgccagtatccctatttcaccgatgttaagaacgtcacctaccgttaatgaaatgcttgaggttgagcgtccttttggaatttttcggctcgttgataatgaacagggtaaatttcagcatcgtcgcttggggtataccaatatcacgttatcttttgaggaggtgttgtactaa

SEQ ID NO: 301258 - DNA, 597 bp, Proteus mirabilis; identical to SEQ ID NO: 301257

SEQ ID NO: 301259 - DNA, 597 bp, Proteus mirabilis; identical to SEQ ID NO: 301257

SEQ ID NO: 301260 - DNA, 249 bp, Proteus mirabilis
atgtcagctatagaagcaggttctgctggagtaccattattgttaagtaatgttggtggatgtagtgaattaattcataataacggaattatattcgaaaataatattgatagtctattaaatgcaattcagaaaattttgaataattatcattattattatcagaactctagttcttataaatcaattttccatattaatacttccaaacaacattatatgaatttaattgacggagtgaatgaataa

SEQ ID NO: 301261 - DNA, 468 bp, Proteus mirabilis
atggcaggaagacgcccgaaaccgacccacttgaaggtggtcaccggtaatccgggaaaacgaaaactcaacgataaagaaccccaacctaaacgtgaaattccaagcccacccgaacatttaacggattgggggaaaatggcgtgggcaaaattaaccttactactcgatggaatgggcgttttaactgtggctgacacgctggcgttagaacgactgtgtgatatctacgctgatattcttcaattgcgagacaccattgccatcgaaggtcggacatacaccacaaaaacgcaatcaggggattttttaattaaagcgaatcctgccgttgctatgttagctgatgcagatcgccgttttaaaagttatttagtcgagtttggtttaacccccgccgctcgttcgaaggtgaagatggatggtggagaagaagaggaagatccgctcaaccaatatttcggttga

SEQ ID NO: 301262 - DNA, 597 bp, Proteus mirabilis
atgtctattcttgaatggccaaaagcggtgatccccatacaggaaaactggcaattattgagtaacagcaaaacctttacctcgccatttaatggaagtagccagacggtacgctttccaggaagtcgttggcgttgtgagctgacatttaataatttaaatgaagagaaatcgcgccagttagaagcgctagtggcttcattggatggcatgtcgggacgggtcaaaatatcaagctggataagaaaagggcgttatgggtatggttcgcctcgtattgcaataccgagtcaattgggtaatcggctagaaacaaaggactggaagcgcaatatgcgcgtattacagcaaggggatcgcttaactgtgggtaatgaactcaaaatggtggtggcggatgtggtcagtgataatcaaggacatgccattattcttatttcgccgatgttaagaacatcacctaccgtcaatgaaatgctcgaggttgagcgtccttttggggtttttcggctcgttgataatgaacagggtaaatttcagcattgtcgcttggggtatacctatatcacgttatcttttgaggaggtgttgtactaa

SEQ ID NO: 301263 - DNA, 486 bp, Proteus mirabilis
atggtgatgaaaatgctggttttcaaagccattgaagcaggcgggcaggcaatgggctttgatatgggatggatgagcaaagggcatgcttatggtggctatacggggcatggcgggaaattcgaacctaaagggattgtacatggtggcgagtttgtttttaccaaagaagcgacggctaaattgggtgtcggcaatctctatcgcttaatgcatgcggcgcaaggttatgcttcggggggctttgtgggggcggtcgcagggcgaataccgattacaccgcaaccgacgttagcccgtgcaggcggggtgcaaatgacggtcgttaatcatattacggtgacaggaaatggtgacgctgtacttgctcaagcaatgaaagaagccgcacaacaagggacagaagcaggcgcacagaaagctcacgcgatgatgttacaagactttcaaagtaatggcgcagcacgcagaacattaggagtttaa

SEQ ID NO: 301264 - DNA, 597 bp, Proteus mirabilis
atgtctattcttgaatggccaaaagcggtgatccccatacaggaaaactggcaattattgagtaacagcaaaacctttacctcaccatttaatggaagtagtcaaacggtacgctttccgggaagtcgttggcgttgtgagctgacattcaataatttaaatgaagagaaatcgcgccagttagaagcgctggtggcttcattggatgggatgtcggggcgagtcaaaatagccagttggataagaaaagggcgttatgggtatggttcgcctcgtattgtaataccaagccaattaggtcatcggctagaaacaaaggactggaagcgcaatatgcgcgtgttacagcaaggggatcgtttaactgtaggcaatgaactcaaaatggtggtggctgatgtggtcagtgataatcaggggtatgccagtatccctatttcaccgatgttaagaacgtcacctaccgttaatgaaatgcttgaggttgagcgtccttttggaatttttcggctcgttgataatgaacagggtaaatttcagcatcgtcgcttggggtataccaatatcacgttatcttttgaggaggtgttgtactaa

SEQ ID NO: 301265 - DNA, 264 bp, Proteus mirabilis
  misc_feature (251)..(260): n is a, c, g, or t
atggaattaaatttatgctggtggaatataggaatatctccaccgacaaaatcaaaacagaacgtcaagactgaaaaagttggcttagcgaaaaaatatcttgaagaacttatcattaaaaaaacgcttgatatcattgcgttgagtgaggtttctgaaaacgaaggctacgcttttaagcagttggcaactcaattaaaaatggggtatatcgatctctcaggaaaaataggccggattattattgatannnnnnnnnnttaa

SEQ ID NO: 301266 - DNA, 618 bp, Proteus mirabilis
atgaataaactagagtttatttcaagtaagtttttaactaaactccagcctgataatagaatggtaagggtaggcgttgctgttgtatttaaagaaatcgaacatcaaaaaataatcaccctttttttatcacattggccatcaatattaagtgctaatgatacaactcgagaagtggcagctgcaggattaagaagtagtattaataaactctttgaaaataatggagatgatgttcagtttatttgtatgggggattataatacagagccttattctaatgcgatgcttaatatattgtatgcgacaagagattatcatttaataaaaaagaaaagaaaactattatttaacccattttggtatctcttatctgataagaagactaataatttaggtacatattattataattccgcatctattaatcgttggtatgtgtttgatcaaatgattttttcttcatcatttttatatggaaaagaagattgttttaaattagatcttgaacagcttgatttttatcgcgtcctaaatgatgataatcactgccttgatgatatcttttttaaaaaatttgatcattaccccatattttgtaggatcttccatgaatga

SEQ ID NO: 301267 - DNA, 984 bp, Proteus mirabilis
atggataataattcgctaaaaaatgcgagtttatttgataatgatcccgttctttatgctgcatggctttactatcaggacggactcagtcaaagtgaagttgcaaatattatgagcgtttctcgagtgactgttgtgaagtatttacatctcgcgagagaaaaaggtttcgttaatataagcttggattcatcagtattttctacgattgattattcaatcagaataaaagcaaaatttaatcttaataatgtgcttattttacctgatgaagaaaagaataaatcgcaacaaacatcaaatatgaatcgagaaagattagctaaagcaggggctatgtatctttctcagataatcagcaatgatgatattttaggcgtagcttggggaagaacaatccataaactagggcactatctccccactaaaacactagaaaatgtcactgtgttacaaatgattggggctgtagccccacaacctgattttactactgcggaatctgccgctttgatcgccaataagttttcaggttgcagtattaatttgcatgtgccggctgtagtgtcaaatgcgcgtttggcaatggaactacaagcagaacccataatacggcgtaatttctctgctttaaatcaatgtaataaagctttgtttgttgtgggtaatactcaagatgacaatcctttgattacaacaggcgtactcaccacaaatgagatggcacaatatcgcgatttaggtgctgttggtgtcatttgtggtcgattctatgatgcacaaggtaatcctctgctttctgatatcgaccttagaattatgggaattagtcttgcacagttaagacagatcccacagcgtatttttattgctggaggcgttgaaaatgttgctgcaaccataggcgcaataaaagggggatatgctacagatattgtcatcgatgaagtgacggcattagcattattggaattgagtatttaa

SEQ ID NO: 301268 - DNA, 648 bp, Proteus mirabilis
atgaataatgatggcaataaaatcacggtttattcaactatttcccctgaaacagtagtgcaagtccgaggtacttatacgtcaaataaatgccaacgttctcattttaatactgattataccgaagtctcttactcctctttaacacaaaaagtggaggtagaacgtaaaatagcagaggataataaaaacgcgacctataccgtgcctatcgatgggggaggatggtgtaattggaagctggtagaaatagagatagcaccattatctactaaatatgaagtgcttgttagaagaaatatggttttttcattgtctaatagtgaacattcaaaaatagaactatttactacattagcccctgttatagtggaagaaaaggatgaacagtccatctattactcatcatcaataatggaggatgaacaaaaattatccaataaatcagatggagaaatttattttaattataaagttgaacctaaattaaccacgactatcatctcaaatgataacaaagctattttccctaacggcaatattaaaatattggacggatctagttatagcagaataattaatttcaatgaaataatcgagaatagtgatgaaaaagcgtttacttcttttgttagatatattgattga

SEQ ID NO: 301269 - DNA, 798 bp, Proteus mirabilis
atgtttttttctcgtaaattagaggcctttatggccgtcgttgaaaatggatccttaagtaaagctgctcgtgtgatgaaccgaacgacaccacctgtagcgaaatcaatcaaagattttgaagccgtgctagggaagcgcttgtttaagcgggaaaagtttggtatgagtttaacgcaagaagggttagaactctataatgatttaaaatcactttatctgcaagaaaaagagataacaaaaaaacacacatcgggcattattaataatagcattcatgtttattatgattggggtaaaagtcaatatttaacagcactctatcaagcagccaataagaattgttcacatataaatatgatgagattttcgaaagataattttgaagagataccagattatgatggaaacacgttaatcttaagctcagataaaattattagtgaaaagtttagcttaatacatcaagttaaaaataaatatctaggaatatgttgccaacaaatcttagcacaaaaagcacaagagaatatcaatacattgctaaaagaaaatatttggttatgtgatcccgctttatataaaacagcaaaaataaagaaattagaaaatgaaatagcggatcagggtaaacctgtcagtattagattgatggatgatttaaattgttgtttaaactttattcaaactcaccattcgctattatttactgatgaaaacccgattaaaagtgaggatgaaaagcaactgtgctttatacctttaacacaaacggagctgtctcttatacacatctga

SEQ ID NO: 301270 - DNA, 561 bp, Proteus mirabilis
atgaaaaaaaatcttattttatttataagctttattttacctttctctccatcactacatgcttttgagaataatcaggcaatttatggcggttacatatatggaaaaataaaaaaccacaaagcaaatggtgcaataataagttatcactatggatccgatattcactggggaatgttactttcattactgcatatcaagtcaacacatcaaagccattttatagacgctagctcacttaaactaggcacaaaagatgaacatgcaaaggtttctgcattgttaataggcccaacgtatcgaattacaccttctttggctatctacgcccaaatggggcctaaaaaattaaaatatcgagttgataaaagttattcaggcgttgcggtaaccgataccattatcgtcgacaccaccaatgtgatgtttcaagcgggtattgattatagccttagaaaaaatgtaggcattaatcttggctatttacattcagatactgagtcaaacaaacataatattagactaaatagtatccaattatccctaggctatcgtttttaa

SEQ ID NO: 301271 - DNA, 351 bp, Proteus mirabilis
gtgaggacggcttcacccataaaatctaaaccattagataaatctattccttttttacttaattcatctctggataaaataaaagcagaattagtttcccctaacttaaaatctgcagaaaaaatcttacctgagattaaatccaaattagctttatctacactttcttgttgttttgtcgtccagccattagtcacttctttggccatgacggttttatcgcctgaaaatcctacagctacatcatttgctcgactaataaatacaggtttttcatctacagtaacattagtccaaacgaataatgccccaccaacagaagactccactttatctttactaacgagatga

SEQ ID NO: 301272 - DNA, 306 bp, Proteus mirabilis; identical to SEQ ID NO: 297209

SEQ ID NO: 301273 - DNA, 444 bp, Proteus mirabilis
atgggtggtggtacgacaataactaatcactttggtaccgccgttattcctaacttacctgtaaataaaaaaacaactgttctattaaatactaaaaatttaccactcaatgttatgttaggcacaacatcctttgatattgcattggcaaaaggtactgttttttctcgtgagatccctgtcaatacaatgaagcaagttttattagaaataaaaaaaccagatggtaaacctgttaatacagcaaatagtgtgattgatgataagggaaatctaataggtgttattatgggggacggtaatgttataataagtaatgagcaaatcggtaagccactaaaagtaaaatcagataatggtgacatctgttctgttgattattcagttccagaagaatttaatccagactttttatatgaaaaagttgatgcaatttgtaagtaa

SEQ ID NO: 301274 - DNA, 510 bp, Proteus mirabilis
ttggcgcaacgtagtgcagaggcggcaaaagagatcaaagagcttattgatgcgtcgattaaccgcgtcaaacaaggtaatcaactggttgaacaagtcagtacttcaatggatgagatcctcacatcagttaaacatgttgaaagctcaatgactgagatcctatctgcatcagaagaacaaacgcgaggcatttctcaagtctctttagccgtcactgaaatggataaagcgacacaacaaaatgccgcaatggtggagcaatcttctgctgtagcaagtttactaaccgaaaaggcgggtgatcttgagcaaattgttgagcaatttaaaacagcggaaagtctattttcgaagaatagcacattagcaaaacccgttgagaaatcagcaaatattgggttatcgctcgtaaaagaaaatcaacaagactcaagaataaaagagccaaaaaaccataaacaatcgacattcaaagaagatgaagatgatgattggacaagtttttaa

SEQ ID NO: 301275 - DNA, 192 bp, Proteus mirabilis; identical to SEQ ID NO: 297212

SEQ ID NO: 301276 - DNA, 264 bp, Proteus mirabilis
atgcgcgtattacagcaaggggatcgcttaactgtgggtaatgaactcaaaatggtggtggcggatgtggtcagtgataatcaaggacatgccattattcttatttcgccgatgttaagaacatcacctaccgtcaatgaaatgcttgaggttgagcgtccttttggaatttttcggctcgttgataatgaacagggtaaatttcagcatcgtcgcttggggtataccaatatcacgttatcttttgaggaggtgttgtactaa

SEQ ID NO: 301277 - DNA, 264 bp, Proteus mirabilis
atgcgcgtgttacagcaaggggatcgtttaactgtaggcaatgaactcaaaatggtggtggctgatgtggtcagtgataatcaggggtatgccagtatccctatttcaccgatgttaagaacgtcacctaccgttaatgaaatgcttgaggttgagcgtccttttggaatttttcggctcgttgataatgaacagggtaaatttcagcatcgtcgcttggggtataccaatatcacgttatcttttgaggaggtgttgtactaa

SEQ ID NO: 301278 - DNA, 348 bp, Proteus mirabilis
atgagtgctagcgatacatttgtcttatcttcagcttgggaagggtttggtttagttgtagcagaggctatgtcttgtaaaagaattgtgattgctactgatagtggtggtgttagcgaagttatggataatattggctttttagtcccaacaaaagactcaaaattattatttgatgcaatgaatcatgttttatcattgaataatgaagaaaaaaaacttattggtgaacaagcaagaagaaaaatattgcaagatttttctctccctaagattattgatacatggcttaaattatacgagcagctagaaaaaaatgaaaaagaaaattgtttttatcattactaa

SEQ ID NO: 301279 - DNA, 264 bp, Proteus mirabilis
atgcgcgtattacagcaaggggatcgtttaactgtaggcaatgaactcaaaatggtggtggctgatgtggtcagtgataatcaggggtatgccagtatccctatttcaccgatgttaagaacgtcacctaccgttaatgaaatgcttgaggttgagcgtccttttggaatttttcggctcgttgataatgaacagggtaaatttcagcatcgtcgcttggggtataccaatatcacgttatcttttgaggaggtgttgtactaa

SEQ ID NO: 301280 - DNA, 252 bp, Proteus mirabilis
gtgatttggacggatcatgcgacaaaagtacgtgcagcgatcatgccttatcaaggacgggaatattttcaagcccagcaagtacaaagtgaggccacaacacgaattcttattcgctatatcgctgatattgatacttcgatgcgtattgtatggggtaagcgaatatttaatattatttcgattattgacccttatgagcgccatcgtgagcttcaattgatgtgcaaagagggcgtgaatgatgggtga

SEQ ID NO: 301281 - DNA, 213 bp, Proteus mirabilis
atggtggtggctgatgtggtcagtgataatcaaggacatgccattattcttatttcgccgatgttaagaacatcacctaccgtcaatgaaatgctcgaggttgagcgtccttttggggtttttcggctcgttgataatgaacagggtaaatttcagcattgtcgcttggggtatacctatatcacgttatcttttgaggaggtgttgtactaa

SEQ ID NO: 301282 - DNA, 240 bp, Proteus mirabilis
gtgggggcggtcgcagggcgaataccgattacaccgcaaccgacgttagcccgtgcaggcggggtgcaaatgacggtcgttaatcatattacggtgacaggaaatggtgacgctgtacttgctcaagcaatgaaagaagccgcacaacaagggacagaagcaggcgcacagaaagctcacgcgatgatgttacaagactttcaaagtaatggcgcagcacgcagaacattaggagtttaa

SEQ ID NO: 301283 - DNA, 486 bp, Proteus mirabilis
atgggatgtaaaataacacgtagtttgcatgtaaacacagtgttatcacactttataaaaatagttggtcctatcgcagagtcttttatcaccgatttcgaagagtataaaaaagagtgtgtcgaatttggtgatatcccaatcccccctcatcatgttcaacttacgtatcctgcacatatagaaaccataggcagggataagcgtatggaacgacctagaacagcattacatgaagaacttcatcatgttcatttatggcaagatggttgtaactgggatgatgagaacgaaggtacttttgtgcagtggaatagcacaagtgattcgtttattgtttattcttacttcaaagataaggataatgatcatcacttttatattatagacttggtgtttgatcaagctcacacaattattgaagataaagagcaagtcttaaaatgggttgaaatagcaaaagagtttagacttaaaaacatttaa

SEQ ID NO: 301284 - DNA, 243 bp, Proteus mirabilis
atgctaaggcaaaatatctggctctatcatattaacttagcacaaggggatgaaataaccttgccgatacagggtcagaaaggctatttgcaatctatcaaaggcggtgtccatttccaaacctcagagcaagagcttggggaaatccgttgtggtgatggtgcttttattcaagatagcaatatgctagcgctaagatgtcaaaaggcttttcgtggtctttttattgatatcgtttcttaa

SEQ ID NO: 301285 - DNA, 1437 bp, Proteus mirabilis
atggggaatgagtggcctttagtcaaattgggtgagtattgttgtaagattggtagtggggctactcctaagggggggagcagtgtttatttggatgctggtgatgtttgccttattcgtagccaaaatatttataatgacgggttcgaggaaggtggcctggtttatatagatgaggttgctgccgctaagcttagaaatgtaattgttgaacataatgatattctgcttaatatcactggtgactcagtagctcgcgtatgtttagttccagatgcttatttacctgctcgtgtaaatcagcatgtagcaataattcgacctaataaggagcattttgatgctagatttttacgctatttcttagctagccccaaaacccagatattgctgctaaatctgtcgagtgcaggggcaacaagaaatgcgttaacaaaaagtatgattgagaattttgaagttccaaaaccctcccttagtgttcaggtttttattgcaaatatacttcaaatcttagatgacaaaataatgaagaatcgccaaatcaaccaaaccctagaacaaatagcgcaaactctatttaaatcatggtttgtggattttgatcctgtggttgataacgcactagatgccggtttttttgagcaggatttagctttctctgaagaattactgcgtcgagttgaagtgcgtaaaacggtgcgtaaaagtgataattttaaaccgttatcagaggatattcggcggttatttcctaatgcgtttgaagaatgtgcagagcctgcattagggcttgggggatgggtgccgaagggatggcaggaagtaaaactaacagacctagtttatacagtatcaaaaacctacccattaaaaacagttaaagaggttattttccttaatactggagatatagaaaatggtagctttctgcatacaacgtattctcctgtaaatggattaccaggacaggctaaaaaatcaatacagaagggtgatattctttttagtgaaattagaccaaaaaataaaagatttgcttttgttaactttgaatcaaacgattacgtcgtttcaactaagctaatggttctgagagccaaaaataattttaatccattgtttgcatattttttattaacacttaatgaaacaactgatgagttacaacgaatagctgagctacgttctggaacgtttcctcaaattacatttaatgaattatcattgataaaattttttttcccagctgttgatagtatagttgagttgttctctacttcttatctagaaccattttttgaaaaaagtagttttaatgggcaagaaagtgaatcactaaccaaactccgagacacgctcctcccaaaacttatctccggcgagttgtctctgagtgatataaaaatagacattccagaagaaacactcatctaa

SEQ ID NO: 301286 - DNA, 735 bp, Proteus mirabilis
atgattatggtaggtgatgtacttcttgttaatggtaacagtaagctttcatcaggtcttatagcagctcaaaaaactatttatttacaaagccgctctagccatgttgggttattcataggggaggggatccttattcatgcaactggtgacagtggtatccacttatcttttttacctgatgagattaaaaaagtttgtgagggatggcaggtcattaggcttaaatatctcaccgatgaacaaaggggtaatattcaaaagtcagctctttattatgttaggcagtcatataacaaaaaaatcatgatgcataactcgtctgaaactgctttttgttcagaattagtagctaagatatataatcgtgcagaaataccattattttcagggaaatcatctagtaaaatagctccagctcatttcgatgaagcaatagataggggcgagcaatgggaagatgttactcatgaatatcatgagttattagcagatattgaaaaaaatgagttcatgtataggcaatgctttgattcaataaataaagggttaatgaaaagggcatttactagtagagctagatcgaccctctttgatattttaaaaaaaatagctgaagattcggatgatactgattttaaaaaggttatagaaaaaattcagttagaacttactgaacaaaggattcttagtttttgggatgaaaaggatgggctacctttagacgataagtaa

SEQ ID NO: 301287 - DNA, 738 bp, Proteus mirabilis
atgaaatttataatattattttcgctagtaactgtattaatttttatcctaatgtttttttttattgttactggcatcttagaagcaagtaattttgatagtacaaagttcgataactggtcaggacttttctctattataaatgtactattaacatctgctctatcttttacatctctgatgatattgattgcgacccttaagaatacacaaaaaatgactaaatctacttttgatgccttagtcaaccagagagatgataaccacataagccaaatagaaagcctatgccaacgttttaatcaaactttagataaagaaaataccacttttggtaatagcgtagactgctattttgatactatgatttccgattggaaccatggaacagctgattggatcatagaaaataaaataaaatctcatgaactagtattagaacattgtaaatctataagcataaattatattggtagaatcaatactgaaactgatttattacttagcatattaagatctttatcttcaatatctgatttaaacaaaaatgatattgcaagggcaataataaaagatagtattgatgcagagagaagattttggttttgttgtatggtagacgaaaaatctaatcatgagttttttactcaccttgctaactttactgactttatgattatgaatgagtccttatcccacgaagtttttatgcaagaagttatgtcaactgactcataa

SEQ ID NO: 301288 - DNA, 1428 bp, Proteus mirabilis
atggacaaccctaaattatttatttcgtatagttggtctaaccctgaccatgagcaatttgtcttgaatttagctactgaattaagggagtctggcgttgaagctattttagacaaatgggatttaaaagaaggccatgatgccattgcattcatggaaaaaatggttactgatcctgaaatacaaaaagtaataatcatcagtgataaaatgtatgctgaaaaagcaaatggcagagctggcggagttggcacagagacacagatcatatcgagtgaagtataccagcagcaagagcaaagcaaatttgtcgctattgttacagaaaaagatagtagtggaaaagcatacttgcctgtttattacaaatctcggatgtatattgatttcagtgaacaagacaactataacgaaggctttgagcaacttttacgctggatttatgacaaacctctatttgttaaacctgaaataggaaaacgcccatcatttcttgatgattcagatagtatcacgcttggaacaacagcatgttataaaagagcagttactgcaattcgtgaaaataaatctttcatggctggtgctattgatgaatacctaacaatgtttgccaataatcttgaaaattttagaattacagaaaaaactggcgagtttgatgatcaagttatcgataatatagaaaagttcctaccattcagaaatgaggctatctctctatttacaagtatagctcaatatgctccaacagaagaaaatatttcaaaacttcacaatttctttgagtcattgattccttatatgtattcaccacctaacactagtcaatggtcagattgggattatgataacttcaaatttattattcacgaattatacttatatctcatagcaatacttattaaaaatgaaaggtttatattagctaaccagtttattacacagcaatattatgtcggtaatatatccagtttgggcagagatgtaatggtcggctatgatatttttcgtgaatatttaaaatcatttgaatatagaaatagccgactagaactcagacgattatctctacgagcagacttattagaacaaagaaacgctcatactgatatcgcttttaatcatataatgcaggctgattttattttatacttaagatcatcagttctccatcgtggtgaatatagtcgctggtatcctgaaacaatgttatatcttaatcgattcaatccaacattagaaatatttgttagagcaagttctaaaacttattttaataaaattaaatgccttattggaatagataaagcgtcagatttagctccaataatggttgctggaaaacaaagattaccgcattgggaatctcactttactgatactgaaacactaattggctataaaaaacttgcaacagcaccatag

SEQ ID NO: 301289 - DNA, 1095 bp, Proteus mirabilis
atgtttagttggtataggtatatgtcaaagaatccacttgcagaagcgcagcgtgaatcagcaggagcgagtacttttgggaaatataactttcagtttcattgggctctttgtgaaattatcaaaaagcataagagtaagaatgagtacgcgttacttattgagtatcatgaggatgtagtaattgcgagtagtttagaccctgagaatgctcagtttgaattttaccaagtaaaaaatcaaggggctacgtatacgccatcatcactaacaaaaagaaagaaaggagcaaataatacctttaaaagctcagtacttggtaagctgcttagttcttgtgttaacacaacttatgcgaaccgaattgttaaaattgggttggtttcatcaagtggttttagcttaagtattgacgaggggcttaaattagatgtcatcaaaataggtgatctttctgacaatgatttagctagtttaactaaaaatataagagatgaactaggaattgaggtattaccagaacatttacagtttattgttcctgagatacaactagaaaatcaagaagattatgtattagctcattttgctcgtcttgttgatgcattattccctggagcattatgtaatccagtgaatatatatcgctctattgttgatgaaatggggcgtattggtcgtgtagagtatgactataaagattgggcaagacttattgataaaaaatcacttacatcttcggacgttcagaatgtgatagttcaatattcacggcatcctagtgttgatgatttaaaaagtgcttttgatgatttagctaatgacctaggttggcgttcgaagcagaaacgccaatttaaaagcaaacttactttgctagcattacggagagctggttttatgagcgccctagatattgaaattacaaactcatttaaaaggtcgcatagcaaaatctctgaagatgtctatgctgatgattcctcatatgtagatgctttgcaccaacaggctattgatgatggcttacttagtaaagtaaacgaccctgaggaattacttctagaagttatatacagttttttaacggcttaa

SEQ ID NO: 301290 - DNA, 1161 bp, Proteus mirabilis
atgaaaggcttgcaatttcaacgtctagttctattgtcagattcgaaaaaattggcgaatcagtacacgtttccgaagcggctcaatctcgttacaggaaaagacaatagtataggtaagtctactttagtaaaatgcttattttggactattggttgtgacccaaaatttgatgaagaatggaagtctcacgatgttaaggctatcttatattttaagataaaccagcaagagtatattgtgagccgttattcagatgggatctattttggactaaaaaactctttattgcagcattattctaaaataacagggcaattttctaaagattttgcaaaagaagttggtttcgatttattgttagcaagcaaagatggtaatttagaatgcccaccaccagcgttttactttttaccattttatattgaccaaaagaaaagttgggatgaaccttggaatggattcgaaaagttacagcaatatagtaactttagaacgagtcttataaaatacatttgtggctatttatcagttgctcatttccaacttgaagaggatatattcgaacaaaaagaaatagataaagcagcaattcatcaagttgaacgaattgaagaaacaatgaatgttcttaaagaaataactccagagcttccagttgctattacacatgcggaattagaatctattcaagcagaaatagaaaaagatctcatagagttttcgaatcgtcaaacatctctattcaatagtcaatctattttagcaaatgaaattcatgagttagagcaacaatattatattgttagagcatctgtagttgaacttgaagaagactatacttttgctgtagaaaatgtgccattgaattctctagaatgcccgttatgtggtgttgaacatgacaattcattacttagtcgagctggactattggcagataaggaaagcctacaacaacaagcaaatagtattgaaaatatcctcaaagaaaagtataggcaacgagatagtttgtcaaaagaaataaattaccttacttttgaaatagataggattaatgagaaatacttaaaagaagatcttctagaaaatagtactgatgaacagcaagtttttgaaagtgctttatacgcactgtcacaaaaaaaaagtaaatag

SEQ ID NO: 301291 - DNA, 642 bp, Proteus mirabilis
atgaacagcaagtttttgaaagtgctttatacgcactgtcacaaaaaaaaagtaaatagtaatgttcttcaaaagaaagaaacatttattcttcaatctaaaaaagctaaagaaaaccaaagtgacataaagaaagaacagcgaaaacttcttaaaaagaaagataaagatgaattaaatgaactatttatcggtaatttaagtgaaaatattattagcttagctgcaacaggggtaaatttaaatggtgtaaaatccccaatgaattataaaaaaattcttggtgggggggcagcggaaggaactcgaggaatattagcatatcagctagctgttcttagacaaattgagtatgctaataattgtcagatcgccccttttgttatagatactcctaatcaacaagaacaagctaaacatcgatatgaacaaattattgatgttgttactgataatatttctgatagttatcaagtaattctttgtgcaatggatgataatgaaactctatctacatataaaaagagtgctcatattatagagcttgacgataataaattgttgcaaagagaattctataaacctcttcgagaagagtatgaaaaggttattctttctaatataaaaattgttagagaataa

SEQ ID NO: 301292 - DNA, 381 bp, Proteus mirabilis
atgtacgcatcattatatctgtcatttatgctcggctctgttgctatgggaaccaaccctgtaggcacatacaatgatatggaaacatgtaagcaagctcaaagtcaactaaccgttgcaggcacaaaaggcatgtccataaaatctgcatgtagagaaacaccgatgtactatccatcggggccttacctcagcggtgtactggctggaggaaaaggcactcaagctggtaaaaccccgccgtattcagaacttcacgtatttgaagatgatgaatatgaaacttgtgtaggtgctataaaagaaatggctaaaaatatggaaaatgaacccgcaatgcatgccgtgtttttctgcgtaccaatacaaaagaaagtgtga

SEQ ID NO: 301293 - DNA, 753 bp, Proteus mirabilis
atggacgactttcaacgcattgaagctactgcattaaccatcatgataatgcaagctaccgaattcatagaaaaagaagatgatactgacagtcttgtcgatataccctacacactgtgcaaatcactttgtgaagcgaacaattcggagctttatacccacttaaagctaactgataagcaaagagcaaaaagcatcagtgcagttacagctatgctagcggataacgataattggttaagtcaagcggctcatctctataatctattttcaaaccctttgggtaaaaccattcgagataccatcactaaacaatatgatgagaatccactggttagaaagatcacacgcttataccgtggattcggccttgatttagtgcttggcgtctgtgatgaactcattaaccaaagtgtaccacctaacaagttattagccgacttttccgattatcaactcgccaaccttccttgtgaaaactttgatgaagtcgtgcaagttaacgtcgatattggtgttgtatcaggtcaaattgacagcaaggaagctaagtatggtgaattggcgggtaacgtaggtggatttgttgtaggagccaaagcaggtgcaatcattggttcattcatcctccccggtgttggcacaatcgttggtggaggaattggcgctgccgcaggcaaagtatttggtaaacgcatgggtaatcttgctggccaaggctttactgaaactagagaggcaaaatccaaataa

SEQ ID NO: 301294 - DNA, 357 bp, Proteus mirabilis
atgttttcaacgatgccgccccaccagaacggtttgctctttgcttgctcgacccattataacctctcaggagcaactggagagtctctaggccacactagcaccttaggtgacactgaaatgtttcacggtgatatgggacagctagaaggctttgccagacctaacgtttttggcggtgttgactacttgagttcaacaggttcattccaagccatgtctatacccgattttcaaggtatgacgttgcatgatgttgtcgatggctcatctgaacacatctcaatgattggagataacctcactgacgaacacgttgatggattgtccggtttctttcataaatttctggggtag

SEQ ID NO: 301295 - DNA, 813 bp, Proteus mirabilis
atgagccaagcgggaaaaatggtcaaagcggggcaagaagttcgctttattgacattccagcggatgctggaaaagggttaggtctttttgaagaacttcatggtttttctgatgcggcaagttttgccgaaatgttaaatagcaatagcaagcagtaccacggtgtcgcttccagagcgttcttgaaggcgttagcgggtaataaggttgagtactcgataaagctaagggagctgatgacagcgtttttacaatatgtacccgataatgcggatggacagataaaacgcgctgcaaatcggtttgctctcgttgcggcagcgggagaattggcggcaaacattactggctgggaagagggcgaggcttttcgtggggtaaaaacctgttttgatgcatggctgttagaaagaggcgaaggctcacacgaatctaaccaagcacttgaagttgttagaggccgattactcaaatggggagactctcgatttggccaaaatacgaacggaccagtctggggttgtaaagatgggaatgacttttgggttttccctgaatcgtttagaaacgatatttgtcagggactcgaccataaaagtgttgccaacatattggttaaattaggatttttacctcaaaagtcatccgtaactaagcggttgcggggtggtgattctcaccgcgtgtacccaatttccgggcgaatatttgatgctggacaggcggaagaacaacagccctatgttgtatcagggacacacttaggccaaagcgatgaggagagtaaggtactggaaagctatacagtttaa

SEQ ID NO: 301296 - DNA, 1689 bp, Proteus mirabilis
atgacgacattaaaactcccccactacctttaccaacgtgctaatacgtggtggtttcgtaaaaccatcccgactgtaaacgctcgccatgacatccggctgagcctcaaaacaaagcaactgcatgcagcccgatcattagccttaatcctcaatagtcaatataatcactggaaagcccaatattcaggaagcccgaaaatgaccaaggaacacattgccttttttcagcagcaactcaagttattagtcaacagatggtggcagcgtgaaatggatgattttcatggcaaccttgataagggaattgatgagctcaatgatttacagcacgtcgcaacggggcttattgagtttcatcacaagcgtattattaaaaaagagtatcgagataatgccaaaaaccagagaatagctgccacgttattagatgaaatccaagagcaacaatcggatatcacctctaacttaaccgaacaagactatcagcaactggctcttatggttgaccaagcgtctttgcagcactatcaacgactcaatacgtatttatcaaacccaacaccagactggttaaacgcacccacaacctttgaggttgaatcaatcattgatgataaaccacgttaccccctatctaaactgattagcgaatatcaagaagaaagccagcaaaaaggacacagtcaaaagacccaaaataagtatgctcaatgcctcgccttagcaattagctactttggtgatgtgcttgttgatacgatcacacccgagcaaggcagacattttcgagagtgcttaaagacatttcctcttgggattaaaacaaaagagatgctggcacagccactgagtgaaatcataaaaaaacatccacgtactcaaatcatatcggtggaaacggcgaattcacacctacaaaaagtgtcccagttttttgattggatagtgtccttagggtatttaacctacaatcctatccctcaagagccgcttccggctccacgggttaaccataaagacgatagagccgtcatcactgacgaggaagctatacaagtttttcagcatcccctgtttacgatgcatcaaggcgtcaaaaccaaaaagatacagcagccttaccatttttggttaccgctattgtgtttatttacgggtatgcgccccggtgaagcttgccagttattcactaatgacattgaaaaggtgaatgacatttggtgtattcgtgtggataaccgatatgaaaaacagcggttgaaaacaccaaatgccaaacgctacatcccaatccatcaacaacttattgatttaggcttcttggtatttgtgaacgataaggcaggtcaagatagccaaaacactcgcctattccctgaaattatgctcatccaagattctttcgccaccaagcccggagaatggttcaaccgtaatttacgagaccgtcgatctctccccgagcacgttacactctacagttttcgtcattactttagggataagctgctcgcactgcatccgtctgatgaatatttgaataagattatgggacatcaaaccagttcttacggtaaagccttaccaaaggaacaacaagctatgcatgaactggttaataagctcgatttttctgccattattgttcaggtaaagccttatgaaacgttggatatcttccactaa

SEQ ID NO: 301297 - DNA, 249 bp, Proteus mirabilis; identical to SEQ ID NO: 298050

SEQ ID NO: 301298 - DNA, 483 bp, Proteus mirabilis
atgaaagaaaaaggaatattagatcttctttctgcgatagagttaataaaaaataaaaatattagttttgatttagctggtgaaatggaaaataatttaaaagatatattaacaataaaaatccctaagctaaactgtaaatatcatgggattgttaaaggaaaagataaagataatcttttaagaaaagcggatatcctcatattaccatcttatgatgaggggcaacctctatgtatattagaagcttatagttacggatgtgcagttataacaacagatgttggaggtattagggatatatttaagaataatattaatggaatattttgccaagttaacgatccttcatctatcgtagtagcaatagataaaacaataaataatttaaatcactttaaactaaaaaatagaaaacttgcagaagaaaaatattcaacccaaaaatatgttgacaacctattaaaaataattgaagagtaa

SEQ ID NO: 301299 - DNA, 1020 bp, Proteus mirabilis
atgtttcataaaaaaacactattaattactggcggtacaggatcttttgggaatgcggtcctaaatcgctttttagaaacagatataaaagagatccgtatattctctcgtgatgaaaaaaaacaagatgatatgcgtaaaaaatataataatcacaaattgaaattttatattggtgatgttcgtgattattcaagtattttaaatgcaacccgtggtgttgattttatttttcatgctgcagcacttaaacaagtaccttcatgtgaatttcatccaatacaagccgttaaaacaaacattttaggtacagaaaatgttttagaagctgctattgctaatagtgtaaaaagagtcgtttgtttaagtacagataaagcagtgtatccgatcaacgcaatgggcatatccaaagcaatgatggaaaaagtcatggttgctaaatctcgtaatttagatagcaataaaaccgttatatgtggaacacgttatggtaatgtaatggcttcgcgaggctctgttattcctttatttgttgacttaatgagagaaggaaaagcaattacaattacagaccctaatatgactcgctttatgatgacattagaggatgctgttgaccttgtattatatgctttccaaaacggaaataatggtgatatttttgttcaaaaagcccctgcagcaacaattgaaacattagctatcgcattaaaagaactattaaatgcaccagaacatccaataaatattattggcacacgccacggtgaaaaactttatgaagctcttttaagtagagaagaaatgttagcagctattgatatgggtgattattaccgtgtcccaccagatttacgagatcttaattatgataaatatgttgaacaaggtgattctcgtatttctgaaattgaggattataactcacataatacgactagattagatgtagatgaaatgaaaaagctattattaaaattacctttaatacaaaaattacataccaataaaatttaa

SEQ ID NO: 301300 - DNA, 1101 bp, Proteus mirabilis
atgaaaatcctagttactggtgctgatggttttattggcaaaaatttatgtgttcggctagaagaaaataatttcgaactaataaaaatagatcgtgatagttctaaacatgatttagagctaggtctaataaatgcaaactttatctttcatttagctggagtgaatagacctaaaaatgaatatgagtttcatgaaggtaatgcgtctttaactgaagaaattactcattttcttattaaaaataagaagaaaacaccaataatgctgagttcatcaattcaagcaaataatgataataaatatggtgagagtaagaaattagcagaaaaccatatagaaacatatggattaaaaactgatgcaagctattatatttataggttaccaaatgtttttggtaaatggtgtagaccaaattataactcatttattgcaaccttttgccataacatcgcaaataatattgatataataataaactccccgacagctaaagtttcactaatttatattgacgatctatgtaatgaattaatctctctattaaatggcaataataaggtaggctttcaaaatatttcacctgtttatgaaactactgtcggtgaagttgctgatttactttatacctttaaaaatagtcgcaatacattagttacagaaaaagtaggtgttggttttactcgagcactatattctacttggctaagttacctaaatcctcagcaatttgcttattctgttccgcattatggggatcaaagaggtattttctgtgaaatgcttaaaacacaaaatagtggccaattttctttctttactgctcatcctggtattactcgagggggacattatcaccatactaaaacagaaaaattcttagttattaaagggaaagctttatttaagtttgaaaatattattacaggtgaaaaatacgagctaactgtttcagacaacgagtataaaatcgtagaaacagtgccaggttggtctcatgatattacaaatattgctgatagtgaattagttgtgatgttatgggcaaatgaaatttttaataaagaacttccagatacaatagcgagacccttgtaa

SEQ ID NO: 301301 - DNA, 1131 bp, Proteus mirabilis
atgaaaaaattaaaagttgtatccgttgttggtactcgtccagaaattattcgtttgtctagagttttaataaaattagatcaattttgtgagcatattattgttcatactgggcaaaattatgattacgaattaaatgagatttttttcaatgacttaggtgttaggaaacccgattatttcttaaatgcggcaggtactaacgctgcagaaacaattggcaatgtcattataaaagttgatcaagtcttagaaaaagttatgccagaagccgtacttattttaggcgatacaaactcttgtatttcagctatacccgctaaaagacgtaaaatacctatttttcacatggaagcaggtaatcgttgttttgatcagcgagtacctgaggaaactaataggcgtattgttgatcacacggctgatatcaatttgacctatagtgacattgctcgccaatatcttctttccgaagggatacctgcagaccgagttataaaaacaggtagccctatgtttgaagtgctttctcattatatggaacaaattgataactctaaagtattatctcaattaaatttaaaatctggagagttttttgtagttagtgctcatcgtgaagaaaatgtcgattctccaaagaatattatgaaattaacaaatatattaaatactgttgctgagaaatataatcttcctgttatcgtctctacccacccaagaacaagaaaaaaaatcgatgaccatggaattacttttcatagtaatattcaattattgaaacctttaggtttccatgactataatcatctacaaaaacatgcaaaagcagttctctctgatagtggaacgatcactgaagaatcttcaattatgaattttcctgccattaatattagagaagctcatgaaagacctgaaggttttgaagaagcatcagtgatgatggttggtttagaatgcgatcgggtgctacaagccttgaatatcctttcagctcaacctcgaggaaatgaacgtttattacgtcaagtatcagactatagtatgcctaatgtatcagataaagttgtaagaataattcattcatacactgactacgtaaaaagagttgtttggaaagaatactaa

SEQ ID NO: 301302 - DNA, 1212 bp, Proteus mirabilis
atgagattagctctcatcattgatgattatttgcctcatagtactcgcgttggggcaaaaatgtttcatgaattagcattagagttacaatcactcgggcataatataaccgttattacaccagcagaaaatcaacaatatagtttatatgttgataatttagatggtattactgtttggcgttttaaaaatggtcctattaaaaatgtcaaaagaatatctagagcaataaatgaaaccttactttcttataatgcttggaaggcaatcaaacatttagttaataaagattcttttgatggaatcatttactactccccttctatattttggggaaaattagttaataatctaaagaaaaaatgtcaatgtccttcctatttaatattaagagacttatttccccaatgggttgttgatgcaggaatgttaaaatcaggctcattaattgaaaaatatttccgtttttttgaacaatactcatataaacaagcatcgataattggtttaatgtcgaaaaaaaacttagatttcttttatacacataaaaataataagtactataaatgtgaaatattaaggaattgggcaaatacttcagaaatatcgataaaaaaagaaggatatacttcaatacgtacttccttaaatttacaaaataaaactattttcttttatggtggaaatataggccatgcacaagatatggaaaacttgatgcgcttagtgaagaaaatgagcatttatcctgatgctcattttctttttatcggtcaaggcgatgaagttgatttaattaattcattagctaacaaatggaatttgagcaactttagttacttaccttctgtgaatcaaaacgaatttaaactcattttaaaagaaatcgatattggtttattttcacttgccgcacaccattcagctcacaattttccaggaaaattactgggatatatggctaaccatattcctattttaggtagtgttaatgtaggaaatgatttattagacctaataaatcatgaaaatgcaggttttattcatataaatggtgaagacgatgatttatttgaatctgctaaaaagctctatcttgatataacattacgcaaaaaatgtggccatgatgcttataaactattgtgtaaagagtttgcagtgacctctatagcatcaacactcatagatagattaaggttattaaaatga

SEQ ID NO: 301303 - DNA, 402 bp, Proteus mirabilis
atgagatatattgataatttatcgttagcgaatttatataaagaagcagaaaaatcagaacgattacgttcgcacttactattacatcaatctcatcaagataaagtacaacgtctccttattgctttagtgaaaggcagttatgttgaacctcattaccatgaactacctcatcaatgggaaatgtttgttattttagaaggaacaatagaagttactttgtatgatcacatgggatcaataatagagaattttttagcaggagaaaatactgacatctccattgttagcttagaaccaaatgaaatacatagtattaaatgtatttcttcacaagcattaatgctagagataaaagaaggtccttttgatcccaattatgctaaaaaattcttaacttaa

SEQ ID NO: 301304 - DNA, 204 bp, Proteus mirabilis
atgaatatctttggaagaaaaaatgaaaatggcaatattgatgttctatatgtagatgatgggtatccagttactaaaattgatgactcttttcctattgtctaccctgttgattcgaatttgagtgcatattatgaacatccagaaggcattaccttaacagaagaagatgctcaaaaaataggattggattttgatgaataa

SEQ ID NO: 301305 - DNA, 204 bp, Proteus mirabilis
atgaataatatagcaaaacaagctcgggatgaactcgggctttctacatctgaatttgcccgacaattgaatatttcgcgagtgacggttgatcaatggatacgtgaaatacggcaacctcctgcagttgcagttactgctattaatcagttgttatttattcacgaaaaagggctatacgaggaatataaaaaagcccgctaa

SEQ ID NO: 301306 - DNA, 516 bp, Proteus mirabilis
atgtcaattaaaacagttgaattttcgtgtgctcgttttgaaactactaatgattcatcagcatataaatatattgatgtttataattgttacttcaatggaaaagtagttatgtatcatcatggtgtcaacattggcactctgaattttattagcacaaaaaaaccattagatataagtgaaaaatcgcctcttgaaaagttagctgaaacatctagtgttagaaaagaaaaattaaatatagggtttgattttagtaataaaggcgacgaaacggcttatttaaaaaaagacttatccggatatatacataaacaaaattgcatagcggaagggttaaaagaattacaagctaaaaaacaaatgttacgcgagcaattaatagatgcagttaacaatgcacaaaataatggtttatgtgtagaccttattcatgatgaattaaaatcttttgcgcatgaatttattattgtctgcgaaaatttagaaattgattgtgacgaaataccgttttaa

SEQ ID NO: 301307 - DNA, 423 bp, Proteus mirabilis
atgaaatacttagcattaacagtaggattattattatctctaaatgtatctgcaaaaatgagtaactgtgatattgcaaaagaggcttttagagattcaacttcactaatgagtgatgttgttctttttgggatagattccaataataaacccaatgaatataattattaccatacatggtataaaaattattatcccaaaaaactcagcttaattaaaaacagatatgatccatatacaaaaaaattagacagtaacaatcctatatacttaggtattacatcaatcattcaagctaataatatagcaaaggccatggatttatatttagaggacaattctaacaaagataaattaaaagaagctaatagtttgtataattctatgtaccagcaattagttaaggattgcggaaaaatttaa

SEQ ID NO: 301308 - DNA, 738 bp, Proteus mirabilis
atgttcaaatttttatctaaaaaagacaccctactactagcggttatctctgctgcttcatatagcgcagcatatttatatgaatttagttatgcaaaatatttcaactatcctaaagaactcatcagcataagtttagtcaatttattaagaatgggattctctttttttatgcttatgcttttttccatcttcataatagacttttgcacaaaagcaactgatgcattaggtaagtatggctcaaatgtacgaaaagcatacgcaccaattacaatgggaattatattactaatatttctatatcttgcaggaatttccatatttaaatattacttaattggtatggcgatatttatagcattcctaatattgtctactttctttgaaaaaaagaaaactaaaaataatgataaaaatcaatctgataataaaaaaccaaaagggaatggcgacttatcagcaacaacaaaaattctatcattttttatgttattatttttttcttatggatttattcttgcattaggcacttataacgcgagaactacaacatcattttattactttactgttgataataataattacgcaataataaataaatttgatgataatgtgataacaaaagtaattaataaagataagaaactagaagatagtgtatatatttataaaagcgactcgcttaatagcaaagaaataaaatatatgaaagtaattgaagataataattga

SEQ ID NO: 301309 - DNA, 189 bp, Proteus mirabilis
atgagcagaaaaagtattggtataaataacgaccgttatttgaaaattgaacgagctgcggtagatatcacagccaaaactggaaagatcacaaaatggtctgacattgtaaacttcttgattgatgaatacttagcggaagctaaacaggatatgattgcaagagacgaacaaggatcaaaaaaataa

SEQ ID NO: 301310 - DNA, 195 bp, Proteus mirabilis
atgaacattatttattttgattacattgaaggattcggtatcaatgccaatttaggcgttgaatggaatttttaccgttcttttgatgaattggttaaagaatgttcttgttactttagtgataacttcattttagcgccaataacagcggaatcagggaattttattgggtatcaggagagttacaatgtctga

SEQ ID NO: 301311 - DNA, 1128 bp, Proteus mirabilis
atgtctgataaacaggagagatctgtgcttattgattttttagcattttctgcccctctttctgttatgaaagatgttcatacctttcaagaaaaaggttttgaatggcgaaaatttcaatttttaccttcatataaacactatcagcatcgtgatattacttttactcatagtgactatcaagatatacctgagattgctcattctagtatgactgatgaacagcgtaatcgttatgaaacagatttgatttcatgttatttctcccgtttaaaatcatggctttcatcagtatttggtttagtcatgggagcaccaagaggaaagggggggttcttttatcaagattcagcattactatatagtgatgaaggcggtgttgagcattttggcgttgttcattggggcggtaataaagactctttttatgttcagatttcaggtaaaggttgtgctcatgtttttagtggaacaacgccgcaaaaaattcatgaatggctctcttttttagatattactgatatcaaaaggatcgatttagcaacagatgattatgatggtatttttacttgcgaagctgcaaaactggcatatcaggatgatgctttttattgtggtaaaggacctaagccgtgtaaagatgaatcacttaaaacagatgctaaggggaacattaaaaaagaaatgttttctgtcgggtcaaggcaatcccgtatttattggcggatctacaataaagcggcagaacagaaagtttccggcgtttggtatcgctctgaagtggagttaaagaaagtttctattgatgttcttcttgatattacagggatttatgttggtttatgtgattatgcggcgcaaataaatccgtgtgagccacaatctattcctaaattattaggcagaaaagcggttgattctattgaagcaaaagtaagatggttaagaaagcaagcttctaaaaatattgctaaagtatttcatttttttaatggtgatattaatactgttttatccatgataatacgtgaagagcatattagtgatatgaatttacgatttgatattcccccgatatatcaaacattattgaatgaaaagctacaaacaaaccaatgtcctttttaa

SEQ ID NO: 301312 - DNA, 273 bp, Proteus mirabilis
atgattaaaatagaaattaatgatattgatggaaagctcaatagtaaacaagttgtatctaaatcaacaggtgaaatactaacatttcgtgaacaagttgcttatatttataatggtggtgtttatcctgaaaaatttattattcaactcgataaggatgcatcaccttatgcagcaggcttttatacattagatgatagttcatttaccgtgggggattttggtttattaaagattaagtcaattaaacttattcctattagcaataaataa

SEQ ID NO: 301313 - DNA, 240 bp, Proteus mirabilis
atgaaaactttcaaaatgaataaaacaaaattaggaataactttaatcacttttttatcatcaggtgtcgctttggcttctggggaaaaaagttcaggcgttgatttatcgtcgctaacaaatgcggttgattttggttctgtgcttgttggaattatggctgttgcggcatcaattatcacgctctatgcaggctttgcaggtgtacgctggattttgcggatggtgaaaggggcttaa

SEQ ID NO: 301314 - DNA, 1452 bp, Proteus mirabilis
atgcgcgtgggcagtcatactcggtttaaggggctaatgctcatttttcttattttagtaggaaccttttatcccatttatcgtgctcaggcggcgctgccgctattggctgcacgtgctgtcattcctgctattctagggcgaatcgtcgtgaaatgcgctatgcagacagcggcaaatgacgctgtttatttgaatttagtgaataatacaacacgagctatttctgcaacaacacgcgctaatgcggcatctgtcggcgcaaaatctttttttcgttcatcaaatggtgcgctaacatgggcaggcgtcggttattcatttggcgatatttcttctgagtatttcgctaataaaggcgatgtgatggttgcgacaacgggaaaatcgataggcaatgggcgttatgaagttgatgttggaggaaaaacctatatcaccgattttttgccttctgagtcgaatccatttattgcaacacccgttattaatggaaatataccgagttatactgtttctgaattaacatctaatatgcaatggtatatagttatttattcaacaccgaagcaatatattgtgggttcaatcgaaagtgtcgctcagggatattttcgttatgaagcagataagggttctcttaattgtcctgttgggaaaggattgtgtacttatgaatttcaagctaaaggaatagaaattaaccaaggaagcacatcgtatgttaaatatcaatataccgctttttataccgactcattaggaaatgaagcgagtcaaatttatactccaaatcaagctattcaggtttactacaacaaacaatatattcctgataatgactctattgataaacaatttatccttgccagtgatgtggatgggtttgaagcattagaaaaactcaaagaataccaacttgatttagataaattagcttcaatgttaaataacctcttttatcaatcagcgactcaacctgattatgacggtattccgattacttcatctaatcccattactgcgaatgaaattaaatctgtttatcctgatcatggaaaattaactgactttgatttgttatatccggctcaagtaaaacccgatggggatttagtgattaaaacgccgggaatttctacagaaacagggcaatcgggaaaagtggacttagatttaggggaatatccagaaatagatgaacccgatttagaagagccgccaacgggaaaagaaatattagcaccgattgaaaatttaatgccgtttattaaaaacattcaacttcccagtaaagaagcgagttgtcctgttgccgaatttaatgtattcgacacgcaatataaaattgactcccattgtccattgctagaacaaaataaagccttatttcaattaattgcaggggttttgtgggggtttttatctttacgtatcattttgagcgcataa

SEQ ID NO: 301315 - DNA, 288 bp, Proteus mirabilis
atgtttaaattactcttatcggtttttaattcatccttaaaattcgtgtttcgcacgctcattattaaatttgtcctttttttcgggctgtattttgctgtacatgaattagtctccgtcatgatgacatggttacccagtggctcagatttaccacaattattttctcaactccctgatagtgtttggtattttatgaacctctttttagtgccttatgggattacgttgctgttaagcgcttactttacgcgctttattattcgtcgtatcccactgattggttaa

SEQ ID NO: 301316 - DNA, 1056 bp, Proteus mirabilis
atggcaatttcagcgtatgtgggtgtaccaggcagtgggaaatcgtatgaggttgtaagtaatgtcattattcctgcgtttatgaaagggcggcgcattgtcaccaacttgtatggcatctctcaagacaaaattaacgcctattgcttggctcatcgtaaagcggatgcagattccctcggtgaaattgtttatgtcgataacgaacaagtgatggatgataatttttttccgtatatggaaaatgatgtgctggcagaaaatacattttgtcgctcaggggatttgatttgtcttgatgaaatttggcgcatttgggaaaacgataaaaaaatcccgaaaaaccatcgttcctttattgctgaacatcgacattttgatggagaaaatgggaacacttgtgatttagtggtgcttaatcaatcggtttcgggcttaccgcgatttatcaaagatcgtgtggaaagtacgtttcgtatgaccaaattgacagcattaggattgagaagtcgctatcgtgttgatgtgtatactggaattaagttattcaaatcaaataaagtcagttcttatcaatgcaaatacgataaaaaaattttcccgctttatcaatcacatgtaaatggtcagggtgtcgaacaggtcgtggataaacgacaaaatgtgtttagttctcccaaagttattcttatgctttgtgcatttcctattttactccttatcagtctaaattttctttatcagttttttacgcgatttgacgctaaaaatgaggttgatgtgcccgcagagcaagcaacatcacaacgtataaatcagacatcaaacaagagcattatttcaccatcaataccaacacctataccgccaccgatatcagagcaatggcgtattgttggcaagttggaaaaagaagggaggtcatgggtgattttaaaagacaaacaagggcggttacgtctcgaacctgcctctgggtttatgctcaaaggtagaatgcaagcgggtatcatcgacggaaaagttgtcacggtatattcaggggatggggcatga

SEQ ID NO: 301317 - DNA, 1221 bp, Proteus mirabilis
atgaaaaaattaataattgcactactttttagcggttctatcttcaattgttttgcaaaagggacggactttgaattacgaggggttgcattgcctgaagcgattgggttgatttatggcgaagtgtttaataaaccgttcatgcttgcatcagagttaatcaatgatgaccgaaaagtctattttcatatcactcccgatattgatgaacgggcatttattaatcgttatttttccaacatgaatattcgtatttggcaaaagaacggcgtggattacattacaccatttattcctaaagcgcctgaaattaaacgtgaatcttatatttatcaacctcgctttcgcagtgtggggtatctttccgatattttacgtgggcaatttgaagggcgttttaatcaacaaggtggaatagggagttactcaactactcagctcactgatgcacagccaaacagtgctaccgatttcatcaatcgacacggggatgttttagtctattacggtacaaaaaatgaaattgatcggatgaaaactattttaccgttaatcgatacggccaaagaggaagtcattgtttctgcatatgtttttgaagttcaaactgcagagcgtaacggttcaggattggcattagcggctagattggtctcgggtaaattcaatgtcagtatcggttatgaaagtggttttgataattttgtgcgctttaaaacggggtcattagatgcattgtatgaattattccgtacggatagtcgttttcatgtcgtcagctctccacggctacgagtgagtaatggggcaaaagccgctttctctgttgggtcagaagtccctgttttggggcaagtcagctattcggacaataaacccgttcagtccatcgaataccgttccagtggtgtcattttgagtgttcagcctgaaattcgtcaagatctgatagagctcaatattgatcagcaaatttccaattttgctaaaacggaaacaggcgttaataacagtccaacactaataaaacggcaagtcaacacacaagtgagtgttgcggatggtgacataattttattgggaggactcgctgaaaataaggtctcagaagctgaaacaggtttttcctttttaccgaaagattggtttacaggctcatcggatgagcacagtaaaacagatattttagtcatgttacaggtgaaaaaggtcagtcgatag

SEQ ID NO: 301318 - DNA, 288 bp, Proteus mirabilis
atgaatgaaaaaacacattttgttgctggatactgtatcgcaagaggatttcattgttcgctagtgtatgatagagtcgaaaacaggtggactaaaaagctgataaaatcaacctactttgatgatttaaaaagtgctgaattagtgcttaccgaaattaaagtaaaatggaaacaagccgaagtctatgaaatcattcatggtaaatacgataagagcttaggaataatgttacctggttctttagctggattgactcaaatgaagaaaatctttcttggaaattaa

SEQ ID NO: 301319 - DNA, 183 bp, Proteus mirabilis
atgaaaattgtttcagaaaaactcgcacaagatcaatttacacagcttaagttaaaaaatctaaaaactattctagctgaatcaattgcacaagcagatcgcggagaattacatagtattaatgatgtttttgcatccttaacgaaggataagcatgaagatatatccaattcgaatatttaa

SEQ ID NO: 301320 - DNA, 2247 bp, Proteus mirabilis
atgctgacacgtttgcgggaaattgtagaaaaagtggctatggcagcgagtctgccagaagcacttgaactattagtgaaagaaacgtgtcaagctatgcacacggatgtgtgttctatttatcttgccgatattccccatcgctgtttctatttaatggccacaaaaggattgaaaaagccgaaaggacgtgccgtcagcctctcatttgatgagggggtggtgggtgaagtaggacgtctttctgagctgattaatctggctgatattcgtgaacatcctaattttacctatctgccacaagtaaaagaggatgatctgcgcgcttttctcggcgtgcccattgtctatcgtcgtcagttacttggggtgctggtggttcagcaaaaagagcgacgcttatttaatgaaagcgaagagtcttttatggtgacactagccacccaattaggggcgatattgtcgcaagtgcaaacgaaaggattatttggacaatatcgtcaaagccgtattaaagccctatccgtttctacgggggtagtgatggcatatggttggcaagagatgtctcagccaaccttagatcatgtttttaaagccagcgcactggatataaaaagtgaattaaaccgattaacggtcgccttagaagatgcaacatcagagtgtcgccgttttagtaagcgctttatggcgaattcacaaaaagagagtgcggctattttcgatctctattcgcatttacttaacgatccccaattaagacaaaaaatgactggggttatacaacaaggctatgttgctgagtgggcagtaaaagtggtgatagagaagttttctgcacagttctcaagtcttaaagatagttatatgcgagaacgagcttcagatttaaaagcattaggtcagcgcttactatttcatttagatgatgatctcagtacgacaaatacatggccagatcgctttattcttgtggcggatgagcttagtgccaatctattggctgagttgccagaacaacaactggcgggggtgatagttcgtgatggtgcgactcattcacactcagcgattttagttcgagcaatggggatccctgccattatgggggcagatattcaaccggagctacttcacaaccgaatgctgattcttgatggttatcgtggtgagatttttattgaaccagaaccctttatcatgcaggaatatcggcaaattattgatgaagaaagagtattgagtcaacttgctgaagagcagcttgaacagcaagcggtattaaaaaatggtgaatccatcagtgtgcaattaaatgcagggctaagcattaaatatgaacaacgtattagcgttggcatagatggtgtcggtctttatcgcacagaaatcccttttatgttacaaagcggttttccttccgaagatgaacaaaaaaaccgttatcgtgaaatcttatcattttttcccaataaacccgtcgtactacgtgctttagatataggtgcagataaacagcttccttatatgccgataaatgaggagaacccttgtttagggtggcgggggatcagaatattacttgatcagccagaaatatttctgatccaactacgagcgatgttaaaagctaatcttgaatttaaaaatttgaaaatattgttgccgatggtgacaagtattgatgaaattgaagaagcgaaagcattgttactaagagcatgtgctgaagttagccgagaaatgaaatgcgaatgcattctaccacctgtggggatcatgcttgaagtcccctcattggtctttatgttaccgcaattagcacatcgagtagattttatctcgattggtaccaatgatttaacgcaatatttacttgcagtcgatcgtaataatacccatgtagcactgctctatgataatttgcatcctgcattactgcgttcgcttaatattattgctttagaatgccaacgttatcagttaccagtcagtgtttgtggtgaaatggcgggtacgccgatgggggcattgctactaatagggctaggttttcgtcagttaagcatgagtggccgtagtttacctagggtaaaatacttattgcgccatctagatcctgctatcttacagccttttatgcaacaggtgttgaaagctgaaacggcaatagagataaaaaaattgtctgctgattttatggaaagacaaggattaggtggattaattcgcggaggtatctga

SEQ ID NO: 301321 - DNA, 855 bp, Proteus mirabilis
gtgtctaaaaaaattattgctaccaacctattacttgctctccccttaagtctgttatcgttacaaattcatgccgcaatgacacaaaattcacctgataaaatcattgttaccgcatccccctcacaagatccgcaaggaccaatttcaggtttagtggcaacaaaaacactatcaacaaataaaatacttagtgatatagataagacaccacaatcaatcagtgtcattacacgcgaccagatggatgcgcaagatgtcagttcagtctctcaagcattgcggtatacacctggcgtattcactgaatatcgcggcagttcaaaccgaaatgatgaaatatttattcgtggatatagctatgccccccgttttcttgatggacttagttatggtatgggagcctcatcttctacaggagctattgacccttggctattagagagagttgagctgatccgtggcccgtcttctgttctatatggtcaattaaatccaggtggtcttgtggcaatgaccagcaaaagacccacttcaataaccattaatcatattcaagcacgtgtaggaaatgataaattagcagagacagcttttgattttgcaggctcattaagtgatgataatcgtattctctatcgccttaatggattagcaaaaacacaacatactcaaattaaagactataaagaagaacgatttgcccttgcccctgccatcacttttttgccaaatgagcagacacgtttaacgttattaagttttattcaacaagagcccgaagcgggataccgtaattttttgccagcttatggtacggtcaaaaaaaacacccgaaggcaccattccatttga

SEQ ID NO: 301322 - DNA, 288 bp, Proteus mirabilis
atggataataaacaacactatttagatatcgccgcagggcaaggaaaaaaagagccctctcgtatagtggcattccctgcacagccactaaactatgcattgatagaacaacgcctagaagaacagaccgaatacacagatggtgagataagctatcttagtgatgatcttgatgaaggttttttctatcattgccaacatggcgatgatgagctccattttttatctgtctgctaccacgatcagaagattatcaaatacgtcctatgtatgcgacagatgagatga

SEQ ID NO: 301323 - DNA, 174 bp, Proteus mirabilis
atgacagaagcaatcaaaattttaaatcaccaagacaaagctggtagcaactgtgcattgatgtttaatgctcaagtttgtgaccagcttttttgttttctacagcgcaatagagtctgtgggaggctcaccttattttctagtcaaacaatgattgatctgatgactttttga

SEQ ID NO: 301324 - DNA, 1002 bp, Proteus mirabilis
gtgattgacacacagttgcctttaaccgatttgcaccgccatttagatggaaatatccgtccggaaacaattttagatttagcacaacaacataatattgccctacctgcctatgagctagaaacattgcgcccacatgtgcagataactaaaaatgagcctagcttagtgagcttcttacaaaagttagattggggcgttgctgtactcgccgatttagacgcttgtcgccgtgttgcttatgagaacgtcgtcgatgttgctaatgcaggtattgattacgcagaattacgcttttcaccttactatatggccatgaagcatcaattaccgattgaaggtgttgttgaagcaattattgatggtgtacaaagtgccttacacacttatgatgttgagatccgtttaatcggcatcttaagccgtacttttggtgaaaatgcctgccagcaagaattaaatggtctattaaaacatcaagataaaatcaccgcacttgatttagctggcgatgaattaggtttccctgggcatttattccaacctcactttaaccgtgctcgtgatactggctggaagatcaccgttcatgcaggtgaagcggctggtgctgaaagtatttggcacgcgattaaagaattaggggcaagtcgtattggtcacggtgttaaagccattgaagatccccgtttgatggattatctcgcagagcaccaaattggtattgaatcttgcttaacctcaaatattcaaaccagtactattgcctctttagcacaacatcctcttaagaagttcttagagcacggtattatcgcctcactcaatactgacgatccggccgtggaaggtattgagttaaaacatgagtatactgttgctgctcctgcggcgggtttaaccgcagcacaaattcgccaagcacaaattaatggtcttactatggcttttattagccaagctgaacgtgatgcattaattaaaaaagtgagtttaggttaa

SEQ ID NO: 301325 - DNA, 1398 bp, Proteus mirabilis
atggcagccactcgcattgaaaaagactcaatgggacaaatcgaagtaccagctgaccagttatggggagctcaaacgcagcgttctctagaacacttccgtatttcagtagaaaaaatgcctgttgcactgatccacgcgcttgctttaaccaaaaaagccgccgccggtgtcaatatggatctcgggttattacctaaagaacgtgcagatgcaattattgctgctgctgatgaagtgctggcaggtaaacacccaactgaattcccattagcaatctggcagaccggttctggcactcaatcaaatatgaatatgaatgaagtgttagctaaccgtggtagtgagatactaggtggtatccgtggcatggaacgcaaaattcatccgaatgatgatgttaacaaaagtcaaagttcaaatgatgtgttcccaacggccatgcatgtcgctgctgttatcgcattacgtcaggatttactgccggaattaaaatcattactgaaagtatttaaagagaaagcagaagctttccatgatatcgtcaagattggtcgtactcacctgcaagatgcgacaccacttacattaggtcaagaaatctccggttgggcggcgatgcttgagcataatatcaaacatatcgaagattcagttcctcatgtgtgtgagcttgcgttgggaggaacggcggttggtacaggattaaatacacatcctgagtacgcagttcgcgttgctaaacgtatcgctgaattatcaggtcagccatttgtcacggctcctaacaaatttgaagcattagcaacctgtgatgcactggttcattctcatggtgcgttaaaaggtttagctgcctcattaatgaaaatagctaatgatgtacgttggttagcatctggccctcgttgcggtattggcgaaatttctattccagaaaatgagccaggtagctccattatgccaggtaaagtgaacccaactcagtgtgaagcgttgaccatgctgtgcgctcaagttatgggtaatgatgttgctatcaatatcggtggtgcttcaggtaactttgaactgaacgtatatcgcccaatgattattgataacttcctacaatcagtgcgtttattggctgatggtatgcgtagctttaacgagcattgtgctattggtattgaaccaaaccgtgagcgtattaataaattattgcatgagtctttaatgctggttacggcattaaatacccatatcggttatgacaaagctgcagagatcgcgaagaaagctcataaagagggcttaacgctgaaagaatctgcactgaaactgaactacctgacagcagaagaatttgatagctgggtacgtccagaagatatggttggtagtatgaaaaaataa

SEQ ID NO: 301326 - DNA, 930 bp, Proteus mirabilis
atgagcaaatatgatgcaatacagcgatttaatctctgttttcaacaacttgaaacagaaatcaatgctcttaccgattttcttcgtcagttaaagcaacttccttctgcggtttttgaattacctgaggtaagtaaagaagatgaacatgatgagataacaaatgttacagtgtcacctagttatgatctcgatgctttagaactctctttaaaattaatgaccaatctctttatctatgataatgccccacatgtcagtagcaagcgtgcgatacgtttaccgggggtactctgttttagtgtcagcaatcctgtatttaagaatgtaaaaacacaagtagagagcattaattcattaaaaaaacaactttcagatattgtgacgaaagagtctggtatttcgaaagaagaacgttttgattttgtccataatcagctaaaaggcttaattacacttaatgcttatcgcaccctcaccctactttctgatcctgatacagtacgttttggctgggccaataaaaacattataaaaaacttaactcgtaatgatgtgttagctcagctagaaaaaagtcgagaggccaatcgcgccgtacctccttatactagtgaacaatgggctgaacgtattgataaagagataatgaccctttcacaactcccggaaaatgccaaattaaaaattaagcgtccagtgaaagtccaacctattgccagagtttggtattcagaacaacaaaaacaggtacaatatgcttgtcccctaccattattagctttttatattgataaagcgtcggactttaagcccataataggtgaattagctgattatgatgtgaataatattcaaattcgccatcgccctaaagccaaaaagttacaattaattattccacgcttacatttatatcttgaaaaataa

SEQ ID NO: 301327 - DNA, 144 bp, Proteus mirabilis; identical to SEQ ID NO: 297050

SEQ ID NO: 301328 - DNA, 1266 bp, Proteus mirabilis
atggacactcatgaaataagcagtaaaaacatggccctaaaagaagatgtttctatcaacaccacttctaaaccaaacagtccgaaacactatatccagcgtgatgacgcgctttatataaaagtgacagtgtcattttttatggttggtttagccacttttgcattactctactttgtgcaacctatcttacctatcctatcaaaagaattttcagtcaccccagcaaccagtagtcttgctttatcgctttctacaggtcttatggcttgtggtctattgattacagggcctctttctgatgcgtttggtcgaaaaaatgtgatggttattgcgctattttgtgcggcttttttcacactattaagtgccatgatgaatagctggacgggaattttaattacacgagcactcgtagggctatcacttagtggtgttgcagccgttgcgatgacctaccttagcgaagagatccatcctgcttatctagccttatcgatggggctttatattagcggtaactctattggtggtatgagtggccgtgttattactggtgttttgagtgattattactcttggcgtgtgtctgtgattattttaggtatttttgcccttgttgctgctatcattttttggcgaatattgccgacatcacaacatgttaggccagcaaccttaaaaccacgtaatcttcttatcacaactaaattgcattttagagataaaggactccctcttctttttattgaaggtggcttgttaatgggagggtttgtaactttatttaattatattggttatcgcctattagatgcaccttattcattaactcaaacaaccgttggtttaatttcaattgtttatttgagtggaacttatagtgcatcgaaagcaggcttattaaccaataaatatggattaggtaaagtgtttattgccggtgtttctatgatgctagcgggtatattaattacactatttgactctctagcaattatttttataggtatgcttattttaactacaggtttttttgctgcccatgcggtagcaagtagttgggttggacgtcgagctaaacgaggacgtgcgcaggcctcttccctttatctatttacctattatgcaggctcgagtattgcgggaacactaggtgggatcttctgggtcaattttggttggcttggtgttggtttgtttattgcttttttaatgttaaccgcactattaatcgcactgcgccttaatcaaatagcacaataa

SEQ ID NO: 301329 - DNA, 915 bp, Proteus mirabilis
atgaatatagaacttcgccatttacgttattttattgctgttgctgaagaattacattttggtaaggcagctgagagattaaatatttcccaacctcctttaagtcagcaaatacaagccttagaaagtgagataggggctcgtttactcgaaagaaccaatcgttctgtttcgttaaccccggcaggacaaatgtttttaaaaggatcctatcaaattatggcacaagttaaggcggtagcgacacgagcatcaagaatggaaaaaggagaattaggtgaaatttcaattggttttacctcaacaacaccttttatgcatttggttacgttaagtttgcgtcaatttagggaaaattatcctgaagtcggtattcatatgcatcaaatgaataccaaacagcagatatcaccattattaactggccacatcgatttgggaattatgcgtaatacggtgttacctgataatttgcaccaccagctcctatttcgtgaaccttttattttggcagtttatgaagggcatcctttacttgcatacaaagaaacaggcgtaaatattcaagatattgggcaatatccttttgtattttttgagcgagatgtaggaacggcgctttatgatgaaattattcaattgcttagccttgcgggaattacaccaacgatagcacaggaagccggagaggcgatgaccatcttggggcttgttgctgccggattagggatttctattgtgacaaaatcatttacccgcatgaaagttgatggtgtgcattatctgcattttgctaattcgaatgctttctctgaagtatggttagtttctcataacaaacgaacgatccccgctgcggccaacaggttgactcaattattgctaaaaaatatcttagaagatcaaaaatcttga

SEQ ID NO: 301330 - DNA, 1212 bp, Proteus mirabilis
atggggatcccgcctagccatattgatcatgtaaaacaatttaatcttggcactgtttttcgattaattgatgaacatggtcctatttctcgtatctcattatctaaaaaagcaacacttgcgcctgccagtattactaaaattacgcgagaattagtcgaagcacaccttattcatgaaacagaatttcctgggttgggatttcggggacggccggctgttggtttaaagttagagagcaaagggtggcaatttttatgtattcgagtaaataatggtagcctactttttagtttaagagagcttgataatcaattagttgttgaagataccttcgactttcctaaacaaaatagtgatgcttttttgcatcatttccttgctgcaatagatacattctttcaacgttatcaatcaagagtagagcgccttactgcaattagtattaccatgaatgcaattgttgatccgattagtggcgttatttatagctctccttactatgctatccaagatattccgctggctgataaaattcaggaaaaaacaggtgttgctgttttcttacaacacagtgtaacggcttggacgatggctgaatcactctatggtgcagccaaaaataacaccgatattctgcaaattgttattgatgatattgtcggtgcaggggttgtgactaatggaaagacattacattcaaacagccatagtgccgtcgaaatagggcatacaaaagttattgattcacagacgcaatgttattgtggtgcaacagggtgtttagaaacggaaatatcgatccctcagttaattaaaaaagcacagcacttggcgcaagaaaatcccacctcaatacttaatcaatatccgattacggtagaaacgttatgtgatgctgtattaattggtgataaacaagcattagacataattaatttagtggcgcaacgacttggttttattttagccgtgatggtcaatatttttaatcctcaaaaaatattaataggttcacctctgtgtagagcaaaatctgcacttttccccctgatccttagtagtatccaacaccatgtattacctagatatgcccataatttggttattgaagaaacagaattgcgcaataaaggcacattgccagcggcatcactagtaaaagaagccttatataatggctcattattacttgagttaatgcaaggctaa

SEQ ID NO: 301331 - DNA, 672 bp, Proteus mirabilis
atgttaacacgcttgtttgttacggggacagataccaacataggtaaaactgttgtcacccgagcacttcttcagtcaataaatcgtggcgggacaacagcagtgggctttaagcctatcgcaaccgaattacatgaaacggttgagggtaatcgtaatcgtgatgctcagattattcataattcctcacctattgacgctcgctacgacgaaattaaccctattttgctagaaaattgttatgtaagtgaaaatgcaatagacttccatcaaatttcaagtgaactaaataatttgggccaaaaagctgaatgcgttgttatcgaggggaatggtggttggcgctatttacttgatgataatactttttattcagactgggtggctaaagaaaaaattcctgttgttctagtggttgggatccaacctggttgtgtcaatcactcaattctaaccgcgcaatctattattaatgatggtttagaattagttggttgggttgctaatagaattaatcctgggttaccgcactatgcaaaaattgtagaaaggttatctcagcatattccagccccattgattggtgaaatcccgtatttattgcgccctgaagaacgtgatctctcttgttatcttgacttaagccagttagaaatcgctcaacccgcttag

SEQ ID NO: 301332 - DNA, 237 bp, Proteus mirabilis
atgaaaaaatatctatttgcagtactggctacattgttcgcatttgcacctttagccgcaaatgctggatgtgatgaagtcgttcaagatattcaacaaaaaattgaaaataatggtgttcctgcggctaactttaccctaacagtggttgaaaatgatcaagttgcacagactgaaggtaaagttgtaggtacttgtgaaaatgattctaaaaaaatcatttatactcgccattaa

SEQ ID NO: 301333 - DNA, 357 bp, Proteus mirabilis
atgataaatacgttaactaagaaacaagcaacaaggactctgctgttttcactatttcttggtttatccgtgtcttctttttcttctgttgcagcttcaacaaatgtaaccattaatggcaatggctatgataatgttttagataaagagcaagctcgacaaatgaaagaagattgggatcaaaaacgcgatctccgtaataaaatcagccaacgcgaaaaaactgagtttaataaaatagataaagctattgatgagcgtgatgcttgtttaaaaagcgccaatatctatgcttactgggagccagaaacacgtcgctgtttagacagtaatactggtcgcccaattaacccttaa

SEQ ID NO: 301334 - DNA, 750 bp, Proteus mirabilis; identical to SEQ ID NO: 299319

SEQ ID NO: 301335 - DNA, 222 bp, Proteus mirabilis; identical to SEQ ID NO: 296465

SEQ ID NO: 301336 - DNA, 492 bp, Proteus mirabilis
atggaatatttaaatacaaaaattattatcggtagttcaatcatcgctttagcaacactgtattttgctatttatttaatactatatcttattaaatgcgttaggactcaaacgccttttactttaagaaaaatatggaaacaatggttattgagtagtgttattggtctaattggtgcttatattgtacaacttggtgataatcaaagaagaagcgaatttaccaaagaagaggttagctttatgaatgaaaataaagcatatagccaatttacctcggcagacaaagatctcgcgtcaaaaataacccataaatgtacttacaattcagatgctgtatttgaacaatgtttaccaaaaatactgacttgggaagcaaaaatttatcaatcatataatgcacatcgtaaaatttctgatagtgaagcaataaaatatacagaagaagaattacgcgataagcataattactggatcaacaaaaaacgctaa

SEQ ID NO: 301337 - DNA, 612 bp, Proteus mirabilis
atgtcaactcaaactttaaataacgcaaacgcccatgagcatcatgggcaccacgatgcaggagcgacgaaagttttcggcttctggatctatctaatgagcgaccttatcctgtttgccagcttattcgccacttatgcggtgcttgttaacgggattgctgatggtccttctggtaaagaaatctttagcctgccttttgttttagttgaaaccttcttactactgtttagtagtatcacttttggtttcgccatgcttagcatgaataaaggtagtgttagccaagtcaatctgtggctattcgttaccttcttattcggtttaggcttcgtggtaatggaagtgtatgagttccatgaacttatcgctgaaggttatggcccagatcgcagtgcattcttatcggcattctttgccttagtatcaacacacggtctgcacgtaacagcgggattagtttggattattattatgatgatccaagtatcacgccgtggtttaactgatgttaatcgcacccgtttaagttgcttaagcctgttctggcacttccttgatgttgtctggatctgtgtgttcactgtagtttatctgatgggagcgatgtaa

SEQ ID NO: 301338 - DNA, 405 bp, Proteus mirabilis
atgggaatctttggtaaaataaaaaaagaaaacagtaatgatgttttgcttgtgcagatctattgtaaagcaatgaattgcgttattactgattttggtaaaggagttacggttgcattgttaagagagggcaattcctcaggtaaaatagcattacgatttgctacttactgttttgcaaacgttgtacgtcaatctttaatgaatgatattgagaaaaaagtttttgttcatgatgtgaaattcctattacccctgctaaggggaataggagatatttcggatagggatattattcattactcagatatgctaggtaatatagaaagtgggaatgaaacatttctaggcttagtcttatctgacagagttatgttacagggtgatattgtttctttggcttaa

SEQ ID NO: 301339 - DNA, 3087 bp, Proteus mirabilis
atgccaaaggttcctacatacgataatagaacggttatgcctgagcagttaccgaataatgggttttctgttcaatcatcacctgatacttttggcgctggctttggtcgtgttggtgagcaatatgttggtttatttgcagaagcaaaacaaagagccaatgttgcactggcgcaagatgccgcactacagctacgacagaaagccaacgaactgatgaccgatccacaaaatggattactttctcagcaaggtaaaaatgcgattggcaaagcatctgagtatgaacagtcatttcgtgattatgccggtgaaatatcatcaacactgcctgacgatattgtgcgacaaagctttatgcaacaagcgcaagaaatgggggttcagtttgcatcacaagcgaatcgtcatgagatggggcaaatcaaagcttatgaacaagatcagtttcaatcaacgttaacattaaatgcagagtctgccgcatcaatgtacggcgataatcaggcttatatttctgcacataaacaagtgtttcagcaaatagaagagtttggattatcacacggttggggtgaagagcagatcctcgccaagaaacaagaattcaaagtagcgactgcacgtaaagcgattgaaaaccaactcggtgctgattatatggggttcttagaacgaaatggagaaccttcaagccttggtggtgctaccagaaataatgcattctatggtggtactgttggtaaagttaaaggaatgaaccagcagggtaatattaacttactcaatagaccaacagttaaaaatgaagacggctcaattagtacagtaagaacgatttctattggtaccgatgatggcgaagtgctgatacctaccgtaagtgatgatggtaagctgttatctgatgatgaagccattgcgttatacgagcaaacaggtaagcacttaggaatttttgataaccctgaagatgccactgcttacgctgataatctgcataaacagcaagagaatatgtatacacctagtaacggtgatacaagaggtgttagaaacaacaaccctggtaatattcgtatatctagcaataaatgggtagggcaaaccggtgatgatggtgcatttgctaagtttgccacacctgagcacggcattagagcattaggtaaaaatctactttcttatgctcgacaagggtttgttacaccagagcagatcattaatcgttgggcgccaccagaagataataatgatactcaggcatacattgagtatgtatctgattacctcggtgttgcacctaatcaaccattagatttaacgaatctcgataccttaacgcatttatcgacagcgataatgtataaagagaatgggcgtaaccgtgttaattacactgatgagcagatagcaacaggcatacagtcagcacttggtttttttgagttacaagcgacatctgaagcaccaaaactattaactggatctgccgctttcgatgccttagatgaagctgaccaagcaaaatatttacgacaagcagaacagttacgtaagcaaaaacaaggtgagttacagcaacaattcggtactcgtgtcgctgactcttacgcagcatgggaaagaggacttgaagcacctaatgcgcctactcatgatgaattaatctctgcgtttggctatgacaaaggttctgctatgtctgccgatatgcaagaagccaagcgttatgctggttttatgtcagcagctaaagagatgtctccacaagcacagcaggctttgttatctcaaatcagaccacaaacgggtgaagcaaactacgaaagcaaaattcaacgttgggagaaatttggtaagttcgttgaaggtaatatcaaggaacaagataaacagtttgccgctaaccgattacagctttccattcaaaataattttccgcttgatcctaatgataagaacaatcagcaggcagcagatgattactttgaacaacatattcagcagagctttaatttacgtgatgctaatagcttaaatgccgttgccgaacttacagcaagaacagggattatcccatcacaagttaagtctgtattgaatatgggggcaacatctaaagatcctgaagttgttcttcctatcgcgaaaatgtatgggcagatatttgataacaatccggcctcagcgactgacattccatcaagcacaatggcgtattactcaaaagtatatagtttaagtcgtgcgggtatgcctgatgataaagcggtagaaactgcatttaagacgacatttgaacaagatgaacgcactaaacaaatgatcgcttctcaaatcagagataaaggatatatcaaggatagagataaagcggcgcaatctaatatcaatgatttttacccttggtataaaccattttcttcaccaaatgtcagtaagcctagtacagaaaacaaggcttacttacgtgactatcaaacactgtatgacgccaactttgctgaaacaggcggtgacgcagaactggctaagaaaatgaccaacgctcaaattaaaaacacatgggctatttctagtattaatggaaaagatgaagttatgcgttatgcaccagaagctatttttaaaattaatgaatcaggctctggtaattggataatcggtcagtgggaagaagagaaaaagcaattagcatcaaagatgtttggaggaatgcctaatgatacagaaattattttagtatctgatttggttacagcaagggatcatagttatgccgtcatgattcgccaaactggtagtgatggtgtacctacagatccttataattatttgggtgatagcggtttacctattcgctttaaacctgagcaatcatcttcaccaatgtataaagcaataatggaaaaacgtcagcaaggtattaaagatgccgaagcgaaaagaataaaagataaacaaagagaacaatcgcaggctgaatatgaagaacatcgtgaaaatatccgtgagcaatataaagaagctcacaatgagcgagtaaataaattcaataattatttttcttgggataaaaactga

SEQ ID NO: 301340 - DNA, 888 bp, Proteus mirabilis
atgtcatctcttttttctgaaatacaaaccgatattttaaatccagaatcaaacataactgatattttacgcaaatgcgcggtactggcatataaaattaataacgacgtttttatcaaatggacagacttggaattggaaggatatgaagattctgatgtccttcctgattatcgtataattggcactgtaattcgtggtgattttactgatggatttagagtgaatgctccaggaatggcaatagataaacatcttattcctaagtctttacaagatagctttggatcagggaaagtatattacccagcttcatatctcgaaagtttattattttattctggtgatgaagatcctaggcgagatatgcctatgtctgtactgtacaaatttaaagatttatatagtggacttttttgtatcagagcatatgaaatattgcctagaatggggtgctatagtgttgttgattctataaagaataaaatactaaaatttttattggaaatagaaaaaaagattgaaaatatagaggatattaaattgtcaaaagaagatgagaaggcgattactcagacttttaccaatcacatttatggcaacgctaatattgctaatgctagtgaaaattttaaccaaaatatccagcttccatctgatgaattaattaataatttattatctgaactgcttcaattaaaggagcaaggtaaggatgtggatactattaatactgttattccacaaattgaagaaatgaaacaaattaaagaccaaaaaggcataatggataaattggctaatgtaatgaccattgcaggtggtagtgcctcggtatgtagccttgttgcacaatatattcctgctatttcaaaattaattggctag

SEQ ID NO: 301341 - DNA, 195 bp, Proteus mirabilis
atgcagggaactaattgggttaagtgctcagataaattaccagaagtaggacagagggttcttattgctactgattatccatctgtttatgaggcagcaagatatttcggtaataagtttaatagattcggtcaagaagtaacagcaacccactggatgcctttgccacccccaccaatgccagagggtgaataa

SEQ ID NO: 301342 - DNA, 630 bp, Proteus mirabilis
atgagtgaaatatcacatttggctatagataaagatattgtgacaatgggaacgacaattataaatatcgtttatttggtaattggtggtgcgattggttttctcactaaatatttctatgaaagtaaaaagattaaggaaaataaaaaagccgttcgccaacaaatgataacaaataatattgcaccaatgcggcaagcttggattaatgatgtaagaaagatttcttctgaattctcattctccactattaaaacaaaaggtatgattgggctatatatttctaaaatgaataaatttaatcctgatacactcgatcacttacctagtgatatagtcgaattagaaaaaatgatagataaagaaatacataaattgaatgagatgtgtacgtatatagacctactcttaccatctaactcaaataaaaaaaatgaatatagagcagaaatggttcgaaagtctatgatattaacatgtaattattttaataaaattatttcagaaaagaaaaacataaaagaatatatagaaataatttttaaaatacatccttatttaaagctacatactaagaaattactaaaaaaagaatgggatgaaacaaaatctcttaaagaaatcgaataa

SEQ ID NO: 301343 - DNA, 162 bp, Proteus mirabilis
atgaaaaatgaaaattgtagttttgaagaatggcacgatttattaatgcaagtagcaatcgattatggcggtagtgcagaagatgcagaggcttggcgtgatgattacgaaacgggtaagacaccacttgaagcgtgggttgatgaatggggcgaggactga

SEQ ID NO: 301344 - DNA, 348 bp, Proteus mirabilis; identical to SEQ ID NO: 295830

SEQ ID NO: 301345 - DNA, 3822 bp, Proteus mirabilis
atgatgaagtggttgaaaaggataacactaacgctacttatcatcattttactggttttaggtgctcttgcatggattttagggacgcaatcagggctacattttgccattaatagtgcagctcgttgggtgccaggtttaaccattaacagtgttaatggcggttggcaagatttacgtttaacgggtgttgagtatcaaatgccgggtgtagacgtcaatgtgggggagttatcactaggcttaaatttaagctgcttgaaggataaacaactgtgtgttgaggccttaggcacacgtgatgttatcgtcaatgtagataccagtgcactccctccagcacaagaaacacctccttctgagcctttaactgagcttaatgcccctttacctatctatttaaactctctctcattagccaatacgcgtgtacaaattgatgatatggccctatcactcaatgagtttactacggcagcacaatgggaagggcgtcaagttaccttaaaaccgacagtcattaatgatttgttggtggcgttaccgaaaacacccgaagacggtagtgttgccgccatggcgcaagatgtaaaagaagttgcagcaacgacgcctcaagcggagcctaaaacaccgcaagagcaagagcaggcactagctgacactattaagacaattttcgccaagcctttattagcgcagttacccgaaattattattcctgttgatatcaatgtggaggggatagaaggtaaacagttacaagttagtggtgatacgcctgtgactattaatcaactctcttttcaagccaatacgcaaggtcaacaggttaatctcactaggctcagtattgatgcgtcagaaggtaaagtcagtttaaacggtcaaattacactggataaacagtggccggttaatctagatatgcaagcgatgcttcgtgagatggcaggattggaagagtttaaagatcagcaagcgacactgtccttacaaggtgcgatacttgatgaattaaaactcgcactctctttaacaggaactgttaccgcaagccttgatgcacaagctgagctcgctaaagcacatcttccactaaaattaaccttagagagccaaaaagtgcgctggcctttaacgggagatgtgcagtatcaacttaatgatactcgactacgtcttaatgggcagacggataattatgatctttcattacgttctaatattgaaggacaagagatcccgccagccaaattgaccctagacgctaaagggaatgaagagaaaatagcactcactcgtttgcgtttagctgcattacaaggtcatgcggatattaccggtgtggcagattggagtaaggcgattagctggaatgcattattgactatctctggtattaatacagctaaacaatatcccgatatgccagcgaaattagatggacgtattgctacaacgggtagcctgtatggaggaagttggcaactacgagtgcctgaaattaccttagatggtaatttaaaaaataatcttattaaggcgcgaggaaacgcttatggtaatgattcggggcaatggaatattcctcaattaaccttaattctaggaaaaaataatctcgatattgcggggcacttaggtgatcagtgggcgcttgatgcgaacatcaatgctccggggttaaatggtttagtgccggggttagcgggcgttattaaagggaaagtgaatgttcgcggtgatattaataagccgaaaattattgctgatatcaatgcacaagggatcaaatggcaagatcagctcagtgttgggtcagttgtcgttaaaggtgacattcagtcagatgacgtgatcagtggcaaactggcaattacggcacgtcagttaaaacaggctgatttgattattcgtcaattaacgctagatgcggccgggacagaaaaacagcataagcttaccttgaaaatggatggggaacccgtatcgggtggcctgacattagccggctcgtttgataaagaaaaacagcagtggcaaggcacacttaacaataccgcatttgatacgcctgtaggcgaatggcgtttaaataaagcgatggcgctaaatttattagcggaaaaacagcaagtgacgattggttcacattgctgggtaaatcctaatgcacaactgtgtgtacctaaagagatcactgtaggtgagagtggtagtgcggcaatcacgttaacacgttttgatttagccatgataaaaccattcttacctcctgaaactgcgctacgcggtgtctttacgggagatgcaacggcaacttggaatgcgaaaggcggattacctaaagcgtcagttaaccttaaaggtcagggcgttggtgtaaaacaaaatgtcgatggtacggtattacctattgattttgatgcagttacgttaaatgccggcatcaataatggtaaagcgaccttgcaatggttaattagtattgccggtaatggtgactttaaaggtcatgtcaatgttgctgatctagaaaaaacacgtcaattatcaggtacggttgatattgataatctgacattagatctgattaagcctttcttgggtaaaggtgaaatagcgcaaggtagtgtaggggcacagctacgtttaggagggaatgcacaatcaccattgctatttgggcagtttggtattaaccagttaaaagtagttggtcactggatcccatttgacatcaccaaagggaatgtcgatattcgctttaatggtgcgacttctgatttaggcggtagaatcgaaacaccggaaggttatttaaatctgacggggaatgcggactggcgcaaactagatgagtggcgtgccgtggtggctgcgaatggcaacaaactgcgtgtgtcattaccaccaatggttcgtattgatgttaacccagacttagtttttgaagctaatccacatttgcttaaattagatggtcgtattgatatcccttgggctcgtatcgtggtgcaggaattacccgagtctgcggtgtcggcctcttctgatgaagtgatgttggataaagaattacaacctatagcaccaaagcagacttctatacctattcaaagtaatttggcgattaatattggcgatgatgtcacattagatgcctttgggttgaaagccagattaacaggggcattaaaagttgctcaaagtaaacaaggattgggattaaatggtcaagtggatattcctcgcggggaattcaaagcttatggacaagatttacaagtacgtaaagggcaaatcttgttctcagggccggttgatcagccatacttaaatattgaagcgatacgtaaccctgataatacggcagataatgtcattgctggggttaaagtcaccggacttgcggataagccgaaagtggaaatattctctgagccggccaaaacacaacaagaagcattatcctacttgttaagaggggaaggattagcaagtggtgattctgattcagcacaaatgacagccatgctaataggattaggtgttggacaaagtggacaactcgtaggacgtattggcgaaacctttggtatttctgatttagcgttagatacacaaggtgtaggggatagttcacaagttgtcgtcagtggtaagataaccgatgatttacaagtgaagtatgggatgggtatatttgattcgctagcgacgttaacattacgttatcgcttgatgcccaggttgtatttacaagcagtgtctggtatgaatcaggcaatagatctgctttatcaatttgagttttaa

SEQ ID NO: 301346 - DNA, 1104 bp, Proteus mirabilis
atgatgaagcgcaatattcttgcagtggtaatcccagctttaatgtttgctggtgcagcaaacgcagctgaaatgtacaacaaagacggcaacaaagtagatatctacggtaaagttgacgttcgtcattacttcgctgattctgatagcaaagaaagcggtgacgcttctcgtgcacgtatcggtttcaaaggcgaaactcaaatcaataaagatttaactggtttcggtcgctttgaatacgaaattaaaacaaacaccactgaaggcgaaaataaagctaaaactcgtctagcttttgctggtctgaaatttgctgacttcggttctttagattacggtcgtaactacggtgttatttatgacaccaacgcatggactgacgttctgcctttatggggcggtgactcaatgtcacaaactgacgtttatatgactggccgtactactggcgtattaacttaccgtaacactgatatgttcggttatgttgatggtttaagctttgctctgcaatatcaaggcaaaaacaacgaaaacaccaataatggttcaagccgtcaagacaaagctgaagcaaatggtgatggtttcggtttctctaccgcttataacttaggttggggcgtaactctgggtggtggttactctaactctgctcgctctaactggcaacaattccatagcaatgcaacaggtaaacgtgctgaagcatggaacgttggtggtaaattcgaagctaacaatgtttacttagcagcaatgtacgctgaaacccgtaacatgacttactttggtgatgagaaactgatcgctaacaaaactcaaaatatcgagttaactgcacagtatgactttgctgatttaggtatcaaaccatctttagcctatgttcagtctaaaggtaaagacttaggtgttgctcaaggtaacgaccaagatttagttaaatatatctctgtaggttctttctacaaatttaacaaaaacatgactgcggttgttgattataaaatcaacctgttagatgacaatgacttcactaaagctaacggcgttgcaactgacaacgtagttggtttaggtctgacttatcagttctaa

SEQ ID NO: 301347 - DNA, 1392 bp, Proteus mirabilis
atgaattttccgttaattattaacgtactcgtctttgttgtgctattactcatcttggctaaattaagccaacgtcagtggagcctgtcaaagaaagttcttgtcggtttggtctttggggtggtgtttgggctggcgttacatgcattctatgacgcacacgatcctattattaaagaatctatcctttggtttaacatcgttggtaacggttatgtacaactattacaaatgatcattatgccattggtatttgcttctattttaagtgcagtatcacgtttacaccaagcatcatcattgggaaaaattagtgcactaaccattggtacacttctatttacaacggcaattgctgctcttatcggtattgttatagccaatatctttggtttaacagctgaaggtcttgttcaaggggaacaggaagcgcagcgtttagccgctattcaacataattatataggtaaagtgtctgacttaactgtacctcaattaattttatcttttattcctaaaaatccatttgccgatttaactggtgcaagctcaacctcgattattagtgtagttatctttgcggtattcctaggaatggctgcaataaaactgcttaaagaagataaacctcgcggtgaaaaagtattagcagcgattgatagcttacaagcgtggatcatgaagttagtccgtatcgttatggcattaacaccttacggtgtaatggcactgatgactaaagttgtggcaagctccaatctgcatgacattattcaactcggtagcttcgttgttgcctcttatgttgcgctgggcttaatgtttgtcgttcatggtttattagttggatttactggcttaagcccaattaaattcttcaaaaaagcaggaccattattagcatttgcattcacaagtcgctcgagtgcggccagtattccattaaatatcgaaacacaaactcgtcgcattggtgttcctgaatcgattgccagtttctcatcgtcttttggtgcgacaattggtcagaatggttgtgccggtatttatcctgctatgttagccgttatggtggcaccaacagtcggtattaatcctttcgatcctctttggattgccactttggtgggtatcgtaaccattagctcagcaggtgttgcgggtgtcggtggtggtgcaacctttgcagccctgatcgttttaccagcaatgggattacccgttacactggttgccctactgatttctgtggagcctcttatcgatatgggtcgtactgcattaaatgtcagtggctctatgaccgcaggtactattactagccaaatgatgcgccaaacagataaagagatctttaatcaggaagaagaagctgaacttaatgttaaataa

SEQ ID NO: 301348 - DNA, 996 bp, Proteus mirabilis
atggccatatctgcctcatttaattttcaaggattgtctcccgatagtatttgggatgcgctaattaatattgggttttatcctgattcagggctgacggaattaaacagctacgaaaatcgtgtttttcagtttatggatgagcacaaacaacgttatgtggtgaaattttatcgtcctcaacgttggagttattcacaaataaaagaagaacatgaatttgttttagcgctaaaagaggcacaggtttctgtcgcagcgcctatcgaggtaaaaggcgaaacagttcatctttctaatgaagggttttattttgcattattcccaagtattgggggaagagcatatgaaactgataatctatttcagcttgaagaggtggggcggacattaggacgtatccaccaaataggtagaaaaaagagctatcaatatcggccgacactgtctgttgcggactatttggtcgcgccaaaattagaatttgaacaaagtgatttagttccaacgcaattaaaatctcaatttattgatgctattgataaaattattcatgaagtgagtcctaaattatcagactcaacatggaaaaaattacgactacatggggattgtcatcccggcaatatattgtggcgtgatgaagtcgttatggttgattttgatgattctcgtatgggaagtgcaattcaagatttttggatgttattaagtggctcaaagcaagatcagcttatacagctagatacattgcttgagtcttataatgaatatcaagattttgatgtgagagaactatcattaattgaacctctacgtgcgatgagaatggtgcattatatcgcatgggtattaaagcgctggaaggatcctgcttttccaagaacctttgtttggtttcaagagcaagacttttggtttaaacaactcgctttatttaaagggcaagtggagcaattaaatgagccacctttacaacttagcccaatgtattaa

SEQ ID NO: 301349 - DNA, 204 bp, Proteus mirabilis
atggctgccttaggttttttgggaatgggcgcacagccaccgacaccagaatggggaaccatgttatctgatgtactgcaatttacccaaagtgcatggtgggtagtgacttttccggggttagctattttgttgacggttttagcctttaacttaatgggtgacggtctacgagatgcactcgatccaaaattaaagcagtaa

SEQ ID NO: 301350 - DNA, 1371 bp, Proteus mirabilis
atggaattatcttcgctgacagcgatttcaccgattgacggtcgttacggtagtaaaacttcgtcgttacggactatttttagtgaattcggtcttttgaaattccgtgtacaggtagaagttcgctggctacaaaagctagcatcttgcaccgacattaaagaagttcccgcctttgaacaaaacgcaatcgattaccttgatgcaattgttgctaacttcaatgaagatgatgctacccgtatcaaaacgatcgagcgcaccaccaatcatgatgtgaaagcggttgaatatttcttaaaagaaaaagtggcggctatccctgcactacagcaagtttctgagtttattcacttcgcttgtacttctgaagatattaataatttatcccatgccatcatgttagaaacagcacgccaagaagtgctactaccagcatggcgcgagcttattgatactatcagtaaaatggcgcaagcatatcgtgatttacccctgctctctcgtactcacggacaaccggcaacaccttcaacggtaggaaaagagtttgcaaacgttgcataccgtatggagcgtcaatatcgccagcttgctcaagtagaaattttaggtaaaattaatggtgcagtaggtaactataatgctcacctagctgcctatcctgaagttgattggcaccaatttagtgaagaatttgttacttcattggggatcacatggaacccatatactacgcaaattgagccacacgactatattgccgagctttttgattgcatcagccgctttaatacaattttaattgattttgaccgtgatatttggggttatatcgctcttaatcacttcaaacagaagaccattgccggtgagattggctcatcaacaatgcctcataaagtgaatcctatcgattttgaaaattctgaaggtaatttaggtttagctaatgccgttatgggtcacctttccagcaaattacctgtttcgcgttggcaacgtgatttaactgactcaaccgtactacgtaacctaggtgtcggtatcggttatgcattaatcgcttaccaatcaaccatgaaaggcttaaataaattagaagttaatgaaagtcatcttcgtgaagagttagatagcaactgggaagttcttgctgaaccaatccaaacggttatgcgtcgctatggtattgaaaagccttatgaaaaacttaaagagttaactcgtggtaaacggatcacggcacaagatatgattgtgtttattgacggtttagcgctaccagaacaagaaaaaacacgcttaaaagcgatgacacctgaaagctatattggttttgccagtcaacttgttgataaattagattaa

SEQ ID NO: 301351 - DNA, 1254 bp, Proteus mirabilis
atggaaagcaaagtagttgttccggctaatggtgctaaaattacattagatgctaaaggtaagcttgttgttccaaataatccggttatcccttatattgaaggggatggtatcggtatcgatgtcacgccagcaatgttaaaagttgttgatgcagcggttgaaaaagcttacggcaatgaacgtaagattgagtggatggaagtctacaccggtgaaaaatcaacacaaatttatggtaaagatgtttggctgccagaagaaaccttagatcttattcgtcaatatcgtgtttctattaaaggtcctcttactacaccagtcggtggtggtatccgttcattaaatgtggcactacgccaacaactcgacctttacgtttgcctgcgcccagtgcgttattacaaaggcactccaagcccagtaaaacacccagaactgacggatatggttatcttccgtgaaaactcagaagatatctatgccggtattgagtggaaagccggttcagcagaagctgataaagtgattaagttcctgcaagatgaaatgggtgtaaccaaaattcgcttcccacaagattgtggtatcggtattaagccgtgttcagaagaggggactaaacgtttagttcgcgcagcgattgaatatgcaattgataacgatcgcgactccgttacattggtgcataaaggtaatattatgaaatttaccgaaggtgcctttaaagattggggttacgaattagcccgtgaagaatttggtggtgagctgttagatggtggtccttgggttaaaattaagaaccctaaatcaggcaaagatattattgttaaagatgttatcgcagatgcattcttacaacaaatcctgttacgcccagccgagtatgatgttatcgcttgtatgaacctaaacggtgactatatttctgatgcattagcagcacaagttggcggtattgggattgctcctggcgctaatattggtgatgagtgtgcattatttgaagcgactcacggaacagcaccaaaatatgccggacaagataaagttaacccaggctctattattctctccgcggagatgatgctacgccatatgggttggacagaagccgctgacttaatcattaaaggtatggaaggcgcgatcgaagcgaagaccgttacttatgattttgaacgtctaatggacggtgctaaactgctgaaatgtagcgagtttggtgacgcgattatcaaacatatgtaa

SEQ ID NO: 301352 - DNA, 405 bp, Proteus mirabilis
atgttggtgcaagcattttctcatgtggtgacagtaccgaccgatccgcaatcaggacaaccttccggccaacgtgcgcataaaccatttcgttttaccgtggcattaaataaagcggttcccctgctatataacgcattggcttccggcgaaatgttgccaaaagttgagctaaaatggtatcgcacctcggtagaaggtaaacaagagcacttctttaccaccacactgactgacgcgactatcgtgaacatcgattgccaaatgcctcattgccaagatccggctaaagccgacttcacgcaacttatcgaagtctccctctcttaccgcaaagttgactgggagcatactgttgccgggacttcaggtgcagatgactggcgtgcaccactcgaagcataa

SEQ ID NO: 301353 - DNA, 243 bp, Proteus mirabilis; identical to SEQ ID NO: 86443

SEQ ID NO: 301354 - DNA, 729 bp, Proteus mirabilis; identical to SEQ ID NO: 86444

SEQ ID NO: 301355 - DNA, 2502 bp, Proteus mirabilis; identical to SEQ ID NO: 279643

SEQ ID NO: 301356 - DNA, 231 bp, Proteus mirabilis; identical to SEQ ID NO: 279634

SEQ ID NO: 301357 - DNA, 1026 bp, Proteus mirabilis
atgataaaaaataatgacttacctgcttttatgacgcaagtggttattactgaacccggtggcgttgataaactgcaattagaaaatagcccattaccgtcattgccccctcattatatgttggtaaaagttaatgcagcgggtgttaatcgccctgatatttttcaacgtcaaggcagctatccaccgccagccgatgcatctcctatattaggattagagattgctggggaagtggtgaaattaggtgaacattgtacaaaatgggcaataggtgatcgtgtttgtgctttagttgctggtggcggttatgctgaatattgtttagtccatgaagatatcgctttaccgtcgcaaggattaagcgatattgaagcggcagcattacctgaaaatttatttactgtttgggcaaatctatttcaactcggtcagttaaaagcaggggaatcggttttgatccatgggggcacttctgggattggctctatggcgattatgttagcacacaatcttggttgtgaaatttacacaacggtaggttcaaaagaaaaagccgaagttgcccaaaaattaggggctaatcatgttattaattaccgtgagaaagattttgctacagaaattcctgtattaacccaaggtaaaggcgttgatgtcatacttgatattatcggcggcgattatgtggaaaaaaattatcaagttgcggcgaaatttggcagagtgatccaagttggcatgatgaaaggggcccctaaaaacttaaatatgatgccactgatgcttaagcgattaattcatacaggttctaccatgcgttctagaacgccagaagaaaaaacgcatatagcacaagaattaaaacaacaagtatggccgttgattatcaaaggtcaaattaagcctattattaatgcggtcttttctttacaagaagttgccaaagcacatcaattaatggagtctggtgacttaattggtaaagtagtgcttgagattgatatgaataaatcacttgtgtag

SEQ ID NO: 301358 - DNA, 555 bp, Proteus mirabilis
atgcagtggcggaatacatctactcgctatgggcacttgtcgcttcttttacattgggggacagcattaaccgtctatggcatgtttgccctaggattgtggatggtaaatttaggctattacgatagctggtatcattcagcccctgaaatacataaaagtatagggataattctatttattgttcttcttttccgagcaatttggcgttggatttctcctccaccaacagcattatccagctatagccgacttactcgcattagtgcccatgtggctcatatgctgttatatctaattttatttgccatcattataagtggctatttaatttctactgctgatggtcagccaatatctgtattcgattggttctcagtacctgctgttttcacaggggaaggggaacaagctgatttagccggtgatgtacatctttatttagcctgggcggttgttgtgttatcgctattacatgccgcgggtgcattaaaacatcactttatagataaagatattacattgaaacgtatgcttggcataaaaacacaataa

SEQ ID NO: 301359 - DNA, 276 bp, Proteus mirabilis
atggaaatatggtttaaggagtttgagtcacacgggcgtcagattctaatcaagaaagctcataacgccgatgagtcaaaaatcgggatgcaatattgctggccagagaaacttttcgaggtcgattttggattatggatagattacgacgacgatgatgaggaaggctgtaataaagcggaagaagcacgcaacaagctattcgacaccatcgatcaggaagcagtagataccacagtgagtaacttaattcaaaaactcaagcttgataattag

SEQ ID NO: 301360 - DNA, 579 bp, Proteus mirabilis; identical to SEQ ID NO: 298873

SEQ ID NO: 301361 - DNA, 1386 bp, Proteus mirabilis
atgaaccaagttccgaataatttaatggcggaacaaaatgtcattggaggactcctgctcgacccgcaaagtgataatgcgcaatcaattttttcactgctaaaacctgaagatttttatgcccgacaccatcaaattatttatctcactctgcgagaaatgtatacccaacgtatgccaatagacatcatgacggtgacggattatctggagtcaaaagggcgaattaatcaatcaggtggttttgcctatcttgctgagatggcaagagaaacaccgagtattgctaacattatggcttatgcgaaaaaaatccgagagtgttccgcacagcgttttgttatcgaaaagacggttgaaattcaaaaactcatgatggtgccaagtgagttaagttttacagataaaattgaacaagcacaacgcttgcttgatgaagccacttcgtttggaaaaatgggaaaaaaaacagggttgcgccgaattgatgatgtgttggatgatgtttttaccgacatttgtgaccgacaagataacccagagaaacatcgaggattaaaaacgggatttaaagattttgaccgcctattaagcccgaaacagattgttatcggttcactgttcgtgattggtgctcgccctaagatggggaaaacaaccgttctcactgaaatggcaaaaaatgtctcacaacaaggtaagcctgtattgctgttcagcatggaaatgacggataaacagcttgttgaacggacactagcccaacaaacccagattaattcagataaattttaccaaaagttagaggagcatgaatgggataggctttgcagtgccatcggtcgccttaaagatgagcccaatatttgggtggatgatacacctggcatgtccttacaacacattcgttctgaaagtcggaaaatcaaacgcaaagtcggtgatattgggtttattggtgtcgattacctcactctgatgcaagcgggaaaagctgaccgtaatgatattgcctatggtgaaatcactaaggggctaaaaatattggcaaaagagcttaatacggtggttgtgttgcttgtacaactgaatcggggattagaaaacagggctgacaaacgtcccgtaccaagtgattcaagagacacaggacaaatcgagcaagattgtgattattggttaggcatttatcgtgatgcggtgtaccacgataatgcggatgaaacgctgaccgagatgattttaaggctcaatcgacacggtaaaacaggcacggtgtatgttgaccaacaaggattgagtattacaccagttgatcaatatatggctgcttatcgcgctcaaccgaaacgagagcctaaaaggtattgtgaaaaatcgttttaa

SEQ ID NO: 301362 - DNA, 234 bp, Proteus mirabilis
atgtacgaattaataacgatagatgtatccactgaccttcctaaagggcttggagcaaagcgctataatacccacccaagaattggtgaatgggttgaaatggatataaatgagaaaggcactatgtttgaagttgtaatggtggcccactcagatagcggtgctggttctgatatttatgtaagaaaattagggcttacatcacaagcagttaaaactctttgtaataaatag

SEQ ID NO: 301363 - DNA, 195 bp, Proteus mirabilis
atgttaaaacagtatgatatgacagcgcaggcaagttgtgtacttgaaacaatctcaaaaaatgattggcaaacagtacaagcgatttcaaatcaaactgggttaagtaatgaaaattgtgagtttctattaactcagtttgaaatagcaggggttgtcgcaaagcaaggaaatagctatatgcgtacagcctaa

SEQ ID NO: 301364 - DNA, 798 bp, Proteus mirabilis
atggaattgtttaaatactgtgataaaaaatacaatttaatgtcaggatcaacgttacgcttaggcgctcttcatcattttagaaaaattgaaaataactcactgagagatgaaaaagaaggtaccttcacaattcaaatcgatttttctgatggaataatccttccaacaaaagttgcaaacttattttttcagtctggaattagattcggagatacttcagagccaccacctagttttcctggctccgtctctatgcatattgataaggttgaaatcgatcatgtgatgtctcatggagtcaaatttaaatcagcaaaagtaactatagagcgttctgggctcaatagttatatcttttgttgctccatgaatcctacgaaacctcagtcctttagtgagtataatgactactggaaaatatcaaaagataaaattgatctatttggtattaaaacatctcaattaatacttaaacaattaaaattagctgattttaatttctttcctgatagaaatagacccctatctgaatttggtttttcagttcaactccaacaccgcccaataaaatacatcgaccgagtgatgcatattacccaaaataatctcccatcatataatgaatttattgatttaatagaaaatattgacttttataaaccatcaaaattcaaagatgaaatggaatatagatataagtttattattcatgaaaaaggaaaaatatacctccctcccaaagactttattgacttgaatgcaagcgaattttatttaaaaaacactgtactataa

SEQ ID NO: 301365 - DNA, 324 bp, Proteus mirabilis
atgaaaaatggtatttattacgttacctttcgaagcaacatgcaagactttggaaatggtactgtaactgttagaaacgatattgttaatggtggtgattttgcttatttatatagaggcaaggtcaataatagtcaggttgtattaacagtagaaagacataatagatcagcaacctcagtatttggagatattgataaatttaatcttattttgaatatctctgagtcaggaaataactatgagttatctggtcatgttgaaggtatgcagcagatgcaaatctcaattagtgctaaatttatcggggaagtaattgaatga

SEQ ID NO: 301366 - DNA, 192 bp, Proteus mirabilis
atgattctccggtgtcaaatcaaggtcgctaaggcggccttttttattggagaaaatatgaaaaatttatttattaatctatgtataaagctatctggtaagactaaagagcaattaaaattagcttggtcatttcattattttgttacccgttctaaatataaagcttattggcgagcagtatttcattaa

SEQ ID NO: 301367 - DNA, 549 bp, Proteus mirabilis
atgaaatttacacaatggtgcataatgaataattttatagaagccttagatgcgtctatcaaaacaaaaaattggtattcagtactatttatatccctaacactaccagatatctgcggaaagatagagcatccagatttaaaatcatcaaaatcaagaacaatagaatggtacaacaaatacttactaccaacatatacgtcatttattggcccatcaagggataaacatgagcttttaagcggttctgatttttatgccctaagatgcgcatacctgcatgaaggaagcgatgacatatcagagcaaaaagccagagatgctctccaaaactttagattcgtccagccattatctgaaaactcttcaatccatcgcaacaaaatcaataactcactgcaactccaagttgataaatttgggacagatattttgtccgccgtgaaatgctggatgagagatatatcttcggatcagaataaaattaatgaaatagaaaacatgctgtttattcaaatgattgacccgtcaaaaggattttccatttaa

SEQ ID NO: 301368 - DNA, 132 bp, Proteus mirabilis
atgaactgccaatcatgcaatagaccgctaacagatgaagaaatttacgtgtgtagcaagtgtgctgatgaatacgctcatttggaagtgatggataaaatcaagggagagggagatgccgaggtatcgtag

SEQ ID NO: 301369 - DNA, 360 bp, Proteus mirabilis
atgaaacttaaaaatattttagatgccatgcaatgcggggctaactggttatttggaatgtatcagcgtccataccttaaagagtgggatgattatctaaattacctgatcgacgaatgcagtattgctgatgagcgtgattgcgtaatcacatttaatgatggcggtgaaaaagtagaggtttggaaaaaaaataaatactacgcatatggcaatcaacacaatgtttctagtggtgaggcgtatgagttcaggccgtcattcagaacgatgattaaattatcaaaccttgttgataatcgagagcaaaatcgagtgaatattttcgccaatgagttaagacagaaggtaaaaaaatga

SEQ ID NO: 301370 - DNA, 222 bp, Proteus mirabilis
gtgagtgagccagtagaagtcatggcctattacgtcagcttcaatacgaatagcagattttggatattaaaaatatcagcttatggcgatgaggatcactttaagtttcaggctaagccaaccagaaaacaaatcaggaaatttaaaaaacgattcattcgtgaagccaaagaaggctctgaatatttagttgaaatgataaggatgatgcaaggaggttaa

SEQ ID NO: 301371 - DNA, 297 bp, Proteus mirabilis
atgaagagtgacatacttgaggttcttaacttgcttaggctgcaaggtaaacaaatgcttgaattaattgaagcgagtgaggcgcaagcggtaaggatcagaaagagggttgaggcgttagagaagcagactatcaaagatactcgaaactggcgctgttttattggttttcaccaatgggaaattcatgggcattctgcatggactgagagtattgatggtgaagttagtgaaactgggaatctctacgtgttgagatgcgttcactgcggaaaattaaaagctaaatacatatag

SEQ ID NO: 301372 - DNA, 270 bp, Proteus mirabilis
atgcagggaactaattgggttaaggtgagtgagagattacctgaaatggacacgccagtgtttgctggatggtttagggaaaacggcgaatttgtatggggtagattcgtcagatgtgaagaacacggtgatgaaggttggatttggctatggtctatttgtactggtgattatttaagtgatgaaggtgattggctgctagacgatgattattcaatgataacgcactggcaacctttaccactcccaccaatgccagagggtgaatga

SEQ ID NO: 301373 - DNA, 246 bp, Proteus mirabilis
atgaaaggaacaacgttaacggagctaatcaaagcatacaccgaccaaggaatcggagccgcgcagaaattcattatcaatgatatcgattatttcaaaagttgtgatgatgcgatgatgtttcaagttattcgatttcaaagaaagttctacccgcgaggtaaagcactctttcgaatactgtcgatagaaaacagcgctaaatacgcaagaagccaacgggaggcatctaatgcagggaactaa

SEQ ID NO: 301374 - DNA, 288 bp, Proteus mirabilis
atgaaaaccaagcaaaccaagatgaagttaacccgatatgaacttgaagacgattacaaactaaagcgatttaaagtttcccataacaatggacatacaactgtagagcaagatttaacggtcagggtcgatgagttcgggcgaattgatattgataccagcactgatggacttccaactttcgaaaatgaactagacgcaatactgaaatatgcagactggctagaacgcatgggaatagcaatacgcagagaagctaagcgggcaattaagcgaggtgttgagtga

SEQ ID NO: 301375 - DNA, 228 bp, Proteus mirabilis
atggaacaattacggatattcctaaattccctctctgtttctgagcaagagatgtttgctaaaaaatgcggaacttcaattggttacctcagaaaagctttagcaaagggttcaaagctaggagttgccttatgtgtggcaattgaagttaacagtaactcaaaagtaaccagaaaagacctctacccagatgattgggaaaagaactggcctgaactggcagcttaa

SEQ ID NO: 301376 - DNA, 546 bp, Proteus mirabilis
atgcaaatagccaataggtttccatactggctttgtaatactgcattcgccttttctaattcaatgattttggcttccaagttaggcataggaacctcgatagtggatgaaatagttaagtggatcattgcaaatactgaaagaattatatcaatcgttgcaataattgcatcatactttattggtgtttattcgaacagacgcaacgaccggcgcaaagagtttaattcagttgcagaccctatctacataaggctcattaaagccaagaaagatctagatttagggttgtgcgttcaccattctttagttaatgaaaaagaaatattgaatctttctatccatatgaaagaaaaggaaagagaaaagctgatagtggcttacaaggagttttgtgatgctgtatcaatgattaagtgggataagtatcacaaaccaactttagaagacgatgtaagacagaagatagtagaaagccttaagtctcttatagacttaacaaaacctgtctcttatacacatctgacgctgccgacgaaggcttag

SEQ ID NO: 301377 - DNA, 771 bp, Proteus mirabilis
atgtctagtgcttggtggaaagaggccgtagtttaccaaatatatccgaagagtttttttgatagtaatggtgatgggattggtgacttatcggggatcaacgaaaaattagattatatacaatccttaggaaccaatgttatctggttatgtccgatttttaaatctccgatgaaggataatggttatgatattgctgactattctatcgtcgatcctatttttggcgataataaagcgctagataatttaatcagggaagcgaaaaaacgcgatattaaaatcttactcgatttagtattaaatcatacttccaatgagcatccatggtttaaatccgcgcttagcgatcccaatagcccttatgctgattattatatttttaaacaatgggataaatcgataccaccaaataatttacgtacctactttgactgctctgtttggagtcgtgttgaaaatactgatcgttggtattttaattcgttcggtcctgaacaaccggatttaaattgggaggagccacaattacgccaagatattatcgatatgataaacgtctggatcaaaaaaggtgttgctggatttcgtattgatgctattggtaatttaaaaaaatcacctgaagccttgtcggtacatcacttcgaacctgataaagatgatggtagcgcttcattagtaccttggctattgaaccaaccggggatagttgacatcctctacgccctaaaggacgtggatccctactgcgttcagactgatgtctga

SEQ ID NO: 301378 - DNA, 363 bp, Proteus mirabilis
atgggcatgggtttagaaatatatgatgagaaagggcgactcattattggagaagacactattataccgcgccacttggggcaatttgaccttcctttgtcccaatatggatctcttactattcctgagatttccttaggaggtgaggttgtttgccatttctggctacggtatcgctctcgatggagtggtgaatttcatgtagataagcctaatgagagaacagagtactccatatctgggaacacgttaaattaccgcgttgattacaatatctatcgctgggagaacaatggctctggtggtgggcagacacaagcgaatgactcattctcaagtcatgttgtcgtatgggtggtgtga

SEQ ID NO: 301379 - DNA, 615 bp, Proteus mirabilis; identical to SEQ ID NO: 297564

SEQ ID NO: 301380 - DNA, 528 bp, Proteus mirabilis; identical to SEQ ID NO: 297383

SEQ ID NO: 301381 - DNA, 951 bp, Proteus mirabilis; identical to SEQ ID NO: 86446

SEQ ID NO: 301382 - DNA, 861 bp, Proteus mirabilis
atgagtattcaacatttccgtgtcgcccttattcccttttttgcggcattttgccttcctgtttttgctcacccagaaacgctggtgaaagtaaaagatgctgaagatcagttgggtgcacgagtgggttacatcgaactggatctcaacagcggtaagatccttgagagttttcgccccgaagaacgttttccaatgatgagcacttttaaagttctgctatgtggcgcggtattatcccgtgttgacgccgggcaagagcaactcggtcgccgcatacactattctcagaatgacttggttgagtactcaccagtcacagaaaagcatcttacggatggcatgacagtaagagaattatgcagtgctgccataaccatgagtgataacactgcggccaacttacttctgacaacgatcggaggaccgaaggagctaaccgcttttttgcacaacatgggggatcatgtaactcgccttgatcgttgggaaccggagctgaatgaagccataccaaacgacgagcgtgacaccacgatgcctgcagcaatggcaacaacgttgcgcaaactattaactggcgaactacttactctagcttcccggcaacaattaatagactggatggaggcggataaagttgcaggaccacttctgcgctcggcccttccggctggctggtttattgctgataaatctggagccggtaagcgtgggtctcgcggtatcattgcagcactggggccagatggtaagccctcccgtatcgtagttatctacacgacggggagtcaggcaactatggatgaacgaaatagacagatcgctgagataggtgcctcactgattaagcattggtaa

SEQ ID NO: 301383 - DNA, 558 bp, Proteus mirabilis; identical to SEQ ID NO: 25303

SEQ ID NO: 301384 - DNA, 3006 bp, Proteus mirabilis
atgcccgttgactttctgaccactgagcagactgaaagctatggcagattcaccggtgaaccggatgagcttcagctggcacgatattttcatcttgatgaagcagacaaggaatttatcggaaaaagcagaggtgatcacaaccgtctgggcattgccctgcaaattggatgtgtccgttttctgggcaccttcctcaccgatatgaatcatattccttccggcgtccggcattttaccgccagacagctcgggattcgtgatatcaccgttcttgcagaatacggtcagagggaaaatacccgccgtgagcatgcagcgctgatacgtcagcactatcagtatcgtgaatttgcctggccctggacatttcgccttacccgtcttttatatacccggagctggataagcaacgaacgtcctggcctgcttttcgatctggcgacagggtggcttatgcaacatcgtattattctccccggagccactacgctgacccggttgatttcagaggtaagggaaaaggcgacgttgcgcctgtggaacaaactggcactgataccgtcagccgaacagcgttcacagctggagatgctgctggggccaactgattgcagccgcctgtctttactggaatcactgaaaaaaggccctgtgaccatcagtggtccggcgtttaatgaagcaattgaacgctggaaaactctgaacgattttggcctgcatgctgaaaacctgagtacactcccggctgtgcgcctgaaaaatctcgcacgttatgctggtatgacttcggtgttcaatattgccaggatgtcaccgcagaaaaggatggcggttctggttgcctttgtccttgcatgggaaacgctggcgctggatgatgcactggacgttctggacgccatgctggccgttatcatccgtgacgccagaaagattgggcagaaaaaacggctccgctcgctgaaggatctggataaatctgcattggcgctcgccagcgcatgttcgtacttgctgaaagaagaaacaccggacgaatcgattcgtgctgaggtgttcagctacatccctaggcaaaagctggctgaaatcatcacgcttgtccgtgaaattgcccggccctcagacgataattttcatgacgaaatggtggagcagtacgggcgcgttcgtcgtttcctgccccatctgctgaataccgttaaattttcatccgcacctgccggggttaccactctgaatgcctgtgactacctcagccgggagttcagctcacggcggcagttttttgacgacgcaccaacggaaatcatcagtcagtcatggaaacggctggtgattaacaaggaaaaacatatcacccgaaggggatacacgctctgctttctcagtaaactgcaggatagtctgagacggagggatgtctacgttaccggcagtaaccggtggggagatcctcgtgcaagattactacagggtgctgactggcaggcaaatcggattaaggtttatcgttctttggggcacccgacagacccgcaggaagcaataaaatctctgggccatcagcttgatagtcgttacagacaggttgctgcacgtcttggcgaaaatgaggctgtcgaactcgatgtttctggcccgaagccccggttgacaatttctcccctcgccagtcttgatgagccggacagtctgaaacgactgagcaaaatgatcagtgatctgctccctccggtggatttaacggagttgctgctcgaaattaacgcccataccggatttgctgatgagtttttccatgccagtgaagccagtgccagagttgatgatctgcccgtcagcatcagcgccgtgctgatggctgaagcctgcaatatcggtctggaaccactgatcagatcaaatgttcctgcactgacccgacaccggctgaactggacaaaagcgaactatctgcgggctgaaactatcaccagcgctaatgccagactggttgattttcaggcaacgctgccactggcacagatatggggtggaggagaagtggcatctgcagatggaatgcgctttgttacgccagtcagaacaatcaatgccggaccgaaccgcaaatactttggtaataacagagggatcacctggtacaactttgtgtccgatcagtattccggctttcatggcatcgttataccggggacgctgagggactctatctttgtgctggaaggccttctggaacaggagaccgggctgaatccaaccgaaattatgaccgatacggcaggtgccagcgatcttgtctttggccttttctggctgctgggataccagttttctccacgcctggctgatgccggtgcttcggttttctggcgaatggaccatgatgccgactatggcgtgctgaatgatattgccagagggcaatcagatccccgaaaaatagtccttcagtgggacgaaatgatccggaccgcaggctccctgaagctgggcaaagtacaggcctcagtgctggtccgttcattgctgaaaagtgaacgtccctccggactgactcaggcaatcattgaagtggggcgcatcaacaaaacgctgtatctgcttaattatattgatgatgaagattaccgccggcgcattctgacccagcttaatcggggagaaagccgtcatgcagttgccagagccatctgtcacggtcaaaaaggtgagataagaaaacgatataccgacggtcaggaagatcagttgggagctctggggctggtcactaacgccgtcgtgttatggaacactatttatatgcaggcagctctggatcatctccgggcgcagggtgaaacactgaatgatgaagatatcgcacgcctctccccgctttgccacggacatatcaatatgctcggccattattccttcacgctggcagaactggtgaccaaaggtcatctgagaccattaaaagaggcgtcagaggcagaaaacgttgcttaa

SEQ ID NO: 301385 - DNA, 885 bp, Proteus mirabilis
atgtcttatatatcaagagaaaagatagattacttgtccattggtcatcgactgcgtgcttatcgtattgcctcctcattaaaagctgaagatgtagctgaaagtttagggatctcccgtgccgctgtctatcgattagaaaagggtgaaatcgttaaaattgagacattagataatcttgctcgattacttaacacctcattaagtagcttgttaggtattaatacggagtattactctagcgctaatggtttttttgaacgaatgcgccaacttgaaacacaatcttcccatatttatacccatttcgaacccttttcttatttattaacctctgattgttatgataaaacgcttgtcgaaatgttaacagaagcctctcctgaaaatgcgctaacaaagaagcaacaagaagttttatctattttaaaagagcgtaaaaagcatcaatcattacactcaccgcatatttataatttaattagtcaacagcaaatcgaaaaatttctttatgttggtatgctaggctctgttaatgtaagtaaagccattcaacaagaaagaaaacaacgcgcaaaacaagaaatcagccatttaattgaaaagttagagcaaaaaaatagtcatcttaatattgcgattatttcagatacgatgccatctttaacctttcaattgttttatcaaaacaaagcacctctctctttagcggttagtccatttcgtttaggtgaatttcctaatgtaagtacgggtattgcgacagtatcttcatcaacagaagcaatattccaatatcaatctctgtttgatacgttatgggcaaaagcaataaaaaatgatgatgccattacacgcttaaaagagattatcagtcattattga

SEQ ID NO: 301386 - DNA, 825 bp, Proteus mirabilis
atgcaaattcaagcacttcaaaccagtcagcatatctttgcttttgaaggtgagtttaaatgtgtcggcatttatgaacatgctttgaattttatttgccctcagcaacgcttaatcacttttcatcgtcaaggaagaggattaagcccgatggggtggctactgaaacaagccgattttgattctctggctaagcagtgtcatcccgctttgaaaatgcggatgaaaaacaatcaaatcgcaatcgcagataatatgacattgattgccggtgatagtgaaaatttgcgtttacaagataaagcgacattagatttacgatggttagagagttttttttctctattatctccggtgatagcgacaggactctatgggccattaaaaaactatcgtcaaatcgcccgacttgatgaaattaagttattaacaaagttattttatcatcaattgtctggaaaagcggttaattgggcgatgtttattggtaaaggtccagggttaacaccgagttcagatgatatgctggtgggaatgttatttgcgcattatttagccgagccagaaaaatcgattgaacatttttttaatgaaacaccaccattatcgtcattaactacgatcgtgagtcaacattatttggaatacgccacacggggaatattttctacctatcttattcaactaggtaaaaaaataaaaaataaagagattatttttaaagatatgttggaaatactctctatcggtcatcattccggtgcagatactttactgggattatggattggttatcaaattaaacaacaacagcgtatagattaa

SEQ ID NO: 301387 - DNA, 447 bp, Proteus mirabilis
atgaaaaagaatgaaaatatacaatcagataataaagtaataaacacgcctcacccaatgaaagatgataatgataaatttggagatttatctgaagtacacaaaaagtttaaagttgatgaaataataaatttaatcattaatgatattatctctgttttagaagaaaaacctacattagagaaacaagaagttctacaatttaagaaaaatttaaaacttcactctaaaagtattttatcatctactaatgactcgtctttaactgagattaaaaataattttttagcatcaatcatcgatagcatattaaagtcagacgataaaataaaatctgaatttgggaatattaatgcttatgaatattttttatcaaatagtataaatgagacggttagtcgttcaatggctaaagataaaaatcttgtaaaaaatggcgataaataa

SEQ ID NO: 301388 - DNA, 429 bp, Proteus mirabilis; identical to SEQ ID NO: 86449

SEQ ID NO: 301389 - DNA, 258 bp, Proteus mirabilis; identical to SEQ ID NO: 86450

SEQ ID NO: 301390 - DNA, 240 bp, Proteus mirabilis; identical to SEQ ID NO: 86451

SEQ ID NO: 301391 - DNA, 351 bp, Proteus mirabilis
atgattttatttttcgagcgttcaaagccattaactcacaaaatcgataacattcttctttctgaaataaagaaaagagagccattgaaatatcatagttttcaactgactaattttatttcaggggtgctgtttttgtgttgtttgtgtagttttgtttcttatattgttttttctgttttcttacaaaattctggtgttgaaatagatccatctgtaacaaaaatatttgccaaggttatagttgggttttttttatcaggatttgcttgttggtttttgcgaacatatttatatactgagcttgaacaccagataatgaagatttggtacaggcaagccagtagttaa

SEQ ID NO: 301392 - DNA, 222 bp, Proteus mirabilis; identical to SEQ ID NO: 86452

SEQ ID NO: 301393 - DNA, 213 bp, Proteus mirabilis; identical to SEQ ID NO: 296277

SEQ ID NO: 301394 - DNA, 777 bp, Proteus mirabilis
atggataaaattacgattaaaacccctgaggaaattgaattaatgcgtgaatcaggtcgtttattagcccaagtttttacaatgcttgatgattttattgtgccaggtgtttccacattagaaattaacgataaagtagacgattttattactcatgatctgcaatcgagacctgcaagcaaaggacaatatggttatgagtatgtacttaatacttcaattaatgaggtagtatgccatggtgttcctaaagcagatgagctattaaaaagtaaagatattattaatgtcgatattacactagaaaaaaatggttttattgctgattctagcaagatgtatgtcatgccagatgcctcacctatagcaagaagattagtcaaaacaacttacgaagcgatgtgggaaggtatcaaagaagttaaacctggtgcaacactcggtgatatcggtcatgcaatccaaagctttgcacaaagtcatgggtatagtgttgtaagagagtattgtggacacgggattggtcgagaaatgcacgaagcccctcaagtattacattatggtattcgaggacaaggtgttgtactaaaagaagggatgacctttaccattgaaccgatgattaaccaaggtggacacaaaataaaaaccaaaaaagatggttggactgtagtcacccgtgataaaaaattatcggcacaatcagaacatactattttagttactgctgatgggtatgaagtactcactttgcgtccagaagaaacacttccataa

SEQ ID NO: 301395 - DNA, 417 bp, Proteus mirabilis
atgaatgatccattatatgcttgtgattttttttgtggacaagtagccgaggcttatttgctttatctgatatccgtgtggcgcagacctatttatagatatgagacaggggatattgaagtcagtaagtcatttcttcacggtctgctagatgggtacccaaaagatagaatgactgacagttatcgtgccagattctattcaaaattacttaaagagtttgatgagactccgtcaaaaggcgtggttatctgtggtggcaaaataccagaattaagtaagcgcggaattaaatacatgaatgctcttgttcatgaatacggtgacatgcttactgatattggtgttagagatgaatacggtactctagttccacctgataattgccgttacgaaaatgcaggagcaactcattga

SEQ ID NO: 301396 - DNA, 537 bp, Proteus mirabilis
atgcaatacgcaactattgttattgagaatactcgagttagaagcaacgaatatggagcttacaacttaaatgatcttcatagggctgcgatatctggcggcatagctaaagaatggcagcgaccaagtcagtttttaaaagctgatggagtgaaagagtttgttgaagaagcaaccagagtgctaaaagtcactctggaacaaaatcaaatacttaaagttgttaatggcggtaataatcgtggtacatgggcgcatgagattatcgcgctacgatatgcatcatggttatctgctgcttttgaggtaaaggtataccaaacattcagggagtttgttcttggtcacctaagcaagtttgcgcaagccaataaacttgaacttgaataccaaagtaaaaagaaaagggtaagcactgctgcaaggattatgaataggtggggtgttggtggtgagaaaaatcaccttgaatcgcaacgaaagctactggctaatgaaattcaaatgactatacctgatctattggagggtaagtaa

SEQ ID NO: 301397 - DNA, 654 bp, Proteus mirabilis
atgaagaagttattgaatattagtggggtgattgctttgctggttagctgcttgttttttagcacaacaacgttagcagtagagaaaaaaatatcagccccatttggattaaaatgggggatgacatacagtgatgtgctcagcaaaactggaaatataaagttaattggtaatgaaaaaaatagagtgaaagagtatctcatcaaaaatgattcctcattaattgatggtctggatatgtacagtgtaagtattgacgataagtatggattaattaatgtagatgcattgatttatgtgtatgacgatgatgatagtaaagttattgagaaatataacatattaaaacaagcattatcttcaaagtacagtgaacaatattctgaagaatacttatggaagaatagaacaagaggaatgcttactctaccagaatgcctaaataatgagggttgtggtaaatatgtatctttgtttcaaggtaatgactccagtagtgttatgattatgttgaatgccactggcgataataggtcagttattatatctttgttttacaaatctgaatttattgaaaaaataaaacaagaagaaaaaaaacagaatgaaataattattaaggaaaaatcagacgctttggcaaactctctataa

SEQ ID NO: 301398 - DNA, 438 bp, Proteus mirabilis
atgttaaaaattagaatatcacgcccctcagaagcaccaaaaatcatacaaatctggaaaaattcagtcgatgctacacatgactttctgacagctgacgatcgccaagagattgaaaaagaagttatcggttttttttccgaaacaccggtatgggttgctactaatcaagaagactgcccactcggctttatgtttttacatgacggtcatctagaggcgctttttatcgatgcatcagcacgcgggttagggataggaaaacagttaatatcacacgcattaactcttcatcctaatttaagcgttgatgtcaatgaacaaaatcagcaagccgtcggtttttatcagcatatgggctttcaaatatctggacgttcggagttggataatcaaggaagagcgtacccattattgcatctaagtagagctaagtaa

SEQ ID NO: 301399 - DNA, 963 bp, Proteus mirabilis
atgtctattattcatcttgaatttgaaaagcctattgttgaattagacgagaaaatagatgcattacttgcatttaaacagtctcaagatgaaacaacggcagttgatatagacgaagaaatcgccaaacttcgccaaaaaagcctttcattaacacgctctatattttctgatttaggggattgggagatagtacagttagcacgtcatcctatgcgcccttatacattagattatatcaaagctatttttactgatttccaagagttggccggcgatcgtgcttatgctgatgataaagcgattgttgcagggttagcgcgtttagatagaaaaccagtgatgattatcggtcaacaaaaagggcgagacactaaagagaaagtaaaaagaaactttggtatgccatcaccagaaggttatcggaaagcattacgcctgatgaaaatggctgaacgcttccatttaccagtgattatttttattgactccgcgggtgcttatccgggggttggtgctgaagagcgggggcaatcagaagccatagcacgaaatattcttgaaatgtcccgattaaaaacaccgataatttgtacaataacaggggaaggtttttctggtggtgcattagcaataggagtgggggatcgagtaaatatgttgcaatatagtacttatgctgccatatcgcccgaaggctgtgcctctatcttatggaaaaatgctgataaagcgcctattgccgcccaaaccatgggaatgacggctcctaaattacaggcattgggtattatagactcaattattcctgaaccattgggaggcgcacatcgccactaccagcaagcggctgaatttgtaaaaaaacagcttctcgcagatttaacagaattgaatagttattctaaagaagaactgcttgagaaacgttatcaaaaattaatgtcctatggttattgttaa

SEQ ID NO: 301400 - DNA, 1503 bp, Proteus mirabilis
atgagttatacaaaacggttgtcacttatttgtgctatctgtttaggcacatttatggccactcttgatattagtatcgtcaatgttgctctacctactattcagaatgatattaatgccaatatggctacattacagtggattgtggatgcttatgcactatgtctatcagcttgtattttgtcttccgggccattaagtgatcgtttcggacgaaaaaaagtgtggctctggggggtgattattttcactctaggctcccttatctgtgctattgcacaacaacatgaaatattaatccttgggcgtattatccaaggtattgcagctgcagcccttattcctggcgcattatcacttattacacatgcctttcctgttgatattgaacgtatccgtattattggtatttggtcttcggttagtgcattatcgctgattattggccctatccttggtggtgcattagttcatgccagtggttgggcaagtatatttcttattaatattcctattggtgctattacagtattactaggctggtatggattaagtgaaagtgccgatcctgaggatgttgcgttagatcccctaggacaattaaccagtatcttgggattaggtttactaacctatggttttattgaagctggctctgtaggttggtctgattatcgtactgtattcgcattaattgtcggtctgatttttattaccctgtttgttatagtcgaaaaacgtattgaacgcccgttattaccgctatcgttatttaaagatcgctcgtttttccaatataacctttcctcttttactttgggatttgccacttatagtaatgtcttttttatcgcttttttcctacaaaaagcacaaggctggagtgcattagaaacaggtttaagaatggctcctgagtttatcgccatggctcttttttctatgttatttggacggttctctcgttatatatctgtcagaaaattaatgatctttggctttttgttgattgcaatatcttcttgtttattggcaacattagcaacaaatagcccttacgcaataacaggaagctatttatttatcttaggtgcaggaatgggattagcgacacccgcaatcggagttttagtgatgaaaagtgtagcaccgtctcgctcgggcatggcgtctgcaaccatgaatgcattaagacaaaccggtatgacaatgggaattgcgttattaggtacattaatgatacagcaagcaattaattatatgatgatacaaagtcaagcattaggaatagtggcagaaccgattaatattattacgttagtaacagaaaataaaactgcttccctagataatcagttggttgccctattacctgaagcatttaattcaggatttgcctatgccatgctaaccgcaggactttcctgttttattactctgtttattatgctttttccttgcaaagagaaacaaggtgcactttctcagcagatagcggattaa

SEQ ID NO: 301401 - DNA, 657 bp, Proteus mirabilis
atgtcggcaatgactcctttttatgcatttataattgcggctgtggtagctttggttactcattacttaacttcatcgcgatttaaaaatgagctaaaagttaagaaaaaagaaaaaaatattaatgatgccaaagacatgattaatttgtacgaaaaggagttattagaaagaatacatctaacaagatcctatcttattgatttaaaactaaaaaaagataaaaacacagagattgatgatgaattcagaaaaatatacaaaaaaatgattagagattggaatattactatagattataaatataatgttatatatagatctggcatgcttaataaaaccaaagaattcgacaaaattcaggaacagctaaaagggtttcatgacttcataaggacctatgtagataatattgaccaattaaacgtcgatacggtggataataaattacaggaattaaagaagtttcatactaactcttattcatttataacaaaaatccataaaaaagcagatgaagaatggaataatatctttaatgaagatagaattttaaatagatggttatttgtttctttagattatacatttaaaacaatatcaatttatttatttttctgcatattttcatttatttactcatttctattcacatga

SEQ ID NO: 301402 - DNA, 285 bp, Proteus mirabilis
ttgtctttgataattgatcgtaagtttgaaaaaaaagagattattaatgcttatttggcatgtgcatattttggtgttgatatatatggtgttaataaattgtcgttagagttttttaatggtgtagatataaataacatatctctaaatgatgctttttttatggcctctttattaaagagaccatatcctggaataatatctttagattgggcttacaaagtaaatattcgtatgaattatataaggaaactctacattgctcatgtgaatagaaatgagtaa

SEQ ID NO: 301403 - DNA, 684 bp, Proteus mirabilis
atgcaaaatttaattaacgttgaaaaagaaatcaccatgagcagtttagattttcttaataatataataaaccctgccagagtgtcttgtggtgaagcagaggttaaaaatgctcattttgttaaacgaatagaggatgaattggatgatttaccagcggtaaaaactttttaccgctatggaaacgaagttagagcttatgatttaaacatggatcagctaatgttggttggtatgagagaatcaaaagcggttcgtcgctcggttcttgaaaaacttaaaacattgtctaatccaccgcaaatgtcacaagctgagttaatcgccgctatggcgcaagtcaatgtagagcaggaaaggcgtcttaactgcgttgaacagaaaattgaacaaatggagcaaggtactatccctgtaggttatcagggatacagctacctaaaagccacttatggattaagtgatgccaaatgccgtcaacttgttatggcttgggctgtgcctaacaaaaaagttccacatatcgcaccaagtggacaagtaactcaaatgtcagtggtgcatgaagaaactttcaagcaatcacttcatcaaatgatgaatgaagcagagcaacgcggaacccaatggtatcacaataagataggtagatttgccatttcaggctgggaaaacgcagcttaa

SEQ ID NO: 301404 - DNA, 588 bp, Proteus mirabilis
atgaatactcaaatctccgtattatcaccaaccgttaccatccaaaatgggaaagcaatcacaactacggaaaatgtagccatttactttggcaaacagcatcatcatgtcgttcaaaagctcgaatcacttgattgctcaaaagaatttaccatccgcaacttttcgcgaatggtcaaaaacaaaccaattggcagtggagcaaagcgtgaaattgtttactaccagatgactaaagacggatttgtctttttggttatgggattcacaggcaagaaagcggctcaattcaaagaagcctacattgccgaatttaaccgtatggaagctgaactgtacgggaatagaataacctcatgcgttactcaagaagaacgagatgcctacaacataaatgctctcgccaaacactacgaagccatttatcagatttggaaagaagaattacgccctgcattaaaaacgctcaactcacctgtttatggtcgcctgtatgacagattccaagacggctatgtattcgttaaatacctacagcaagatttaaactctaagctgacgaaccgtcaactgccgcgtcaccactaa

SEQ ID NO: 301405 - DNA, 669 bp, Proteus mirabilis
atgaataatgaagaaaaaaatcgtcgtcctataaaagcaagacaaaccaactgggcaactcgctgtagtcgctggctgcaaagcaaaggcgctacccccaatgggatctctttatttagtatcctattcgctgctatctccggtttgtttctctactttgctctcgctcactcccaaggcctacttcaatcaatccttcttattttaggtgcattagctatccagggtagacttatctgtaacctactcgatggtatggtcgcagttgaaggcggattaaaaagtcctgctggtgccgtttataacgaactaccagaccgaatagctgatacattgattattattggtgtaggttatggtttatccatcacttttcctatcgctattaccttaggctgggtagccgctttctttgcggtaatgacagcttatatccgtgtattaggtggtagttgtgggttagaacagcgttttacgggaccaatggccaagcaacatagaatggcattattaaccggtattgccattatctctgcatttattcccgctgaatggggagcatggctctgtttagtctccctgtggatcattatcttcggctctgtacttactaccattttgagaactcgccaaattttacgcgatttaacacaaggagttgatgaatga

SEQ ID NO: 301406 - DNA, 183 bp, Proteus mirabilis
atgactattgaacagttacaagaagaaaatgaaaagttgaaagaagttctttttgctggcgctttcttaatggctaaagcggttcataaatatgatttcggcgttggaatggaagagcaagccaccgactttatgaaggacgcagaggaacttacaggtaataagctaccaaagttcgcatga

SEQ ID NO: 301407 - DNA, 162 bp, Proteus mirabilis
atgaacacacctgagaaattgcaggattttatttattatttaactaaagacgccgcccgaaattcatttgaagaatggcgggaagatattggaattagttatgaacaatatgccgaaataaaagaatggttcaagcaatttgatattaagccatacgtttaa

SEQ ID NO: 301408 - DNA, 807 bp, Proteus mirabilis
atgagtaacccaccattagctcaagctgacttgcaaaaaacacaaggtacaaaggtaaaagaaaaaaccaaagatcagttgttggttgagtgtatcaataaaccaagtatgaaagctcagctagcagccgcccttcctcgtcatatgacgccggatagaatgatccgaatagtgtcaacggaaatcagaaaaacaccagaattagccaactgtgatatgcaaagttttatcggagctgttgtgcagtgttcacaattgggattggagccaggtaacgcacttggtcatgcatacctgctcccgtttggaaatggaaaatccaagtcaggacaatcaaatgtgcagttaattattggttatcgagggatgattgatctagctcgtcgttcaggccagatagtaagcatttcagccagaacagtgaggcagggcgatagcttccactttgagtatggattgaatgaaaacttaacgcacataccgggtgaaaatgaagactcgcccattacacacgtttacgctgtcgcaaggttgaaagatggcggtgtccagtttgaagttatgacgcataaccaaattgagaaagtcagagcattaagcaaggccagtcaaaatggaccttgggtttctcactgggaagaaatggcgaagaaaaccgttatccgtcgcttgtttaaatatctacccgtctctatcgaaatgcaaaaagcggtcattttagacgaaaaggcagaggctaatgtcgatcaggaaaacgcctcagtatttgaaggtgagtttgaggaggtaggtactgatggcaattaa

SEQ ID NO: 301409 - DNA, 819 bp, Proteus mirabilis
atgaagcccggtatctattacgacatttcaaatgaggactatcaccatggattagggatcagtaaatctcagttggatttaataagcgaaatgccagccgaatatatttggagcaaggaagctcctgttgatgaagaaaaaataaaggcattggatttcgggactgctatccattgtcttttgttagaaccagatgaatacagtaagcgatacaagataggccctgatgtaaatcgtagaacaaacgcagggaagcaagaggaaaaggaatttctcgaaatgtgtgaaaagaaaggtatcacacctattactcatgacgataacaggaagttaatgctcatgagagatagtgcaatggcgcaccctatcgcaagatggtgcttagaagctaacggagtagctgaaagtagcatttattggaatgatgaagatacggatattctttgtcgttgcaggccagataaactcattcaagagcaccactggattattgatgtaaaaagctctgccgatattcagcgattcgatcgatccatgtacgaatatcgttaccacgtacaggactctttttattcagatggatataaatcattaacaggcgaagctcctgtctttgtctttcttgttgtaagcacgactatcgactgcggtagataccccgttagagttttcaatttagaccaacaagcaaaagatattggtcgaacaacctacaaacaaaatttaagaatgtatgcagaatgcctaaaaacggacgaatgggcaggcatacgcacattatcactgccctactgggctaaggaattaagggatgagtaa

SEQ ID NO: 301410 - DNA, 255 bp, Proteus mirabilis
gtgattaccaacacctacggactcagaaacgactggtgcgaacgccaaatggaacgagaagcgtttgttaattctcaggaagagaaaatatcagttgatgaggttatggatagcctaccagaagaactactgtgcatggatttagcaaggaagttaaatcctgtatttgaaattagtccccaagcactggatgcggttttagccggaattagaacagctattcagatcgggatagataaagaggttttaggatga

SEQ ID NO: 301411 - DNA, 387 bp, Proteus mirabilis
atgacttataaagtcgatggtcaaacaagcgctatcacaaaaaatattcctattacatgtacttattttaagggctcaccttacgtcaaagtatctggcattcagttagctggagcgcctgataatgtgcttaaagtttccgcagatagcgtgaattcaaatcgatttggccttgccttatatcaaggagagagtgttgatgagaataatcctttgcgtttgaatggttcagcccctcgaggttatgccattacaaaaggtttttctaatacagggcaagacaggagccaatttactattactgctgttccttttaaaacaggtactgctgatttatctcctggaaattttacggcctccgcatcattaagcattgtttataactaa

SEQ ID NO: 301412 - DNA, 717 bp, Proteus mirabilis
atgactgatattggaattaagaacctttgtgaaaaatataatttccctgattatcccaaatgggatgcacttgatgcagtatggtggaaaacatttggtggtagtaattatttaaccaagtataaagatgggtacattatttatcataaagatagaattaaagaaatttctgctgaatacaatatacctccagaattattggctggagtagctaggaatgaagttggtgggatgcctgactttgtaaaacctgatgtggtactcaaaataagatggttggattatagcggtaacgattggattgatgaaaatttgactatgacggaaaggccagaaagaacatctatcggcttgatagctatgcagattagaatcgttgctgaaacatttggtaaagatccgagaagattatccgataatgagatccattacatatctcaatgtttaatgaaggactcatttaatttaccaatggttgctatacatctgagagacttaattgaatttgattatccaggtatagatacttcaaatttaaatgatattcagcttgttattgcaggttctagatataatagaggaacaactagaaagctagatgattttattaaatcctactatgcaaaaaaaggagatccaattagagagtggacatcttacggtaggagaattttagagaatagagatagaattagaaagcttctaggtgcaatataa

SEQ ID NO: 301413 - DNA, 480 bp, Proteus mirabilis
atgtctagtcaaatatacttgaaattaacaggaagtaagcaagggctgatttcagcgggttgttcaagttataattcaataggaaataagtaccaagataatcatacagacgaaatattcgtttactcaacaaattacgatataagccgtcatcaaaacctatctcactcaccttttgtaatgacaaaacctgatgataaatcgacaccattactacttagtagtatatcaaataatgaaatattagattgcgaattcttttattatagaattgattcacatggaatcctttctctatataagaaaataaaattaactaaagcttcaatagtaagtatatcaaataatcaccctagttcattgaatcataatgacatgcaaccatatgagacagtgtgttttagatatgaaagtattacatgtcagcacatagcggccaatacatcaggttatagtatcaaagaagattctatacgataa

SEQ ID NO: 301414 - DNA, 135 bp, Proteus mirabilis
atgaaaaaacgaacaaacagattttatactactgagtttaagcaagaagcggtcgcattagtcaccgaacaagattataacgtcccaaaagcggtagcttctttagggatcaccgataaattactttataactga

SEQ ID NO: 301415 - DNA, 744 bp, Proteus mirabilis
atgaatatcacagcagatgtacaaaaattagagccgggtaataaggttcaattaattgaggtggatggtagtgagtttgatgggccaattcttcgcttccatgcttacaatctacctcatacgccagaagagatagaggagtctaatggtgttatcaagccaaaaccaatttggtggcaaggaaatgaatacggagcatggccttacgaagttgaaggaatggcaaaaaatagtgatggtagtccagcgagaccatctctaaaggttgccaatatagatggcttaatttcatctctatgtcttcagtttgacgacatggtgcaagccaaagtaactatttatgagacatttgctcactatcttgatgctaaaaactttcctgagggaaattcaacagctaatccagacgaatgctttaaacaagtttattacatcgatcgtaaaactaatgaggtggctggcgaatccgtagagttcgagctgtctagcccatttgatttacagggagtaatgatacccgttcgacaaatccataacctttgttactggtgtatgaaaggcgattatcgtagtggtaatgggtgctcatattcagggaataaatattttgatgagagaggaaaccctgttgatgatcctgcgctagatagttgtggtggacttattagtgattgcaaaaaacgctttggtgagaatgagccattagattttggagggtttcccgctgcggggttaacgagatga

SEQ ID NO: 301416 - DNA, 342 bp, Proteus mirabilis
atggaagagtttaaatggcgaacacaaatacaagattcgccaagcggtgagttcaagcatcgcattaaagaagttgaatttggagatggttacaaacaagttgcgggtgatggtattaatccagaatctcaaacgtggccatttgcttatatgggactaaaagatgaggtgatgcctatttttaaattcattcggcgacacacagcaaaatcatttatttggactcctccgtttggtgaaaaaggtctttatcgagttaaagctgattcaatatcgatgatccccatctctggtggagtaatgaaattaacagcaacgtttgaacaggcatttagcgcatga

SEQ ID NO: 301417 - DNA, 201 bp, Proteus mirabilis
atgttagttagtgaaatggcaaaagacatagagacccttcaaacacgtactcttgctttagagtatataattcaagtaatgattaggaatatgtctgatattgaaaaagaaaaacttattagtgaattaaataaagtatcgcatgatagtcctgtaactatcgaggcgtttggtatcattcagtcacatttacataattag

SEQ ID NO: 301418 - DNA, 291 bp, Proteus mirabilis; identical to SEQ ID NO: 297883

SEQ ID NO: 301419 - DNA, 1356 bp, Proteus mirabilis
atgggtaaaacaatatttcgaatgatcaatggaagagtggttccgatggtcgttgatgaagagattgctggtaataatggtacaatgttttatgtttctactccaaagcataaaacaaatgagagaaaactaagtcataaatcatctttcgttataccaaatgcaacatgccaaaagtgtggtaaagatgttttttattatgaaaattcttttggatctagagtattgtttgactcccttggccctccttggccaattcatccgtgttacagtacttttgttgagaaaaaaaggaaattactatcagcccaagatcgtgggtgggaacccgtgattataaaaaaggcggtgatcacatcaactggcgccttaaaaattcaaggaattctcgggaaaaaagaaatacgattttcttttgatgaaaagacattctcaaaaatgaggatatccatagaggatgcagagaacttaataatatttggttcagtggaacgaggcaagattcaaacccataatggtaagaatttattttctactagatttaatgaagtaattatctctcctcctaaagaggataataaaattataatcgaagagccaattaaaatatttggtattaaaaatacagtagacaatatttattatcttgttgatattattgaagatggggaattaacagctcaaattttaatattaaaaaataaatttgataaatacttttcaaataacgcaagcttaatattaaaaaaaacaacagaatgcaatccatttgcatttaagtgtaagtctgaatcacacggaatgtatattaatctaaatgtactctctgatggtataacttatatttcaaaggattatatagaatctatttctaaaaatagaaatcctgatgataagtggtttgttgggattttaagtattgagaaaatgcaattgattgcaaatcaagatgataatttaaagaagttgttgataacaggattgctaaatagagggtttaacaccaactacttaattttagataattccttatcattgtctatatatgaggcgcataagaaaaatagagttaattcaatatcagctaaagtatatgaaaatcaaagctcgatagagatagtgattgactttgctagtgtaataacaatctctaccgaagctattgttgtaaatgattcttatataaatagggttaataaaaagaaagaacgccgattagcaatccacaagaatacggctaataaaaataagatagagataaaccttccagatatagaaaatcagattagcaatttatcatcaaaattatccacggctatggcagatgctttcgcatcagcaaaaagacgaaaataa

SEQ ID NO: 301420 - DNA, 255 bp, Proteus mirabilis
atgaaaaaaaactttcttgactgccctgtgtgtggaaatagatttaatcccaaatcacctttagaacacatacaaaaatatcatcagcatgcaacagatagagagcttattaaaataagagatgcaaggagagcctgttttggaaagccttattcagggaaaaaaattagtagttctgtgctaccaagcatgtctttatatgcaactactcataagaaaaatggtagagttaaggatgtaactgcaaggtgttaa

SEQ ID NO: 301421 - DNA, 747 bp, Proteus mirabilis
atgctaatgacaatgattaaattatttgttcttattccttatctattgttaggtggttgtagtgggcttatcaatatatatctggataataaattccccgtcaatatgaataatgatggcaataaaatcacggtttattcaaccatttcccctgaaacggtagtggaagttattggtacttatacgtctaataagtgccaacgttctcattttaatgcttcttatactaaagtcacttattcctctttaacgcaacaagtggaagcagagcgtaaaatagcagaggataataaaaacgcgacctatatcgtgcctattgatggggggggatggtgtaattggaaattgataaaaatagaactagcgccaatctctaccatttataaaaatcatatggtgattagtaaggttatcccaattgtcgatgacaaacattcaaaaatagaactatttactacattggcccctgttatagtggaagaagatgatcaatccatctattattcaccatcaatcacggaaggtgagaaaaaactatctaataaatcaaatggagaaatttattttaattataaagttgagcctaaactaaccacgactatctcaaaagatgaaaaagttatttttcctaatgggagtattaaagagccgaccttttctatttatactggaagggttagttttaatgaaataatcgagaatagtgatgaaaaggcgtttacttcttttgttcgatatattgattga

SEQ ID NO: 301422 - DNA, 642 bp, Proteus mirabilis
atgaaaaaatcattattttcactattaattctatctacacttgctttatcaacacaagctattgcacgacatgttccacttgactctaaggatataactatccaaggcagagtagttaaaaaagatgtcctaacttgtcaggttcaacctgttggtgtaattaaattacagaatgctgaaattgattcttttgcaaagactcctgcgacaatatttagtataaattttactggctgtactcagccaggtaagaatagaacagccaaagtaattattgcacgacaaaccactactcatttagtgaatactggttcgacagaaaatgataccaatgcacgagtagcattattcgattctacaggtgaacttgttccacttaatggtaacgacaccgatcgtacattttcttcagatgttgccggtgatagtggtagcttagaattttcattaaaatatgatggaccagcatcgatggatgatgctattagcgcaggtgctttcaatgctaccttatcttttgatgcttatgtcactgatgatatcgtcgaaggtgccggcagaggagctgtcatcacagaagcggtcctccgaaatggtgccggcttcgaacacttcgaaaacctaagtgacgacaatgaataa

SEQ ID NO: 301423 - DNA, 327 bp, Proteus mirabilis
atgttatcggaacaacaaaaagccgctagagcactctctgatacattaattaatgaattaaaagcacatgatattattgtgatcacggcgcctatgtataatttctccatcccttctcaattaaaacactatatcgattttattgcgcgtgcaggcgaaacttttaaatatactgaaacagggtcagtcggattacttgaagataagcaatttattatattaacgagtcgtggcgatatccataaaggacaaccctctgatttaattattccatatctaacacaattttatcatttattggtattaataatatacagtttattctaa

SEQ ID NO: 301424 - DNA, 693 bp, Proteus mirabilis
atgcatttaatatctaaacactttattgcgttattttttctcttcagtttttcatcgctatcatatgcgggaggtgttgcattagctgcaacacgcatagtctatcctatggatgcaaaacagacgtcaattactcttaataatacagataaaagattacgctttttagtgcaatcatggattgatgatagccaagatcaaaaaagtaatgaatttattgttacaccaccactgtttgtcagcaaaccagaaagtgaaaacaagctaagaataatttatgctggtaaggcattaccaaatgatagagaaagtttgttctggttaaatacaaaagcaatccctgaaattgagcgagaagaaataaaagataaaaatatattacagctagcagtattatctagaataaaaatttttattagacctcaaggattaaattttaacatagaggatgtacctaatagtcttgagtttaaaaaatcacaaggaaacataatagtaaataatccttcaccttattatgcgacattaattaatttagaagctgataatgaacagctaaatagtattatggttcctcctatgggaacagtaatgattaaagtcagcaagcctaactatagtcaaatatcttatcaaactattaatgattatggtgctagtacacccaaagtaacgaaacagattggtaagtaa

SEQ ID NO: 301425 - DNA, 156 bp, Proteus mirabilis
atgtatgaagtgcaaatgacaggatttggtcgaattcattttttgtggattgaggctgatgatcatgatgatgctcaggcacaggtcaatggactaaatctattccatgacgatttagtttttgaattaacaggaagcgaaaaaaatgacaactag

SEQ ID NO: 301426 - DNA, 492 bp, Proteus mirabilis
atgttttggttgttatcttggtttgcgctattaatatttactcccattggatatattgaatttattaactcaaaacttcttcagtgggataatccatatatagtgtcgtcactattttttgttccagtgagttactttatttcatattttgttaagttattcattaaattatgtatttacttaaacagagcgttaacacaagtaagattaaataaaaaaaagaaaaacaatattaataatgtcaccgacaaagaagcttcgattattgcaatctttgctgaaataggtctggatagcgaattgtcttttgattcaatgaatgaaaaaggtgtcatcgaattatttaataaaggaataatcgaaccaattagaggtgactatattaacgagcctaattgcagatataggattactagaaattaccttaaagatatagaatacgctctagtaaataacactaaaatacgtaaagcatatgaagaggtaaggtaa

SEQ ID NO: 301427 - DNA, 381 bp, Proteus mirabilis
atggcctattttttagctacaggtgggctcgttgttttaatgagtaccataaaagagagttacgatgtttttcctattgggtatgttaataaaaatatcggttacgattttatcggtcattggctaaatgatatggttaaagtggcgattattttggtttctcctgtattaattattatgtttttaagtgaagttgcattaggggtttattcattattttgtcctcaactaaatgcattttctctctctctttgtatcaaaggtattatcgcttttttagtattactgctcttttttacctcagcaatgacgaatgaattatatcatttttttaacagtagatacttttattctatttttatgagtatttatcatggctga

SEQ ID NO: 301428 - DNA, 306 bp, Proteus mirabilis
atgcctaaatttacactcgtcccaaatccaaccttcaaagctaacgttaaaattcctgttgccggcaaagaaaagccagaagtagttacattcacatttaaacatcactcagtaagtgagcttgatggaatgcgagaaaaaccgatttctgagttctttgagcagattattgctgactgggcgatcgaagagccatataacaaagaaaatttaaacatattgttagataactacccttcagcctctcgtgctatttcatcaacgtattacaacgaactgttaggtaaccgcgaaaaaaactcctaa

SEQ ID NO: 301429 - DNA, 390 bp, Proteus mirabilis
atgtctaaatcggcaaaaggtacgacagaacggcatggacggaacgtaaaagctaaatctggtttaaaccgctcaatactggagcaaggctggtatgaaatgcgccgtcagtttgagtacaagcagctctggcgaggtggtcaggtactggcaataccaccggcctacaccagtcagaagtgcgcttgctgtggtcatacagcaaaggaaaaccgccagtcacaaagtcaattcgagtgccttgaatgtggatatacagcgaatgctgatatcaacggggcacgtaacattttagcggcaggacatgccgtgcttgcctgtggagggagggtgcagtcaggccgcccgtcgaagcaggaacccgccgaggtgattcagacatcagtctga

SEQ ID NO: 301430 - DNA, 390 bp, Proteus mirabilis; identical to SEQ ID NO: 301429

SEQ ID NO: 301431 - DNA, 228 bp, Proteus mirabilis
atgatgaaacaaaaaaccagtgtcgttattaacgtaaaattaactttagaacatggaattaaatcaccacatgttgaagtaaaaacaaaaatatacgttcatgaagaaactccagaattagaattattactaaataacttctcagataatttagttggagaaaattcaattaaatcatcatttgaaaaagcgattataaatacattactcaataaaaaaacacactaa

SEQ ID NO: 301432 - DNA, 525 bp, Proteus mirabilis
atgtctcgtaaaattaaaaatatacttatctccatttttttagtatttattgccttggggctttatctcaataaaaatcaaatccaaccagagttaaagccaaatggttatagttattatcaaaaaggtgactataaagaggcgtttaattatttttcacaacatgcgcaaagtgatccgcaagcggcatttagtttagcaatgatgtattgggatggcataggggttgataaaaatgccttagcttcacaaaaatggttaataaaatcagcaaacttacaaaatagaaatgcactttataatttaggatatttacgtaacaaaggattaatccaaagtcctactgatgatgctcaaggattaacgtcattaactaaagctgctgatttaggctcttcaatagcgaaagattttttacatgaccttaattttcctgtgatttattatgatcaaaaagaatatacgctactccctatttatggtgagcaatcttggtctgaaaaaaaagaacacttgaagaattag

SEQ ID NO: 301433 - DNA, 318 bp, Proteus mirabilis
atgagtcaaaatagaaaaaaggcaataaagcaattagttaaaaattggcaccgttgtattaataaacagacgggttcaatttatataactgcgttattgacttataaatatatttctatacttgaaaccgcattcacagcgttacctgttaatcttaattgctattttttaaatcgtctttatggtgatagtgggtttatcacaccggctcttatgttcgatcatttacaaaaagcagcagatagtgcctctcattaccttttgagtgcgtttgatggagaaaatggtgtttggctggttgattgttggaaacaataa

SEQ ID NO: 301434 - DNA, 390 bp, Proteus mirabilis
atgtctaaatcggcaaaaggtacgacagaacggcctggacggaacgtaaaagctaaatctggtttaaaccgctcaatactggagcagggctggtatgaaatgcgccgtcagcttgagtacaagcagctctggcgaggtggtcaggtactggcaataccaccagcctacaccagtcagaagtgcgcttgctgtggtcatacagcaaaggaaaaccgccagtcacaaagtcaattcgagtgccttgaatgtggatatacagcgaatgctgatatcaacggggcacgtaacattttagcggcaggacatgccgtgcttgcctgtggagggagggtgcagtcagaccgcccgtcgaagcaggaacccgccgaggtgattcagacatcagtctga

SEQ ID NO: 301435 - DNA, 207 bp, Proteus mirabilis; identical to SEQ ID NO: 300770

SEQ ID NO: 301436 - DNA, 321 bp, Proteus mirabilis
atgaaatatcgtatattatttcaaagtgtattattttactcgttaattcttcaactgctagcacttgcctccccgattattacgcaaataattatggataaggtaattatccatcaagccctatccacgcttgatgtgttaataataggtcttatttttgtcgccgtttcagaatctgtattaaaggggataagagagtatatttatcatcatacagcaaataaaattgatatgttgctaagtttgaaattaactaatcatttattcaaacttcctatcagttattttaaatctcgccaaacaggtattattgttacatga

SEQ ID NO: 301437 - DNA, 981 bp, Proteus mirabilis
ttgaaagcggatgccacagcaagtgatgtgggcgcatattcaaaaggggaatccgataaacgctttcaaccattaggtaattacacaccatctggttatagctactcaaaggcagaaaccgataccaaatatcagccaaagggtaattatgctcccgcagggaactatgccaataaaggggatagttacactagaacggaaagtgacggcagatatcaagcgaaagggagttaccagccatcaggtgattatgcgactaactcagcgctcaatagtggactgaataataaatttgataaaggtaatgtaactcaaagtacgggaacgtcaacggttcatgtgatgagccagaaagcttctacagatgcttttcaacctaagggaaattatcagcctaaaggtaattatgcgttagtgggtgcttcatatacgaagacggaatcggatggccggtatcaagctaaaggaagctatgcaacagctggaagtagctacacaaaagcggaaagtgacggacgttatcaacctaagggaaattaccaaccagcgggcaattatgcgctagtaggcgcatcgtatactaaggcagagtctgacggtaaataccaacccaaaggcagttatcaagcttctggttacagctattcaaaatcagaatcagatggtaagtatcaacctaaagggaattatgcaccagctggaaattatggcgctaagaatactgcaagtaaggctcaatctggttggtggaaatgtggtgatactggaataatgcaacaatggaatagccataactggagagccggccaatcattagattttaagtttcctataccttttcctaatgcggtttttgttgtgatggttacagataaggacggttggcaaccaatgggaactactaatagaacaaagacaggttttacattgactggtaataataatgttttaaattttagttatatagctattggatattga

SEQ ID NO: 301438 - DNA, 297 bp, Proteus mirabilis
atgacaactatttttaaaactccctttgcaacacaaggggataaggcttctatacctgtagaaatccaaccagacggctcagtgtcttatacacaaggctatggttacgattatgagcgtgaccaagtcacagatcctgctgcgaaagatattgaacgtgaaaaaatgaacgggatatttcacgatatcacggaagcgattggcgaaattcagcgatttggttttcccaaatgggatgaagccggtaagccgtatgcgatacacgctattgtgtatcataaaaataaagtctggtag

SEQ ID NO: 301439 - DNA, 657 bp, Proteus mirabilis
atgccagctctcccaataatatctttatttactacacaaaaacctatcattggaacaatgaacacaaaaataagaagtgaatttgaagctgcaaattatgttgctgaacatcaagcaatgagcaatataaattcagatattgataaaacactaagattttctccacagtatcctttatggcgtaagtctatggagaattatgatccagcaattaatacatcagagttaaaaaaatacaaacaatcccctaaacaaactgatacgaaactaattgataatgaaataaaatttttcaactcaacactctcagccggtcaaaaattgttccgttttgattattgctcacctaattgcaatgaaataatccaattaaagcctctctcaacaacttttgatcctcaagttgcatttatgcaagctattcataataaacaaggtggaaatttccctacaattcagctttggatccttacagttacatctcctagcactaatgtttacttctatgatatcgatgataccgaaaatttaggtgatgaattagaggtgttgtttgcacctaaagcaaccttgataaaaactaattatcatacaactagtttcacttgtaagactctttctaaaaagatagaaatacttgaatttaatatttcctaa

SEQ ID NO: 301440 - DNA, 444 bp, Proteus mirabilis
atgaatatcaccaaattactcgctggtagttgtgtggtgttggtgttctggctctggtgggtaatagatgactatggaacgttaaaagcgaatcacaaattacttactagttcgttcaatgagcaagtcaatatcaatcaagattaccaagcacgcataaaatcccttcatgacctcgatgtaaaacatacgcaggaactcaataatgctaaaacagaaattagccggttacgtgatcttagcgagcgtcatcctgagcgggtgtacatcaaagccaactgttcaaaatccgaaggcgttaccacctccggcgtggatgatgcaaccaccgcccgacctactgactccgctatcagaaattattggttactcagagagcgaattgcagagtcagagcagatgattaaagggttgcaggattatattaataatcattgtagctga

SEQ ID NO: 301441 - DNA, 306 bp, Proteus mirabilis
atgccatataaagaccccaataactataactggcttgtgggcatacttatcagcgtcatgactttgttaggcactgcagctagttgtgcatataaagcgttgaatggggagcatataagttggggagtatttttccttcaagttatcgtctctatttttgctggcgcaatggtgtacttagcgtctagctattatgagtgggttccagaactcgctggtggtattgctggtttagccggttggtctggagctgagttaattaaaacattagaaaaacggtttttaaggaaggttagcggtgagtaa

SEQ ID NO: 301442 - DNA, 1212 bp, Proteus mirabilis
atgagagtcggcatttcaggttttcagcccgaaaggctaacacagataagagaagctagaggtctatcaaaaataaatcttggtagattggttgagcgttctccttcaactataacaaaatgggaaaatggcagtcattctcctgatgcagaagtattgcatgaattgagtaaaattttaaactgcccagtaacatggtttacaaaagtatattcaccacaaccggaaaaaaataaaaaaccagttttttttagaacactgtcgagtacagcaaaggacttatgtaaagcgtctgaaatctatatggaatggttacaggaattatcatcacactttcaagagtatgttgattacccagacgtaaatgttccttatttaaaagttgatgattacagagctatagacgatgaaaccataatgaagatggcttttgagtgtcggaaattatggggattaggtatagcaccagttgatgatcttttacttgtaatggaaaatgcaggaattgtctgttcacgctttgaacaaggtagttcaatgatggacggatattctcaatggaatgagcttgaaggacgtccttatgtcatattagcttccgataaagataattactttagaagtcgctttgatgctgcgcatgagttagggcatgttgtattacatcggtatataaataaactagattctatttgctttaaaccgatagaagaacaagctcataggtttgcgtcttatttcatttttccagaagaagctttttctgtggagttacctacatatccgacattagaaaactttcttgcattaaaaagccgttggggtatgtctgctcaggcaatggtttttcgtgctaataaatctgaattgatatctcaaatggaatatcaacgattatataagagtatttcagctcgagggtggagaaaaggtgaaccacttgatgacttgaggaaacctgagtctgtaagattattacctagatgtttgaatttgcttttagattcaggtgtttttacgaaaaaaagcatattagaaacttttaatttttccaagggagacttggaagatttatgttctgtgcctaaaggtttcttgtctgaatcatctgtacttgattttaaatctaaagtgcagttaaaaaatagcttagagcaaaaacagaaggcacatgaggctcaaaatgtagttagtctttttggcgaaaagtaa

SEQ ID NO: 301443 - DNA, 669 bp, Proteus mirabilis
atgaataagaatgagatcatcaatgatattgatgagctaatagcaaacgcttttaatagagatttttggttaaatgttaatgataatttaggacaacaatatttagctgcaaatgatgtaacaaaaggcactagcctgaaattagaagagcctgaacaagttcgatttaggccacaagcaaggcactatgctttaaactctgcactcaggagagctgcacaagcttccggcttggtttgtcgagacatgcaaactaatcccaagggggagaattatgtagttgttgagtctaaggggattcaattagggcgaataggtcaaaatcacgatgagaaaggaattaaaggtgctaagcatagaaatttgttggcacaacttaatctggaattagaaggatatacttttgatctgtttgataaggaaaataacactaaaaaatcagtggaaacattaggggttttattggtgaatgtaaatccaccaaaccatctccctcaagaaactatgctcgatttaagagtaatagtaccatttaccaatttaaagggtttccactataataaatcaattatagaacttctcgaactctacactggtgagaataagacaattattcctgatttggttttacctaagcttaaaaagcgcctgaaggatcaggaaaaataa

SEQ ID NO: 301444 - DNA, 1227 bp, Proteus mirabilis
atgtacaacaatgaattaaaattatttgcgcaagagcaagagaaaaaactgatcaaggctctggcaaatactagggaacactcgggccctatttttgaagcaagaaaccgagatgactatcagcgagattatgcacgcattctgtattcatcatcatttcgcagattgcagggaaagatgcaactctttgaagttgatcctgaaaaattcaacagaaacaggttaacgcatagccttgaagtagcacaaatagctcgaagtatcgcatcagacctcgaactagttcatcccgtagtagttgagctagcagctctggcacatgacatcggcaatcctcctttcggtcattcaggtgaaaaactacttaacgagttatctaaggatatcggtggttacgaaggtaatgcacaagcactacgaatcctgaggacacttgaaaaaaaatatgcagactgtagcgggttgaatctaactcaccgtagcttactttctattattaaatatcccaatactcggttgactgctgataaattcatttatgatgacgattttaatttttacactgatctgcttgctaaaaaacaactagacctgaaacttggagagaaaacgattgatgcgcagataatggatctcgcggatgaaattgcctatgcagctcatgatctagaagatgctctaagccggaatatggtcacgatcgaagatattgagtatgagtttctgatttctgataaatttcaaggcgctttagctcaattcaaagagattgtcagtaagtcaaaaaaaactgcttttcaagcaatttcactcaatacctcagaagaattcgccatgattttccgtaaggaattgacctccaatattgtcaatcacctcgtcacagatatttccgtagtaaaaaacaaaaatggctttcatgaacttgggttcggtaaactgaacgcattgtctgaagggctcaaaaaacttctttttaaagtaatcatgcgaaaacgcaatatactcagctatgaattcagagggaatgagatcatcaaggatttatatacattctacaataaagatgataattataagtttctctcacctgagcttaatttttccttacctgaaaaaggaactgatatattcgaagctaagaaaaaacgagcggttatcgactatatttcaggcatgatggacacatttgcaataaaagaatgggaaacgcactgcctgaaataa

SEQ ID NO: 301445 - DNA, 270 bp, Proteus mirabilis
atgcgtatggaaaaattaaccaatgtaacttatggaacagcaggcctaacggccttttttgccagtctctctttatatgaatggggatttgttatcgggatggcgttcagcatgcttctgggtttagccacttattttatgactcgtcgagagcaacgaaaacgcactcaattatttgaagagcttgttcgacatgttgacccacaaaacccaactgaaaccctaaaaaggcttgctgaattaatggtgaaagcgccaaaggatatttaa

SEQ ID NO: 301446 - DNA, 303 bp, Proteus mirabilis
atgaatatgaataaacctattagaaatgcagaaaaagataaaagtgacgctcaaatgaattccagaatagggctatatatattttttgctggaatagtattacttataagcaaatacatatggggaacagatgttagttccgcacttgctggcggtatagctggaggtggtttagtctactggggaatgaattacgacaaggttagtaaactaaagcgaaaacttgatgatctatgttataaaaaatataacaaacctcataaagattcatggaatgatattgctgatgacgaggggtattga

SEQ ID NO: 301447 - DNA, 624 bp, Proteus mirabilis
atgcaagatttttttaaaaatttacctcagtatgcagctcttatcactgccagcatcgcaatttttttatttttattgaaagagtttttagaatcaagaagaaaaaagaaagaaagagaacaaaatagatttgcaataaacatggttgcatcaattcaaggaataaaaatattgaagcaactattgtttatactccaaatatcaaatgaatttaaaaatattaattcagagtcaaatattgtcattaaagtagatcatttaagtaaagcaagaaagataattattaatgaagatagaataattattgttccagaagctacagataaatttagttatgaagttattcttttagtggcaaagttaggatatgaaaaatttgctcttttttcaaatatgaatgatgctaatacttatctaagtgataccattaatgtattcttgaaaaagatagaaaaaaatgagattaaaagagtttgttatgaactgaaacaaacaaaagggcttaaaaaaatggtgggaacacatcttaatgggctagcaccaatctctgcgagtatggagaaaaataaagactataagtctattatgaaaaaaatagaggaagaactaaataggcttttatga

SEQ ID NO: 301448 - DNA, 291 bp, Proteus mirabilis
atgcagggaactaattcaactaagagcattcaactagaagttctttacatgggtaaagattgcatttgtgtgatttttctcaaagggcctgcgccagtaaatgtattgcaggacattgaaactcagctactagaagtagccgatgagcatgagatgtttactaagcacggcacatatcaaatcagcgttacgagagataacggtgaatatgatgggttaggcaattgttataacgcaccttattgggatttcgatattcaatcatttgaaccaatgccagagggtgaataa

SEQ ID NO: 301449 - DNA, 510 bp, Proteus mirabilis
atgatacgttcttttgtcacttttttaagttcatttattcttactggatgcaatgttattcctccgagtgacattaagcctgttaataattttgatctatcacgttatcttgggcagtggtatgaggtagctagaatagataatcgttttgaaaaaggcttaacgaaagttaccgcaaattattcattacgagatgatggtggtgttaaggttattaatcgaggttggagtcaaaataaacatcgctggaaagaaagtatcggtaaggcttattttgttgattcatctaataaaggtgcattaaaagtatcattttttggtccattctatggtggatataatatcatcaaattggataagaattatcaatattctttggttgtagggccagataaagattatttatggatattatcacgtacaccgaccatgccatcaaatttgttgaatgaatatattaattttgcaacatcatatggatttgatagtaacaggatcataatattttaa

SEQ ID NO: 301450 - DNA, 270 bp, Proteus mirabilis
atgtgtatggataaattaaccaatgtaacctatggaacagcaggcctaacggccttttttgccagtctctctttatatgaatggggatttgttatcgggatggcgttcagcatggttctaggtttagccacttattttatgactcgaagagaacagcgaaaacgtactcaattatttgaagagcttgttcgtcatgttgacccacaaaacccgaccgaaacgttaaaaagacttgctgaattaatggtgaaagcaccaaaggatatttaa

SEQ ID NO: 301451 - DNA, 3276 bp, Proteus mirabilis
atggcgggagcattaggtagattaaatattgatttgacgctgaatacggcaaatttcaccaatgcgatcaaccgtagccagcgccaaacagaacaatttgggcaaagtattcgcgtcagccttcaagctatcaccgtgcaacaagagcgaatggtatcgcaaaccgcaaaatcctcggcgctttttgcccgctttgcgagtgtcaccgcaagcgcattatccattcatcaagtcattaattatgctgatagttggacggaattacagaaccgtttaaaactggtgacagaaagttctgtcgagttaaataaagccacacaagcggtctatgatattgcccaaaaaacctatcaatcgttggatgctacagcacaagtttatcaacgttttgcggataatgccgatcgcttaggcttaagtcagcagaaagtggctgaactcacggaaaccgtctcaaaagccgtggcgatttcaggcgcgagcgcaaccgcagcccaagcggcattaactcaatttggtcaagcattagcctcggggcagttacgtggcgaagagctgaattcggtgatggagcaaacgcctgcgttagcgaaagccatcgctgacggaatgggtgtcagtgtgggcgaattaaggaagaaagcccaagacggtgaaatgacgattgagaaagtcattcaagccttagagcgtgcagccgacagtgtggataaaaaatttgctaccagcgtgacaacggtgagccaaggtttcaccaatcttcaatcggcgatgacaaaatttatcggtgaagcgaatcaaggtaccggtgcgactcagctttttaccacagggatgaccactcttgccgataatctatcgttagtggctaaagtggttgaaggaattgctgtcacggcattggtagcaaaactctctcaatggacgaaagccacttatctgaaaaatcaggcaacattgaatgaggccaaagccacattacagagtgcagaggcaaacagtgtggcagcaaccagtgccgtgaggaaggcatgggcggataaagaagccgctacatcggcgctcaatagagccaaaatggaatatcaagttgctagaggcactaacgcggaaaaaatcgcactcgataatcttatcgccacaaagtcactcgcaagaacagcctcgctaaattatacacagacattaactgccgaaaacgttgctcaacgtgcattaacgaccgctcggcgtcaatcaacggtggcagggcgagcacttaacagtgttatgggattagcgggtggccctattggattagtgttgacgggtgttgcggcattgggcatgggattgtatgaatacagcgaaaatgtcaaacaagccaaactcgaatcgattgaatttgccaattcccttgatacatcaacagaagcgttaaacaaaatgagcaatgccacgttagtggcgaatttaagcaaagtttcatcgggcattaatgcgcaattggagaaagtcgaggagcttaaacaacaggtcatttccttacaaggtctatcaaaatacagcgttgagagtgagaaggcgtttactgaacaaggtgtgggggatttataccttaagcgagtggctgaaaagcaaaaagagcttgatgccgcaatgggaatgtatgcagagcaagtcaataacttagagcgtcagcgagccaatatgcaaaatatgttggcgatacttaaagaaaaagtaggtgatcaagcccctgaatatagacgttatgccactgagttacaaaatgttgatgtcgctattaattcacttaaggcgagtttaaagagtttaggcattgaatatgaatcactcattgatatcacgcttcaggcgacaaatagccaagtgaatgccgccacggcgattgctaaacagattgatgaatcgattgaaaaatcgcaacgttcagtggcaaaagcgcaagccacagggaaggcattagcgaaattaaatgcagaagatgtattggcttcacgcaaaattacgccagatatgcaaggctacgataaggccttacaagctgaaattgaggcacaactggcactgcaagccaaacggacgtataagcccagtcacaaatcaaccattgattatgccaagcagtacaccaaaatcttgacggaattagaggaaaaacaagcctcactgattgcggatgggcaaagtattcagctgtacggcactacctcttcctttaatgaatacacatccgcattagccgatatcaaacagaataaagataagtttgatgccatcttaaaaatcgatcccaacgccattgagacgatcaaagaaaaagcgaaagccattgatgatctggcgcgtgccaactcggtcgcgcaatttgcttatgatcgcggtaaagaaattgagcagatgcaatttgaaacttccttgataggaaaatcgcgcgcagagcaagaaaagctcaatgcccttcgtcagattgatgtgctgtatcagcaagccagtgtggatttaggcgaaaaagagctggtgaacttacaacgcaatgttgaactcactaaacagcagattgaggcagagctgaggaagcgagaggccatgaaaggcgatccgatggcgggattaaaacaaggcttatcggatttcagtgagtcggccatgaatgtgatggagaacgtcagaaacgtcactaccaatgcgctgaataatatgtctgatgcattagccgattttgctttaacgggcaaaggaagctttaaagattttgccaatgcggtgatctccgatatcactcgaatggtaatgaaaatgctgattttcaaagccattgaagcaggcgggcaggcaatgggctttgatatgggatggatgagcaaagggcatgcttacggtggttatacggggcatggcgggaaattcgaacctaaagggattgtacatggtggtgagtttgtttttaccaaagaagcgacggctaaattgggtgtcggcaatctctatcgcttaatgcatgctgcgcaaggttatgcttcggggggctttgtgggggcggtcgcagggcgaataccggttacaccgcaaccgacgttagcccgtgcgagtggtgtacaaatgacggtcgttaatcatattacggtgacgggaaatggtgacgctgtacttgcgcaggcaatgaaggaagccgcacaacaagggacagaagcaggcgcacagaaagctcacgcgatgatgttacaagactttcaaagtaatggtgcagcacgcagaacattaggagtttaa

SEQ ID NO: 301452 - DNA, 597 bp, Proteus mirabilis
atgtctattcttgaatggccaaaagaggtgatccccacgcaggaaaactggcaattattgagtaacagcaaaacctttacctcaccatttaatggaagtagtcaaacggtacgctttccgggaagtcgttggcgttgtgagctgacattcaataatttaaatgaagagaaatcgcgccagttagaagcgctggtggcttcattggatgggatgtcggggcgagtcaaaatagccagttggataagaaaagggcgttatgggtatggttcgcctcgcattgcaataccgagccaattaggtcatcggctagaaacaaaggactggaagcgcaatatgcgcgtgttacagcaaggggatcgcttaactgtgggcaatgaactcaaaatggtggtggcagatgtagtcagtgacaataatgggcgtgcaaatattcctatttcaccgatgttaagaacgtcgcctactgttaatgaagtgctcgaggttgagcgtccttttggagtttttcggctcgttgataatgaacagggtaaatttcagcatcgtcgcttggggtatacccatatcacgttatcttttgaggaggtgttgtactaa

SEQ ID NO: 301453 - DNA, 582 bp, Proteus mirabilis
atgcaatatcatccattttctgatgccatggtcaacgcgattaatgagggggcttatatcgttttagctgccagactcgatttgaaatcaggcgtcacctgtgtgcataccggtgttgggcaactgattattgcgggggaaacctatttaggtgtaggaagtttaggcgaaatcagtcagctgaaagaaaacaagacaaccagccctccacaattacagcttaaattagcgggttttgataaatcgctggtgggaatggtgatgaatgagcaaagtcgaggacgagaagtgcggttgatgatggttgccatcagtgaagagggaaaaccgcttcttgctgaagtcttatttgtcggacaaatcacatctatcaatgtggtgtctggtgaagagaatgccgtatgtgttaatgtttctaatcgattcgagcgatggtcaatcgggttacccgatagattcaccgatgagtcgtggtcatctcgaagacaaagtgatcgcatctttcgctatgtcgctcaaatggctgaacgggcaatttattggggcagcaagaaagatgcacctgcatttatttataaataa

SEQ ID NO: 301454 - DNA, 399 bp, Proteus mirabilis
atgaaacaacccaactggacacttaaattacctgaaaccataagggcggcgatgagtcgccctttttcatggggtgaatttgattgttgtatttttgcctcagaatgtattgacgcacaatgcggtttctcgccaataaagccttatctcaatcactataaaactaaagctgaagctttcaatcttatcaaatccaaatttggctccttagagaaagctgtatcacgctatttcaaatccattgagattgagcacgtccagcgtggcgacctcgtactgtttaaaggtgaggacggtgactgtttagccgtggcctgggcggggcattattggggggtaaccccacaaggcgtgaagccagtgcagattaacccaatcaaagcgtggagagtggaataa

SEQ ID NO: 301455 - DNA, 3087 bp, Proteus mirabilis
atgggtgggagtggtggattaatttcaaaagtcgtgggtgctggcttaatgattgcggggctatttaccggaggcgtgacctcggcgataggcatggcactgatggcagcaggcgttgcggttcaagtcgcgggttcgcttatctttaagcctaaactgccttccatgaattatcgagataccggtgaacgcaaacagatgttacgttcatcgtctgcgcctgaaaccgtgatcgtcggaaaaacagtgatatcgggtttgcttttctttgccgaagaagaggcgggtgaacaagatgaaaacgaaaaaatcacactggcattagcgttggcagggcaccccatagaaaaaatcgggaagatttggttaggggacgatttaattgagacgtttggtgaatataccgttcatgaagtcaaacacctttggttgaagagtttaaaaatcacggcacctgttgttgaagtggagttacataatagcagagaagatgtcgatccctttatgctaaaaaattgcccgtcatggaaagaggatatgattggtcgaggtctggcgtggttacgtgtgacactcacgtttgaccaagaaaaattcccttatggattacccaatgtaaaatgtgaagtttggggaaaacatctgtttgatcctcgcactgggcaaaccgagtggagtaataatggggctttagtcattttggattattaccgccattatttaaaagtacctgatacggatattgattttgacagctttaaacaggcggccgatttatgtgatgaaaaagtgagtctaccagaaggtggatttgagtcgcgatatacccttaatggtgcctatgacttaaatgagagtccatcgagtgtcttggaagcgatgcacaaatgcatcaacgcggaaccgacattcaccgcaggaaaacacggtattcaaatcggtgcttattatgggccggcaataaaaactatcaccgaatcacaattgattggcactgtcacgtgtacccctgaaacaggtttaaaagacgcgaccaatgcggtgtatggcacgtttattgatgctgaacagttatacacaaaaacggatttcacgcctgtgattgtagacgaatgggtgaaagaggatggcttagaaattcgagagaatatcgactatcgttttgtcaccagcccttatcaagcccaacgattagctcgccaatatctccgtaaaaagaaagcaggaagacgggttcaactcacgatgaacttagacggctatgcttatcgtccgggggaagttgtgcttttagcattaccggctttggggattagtgggctggaatttcgtattgccgaatggtctttccatgctttagacggtgtggctttaacgttggaagaggatggtgcctatctatatgaagatgtgattggcaaaccgtttgagcgtccgccatttgtgagtttacccactggcggtgttgcttcacccattaatcttacctttgttccacttgctgtcagtgacatcgtgcaaggtacactttcttggcagaatgtggcgtctgatgtgcgttataatacggtcaatattttccataatggcaaggttatacagtctattcaggtgccgggtgagcgtgttgatattaacggattagcacgagggacttatcgtgttgaagttagagcgacgaatatggctggtgcgatgtcggcacccgctatcagtgattttgccatccaagcaccgcctgctcccattaaggttgatgttacttcgggaatgttcagcctcaccgtctcgccaaaacaaggtgatagtgctgtcttgggttatacctttgagttttggtttagtgaggaaaagctcgctaatctttctgaaaatgaagtgatcaccaaaacaaataaagttggccaagggaatttctggacgcaagagaatttaaaagcaggacatacgtattatttttatgttcgaacaatcaacagctatggcaaatcaccttttgtggaggcttctggtgtttgctcagctcaaaccgatttaattcttgagggattgacggggcaaattagtcgagatcaactcgcacaagacttattgggtgagataaatagtaaagctgacctatcagccgttgttgagttaaacacgcaagtgaaagcgaaccatgatgcgattttagcggagcaagttgcacgaggagcggtaattaaccaagagcaacaagctcgcgctgaagctgataaagcggaggctcaacaacgccaattcttagctacacaacttcgtggtgattatactggcaatgatttatcgaaagtcaccgcaggacttatctccgctgagaagcaagcgcgagttacaggtgaccaagcggaagcgaaagccagacagtcattggaaacacggatgaatgggaatgtttccgcgattaataaatcattaggaaccctcacctcgaaacagcaagcgcaaacacaagagatttcaacgctcaattcaaatttgaaagggaaagccgatagcagtgcggttaatgcgttaaatacgcgagtgtcgaatattgatggaaaaatgacggctaccgctcagcaaatcactcgtctagaaagccaagtgggtacaagttcagccaaaatagagcaaacctcgaaagtggtcactgatttaaatggcaaaatttccgcatcatggacaatgaaagtccagcaggatagcaaagggaataaagtcattaccggcattggcttaggattcaatgcgcaaggaaatagccaatttctggttaatgcccaaaactttgcggtgatatcgtcattaaatggcaaagtggtgacaccgtttgttgtgaagaatggacaggtggttattcatgaagccttaatggataaagcgtggatacagaaattagtggtactcaattattttaaatcatcgggatttgataaagggaatggctttttattggatgccaaaaacaatattttccgctttacgggtggtaatggggcattaaatatcaccaataatcaattggtcgtcaaagatgagaaaaaacgccttgtgatgaaaatcggttatctagggagttga

SEQ ID NO: 301456 - DNA, 1002 bp, Proteus mirabilis
atgtatggtctcgaaatttttcctgctgaaggcggtaaaccttaccgtttaacgcgtgatacgcaaattctctgttatttaacctcttatcagatagggccagaagattggccccattatcgacaaccgaaaaaaacacggagcaaagtcattcatgaagccatggggtatgaggcgttcgccatcccaagagtggcttctgtgtatatggcggtgaatgattatgcgtattttcagggaataacgcatatccgaatggaaggacctgtattacgttatgagtatgtttatgacaatgttcaggttcaagacccacagatggccaaaagagccaatatggtggtcgatatttatggtatcccgttaccggatagtacaaaaccaacgtatggtgtggagtggtatggagcctttcagggatttcgaagtgcgattacacgtaatacacaaatgacttattgtgtgtttcgacaaaaaatccaccttgaaggcgggcgctattggtctttgccaacaacattaccgcatttagataagtgtgttgtgttttatcatgccaccaaccctcaagcggaagtgagctatttagcgcataaaaagcaattatacagttcagcccaaacagacatttatgtgtgtgttttcgtttcaggaatggttttgaccccgaagagacgttggggtttatcactgtacagtgaagatggaactctggtctttaatacggactatctgccttttacccgaggaaaatcaatggcattgttattacgggaggggagtgtagagactccatatagcttgcctttagtctgtgcaaccagtcagtttgtgaatgcgtcttatcaggatgataatattgattgggccaagcgcaatacagggatacgttttcggggaaaacagatttttgtgagtgaacggatacgtgatgctcatcggcaacatcatgtagagcaacgtatccccttttatgtcctcaatggttcacattatttttag

SEQ ID NO: 301457 - DNA, 1191 bp, Proteus mirabilis
atggctcgtgatgaatctgaacgataccgttttattgataattccgaatggaatgaaaattttgctctttctgaatccgccttgttgaccaaaatactagaaatacatgaaaatattgataaggcaagattacaaggggatactcataaggccccggttgatttttttatcccactaataaaaacaaaaaacaaactatcccctcttttcaatgagttgatatctaatccattatttgcttctgcaaagaatattattgaacccatgatgcgttggtatgaagatgccgatggtaattttgtagagcaatttcagacaacaggttttaatcaacgaatatgggagctgtatctattcgctctgttgactgaaaatgatataacattcaatcagaaagaagctattcctgactttatttgtgacagcttccaaggtgaattttgcatagaagctacaactatcaacccttctataatagagggtaaagttgaagaattgccacaatatcacaacttaaaagatttggaagatataaagaataactattatcctataaaatatggaagtgctcttttttcaaaacttaaaaaaaaatattgggaaaagccagtttgcaaagataagcctttagtttttgctatcacagattgtctcagtcctgcttccggtaaagattctagggagtcattaccatattatctttatggatacagacatgaggtcaaagtagacgataatgggagtttgacaatagttcctgttaagatagaagagcatacttgggggaaaaaagtaataccttcaggtttttttaatcttccagaagcgaaaaatattagcgcggtgattttctctaatgatgcatcatttggaaagttcaatcgtatgggacttctaaatgaatttgcacctgaaggttcagagatgattaggacgggacttagaattaatcatgatgtcaatgcaataaggggtcaatcatttagcctagaagtcggttctccttcctaccatgaacggtggagtgaaggtcttgaggtttaccataaccctaacgctttacatcctctatctaggaatgtatttcaagaggccgcgaatcattatttatccgctgatgggcaaattaaaacatatttaccagactttcatccgattagctcaattactaaagtaaaacatttagagtaa

SEQ ID NO: 301458 - DNA, 2442 bp, Proteus mirabilis
atgatctggcgttggttttggcgtgagtggcgctcgccggctttattaattgtttggctctctttagcgctggcggtggcttgtgtgctggcgttagggcgtattggtgatcgcattgataaaagtatttatgctcaaagtcgtgatcttatcgccggtgatttagtgctacgcgcctcgtatcctgttgatgaaaattggctagctgaagctaaaagaatggggctaacactcagtcgtcaaatgcaatttaccaccatgtcttatgccccagaaggtgatactcctcaattggcgttggtaaaagccgcggataacttatatccactctatggtgagctagaaactcagcccgcagggctaaaagcggagaaaggcacggcgttagtagatgcaaggttactggcgcttttgggtatcaaggttggtgataatattgatgtcggtgatgccacttttacaattagcggtgtattagttcaagagcctgacagtggttttaatccttttcaaattgccccgcgtattttaattaatcttgctgatgttgaagcgactggtgccgttcagccgggaagccgcttaacttaccgttatatgtttgcgggtaatgaagcattaattgatgaataccaacaacgctttgatcccttattaaaacctgaccagcgttggaatagcttaaaacaagataatggtgcgctatctcaatcaatggagagagcaaaaaactttttactattatctgcattattaacactattattggcgatttctgccgtcgcggtttcaatgacacattattgccgtagtcgacatacgctaattgcggtattaaaaaccttaggtgccgataatcatgcattacgtaaatggattatagggcagtggggggtgattattgttgcggctatcgtgggcggctcactggtcggttggggctttgaattagtattgttgcagattttagcaccggtattaccaaaaagtttacctgatgcgagctttatgccatggctatggtcggttggctctttactactcatcgcgttattgacggggttacgcccttatcatcaattaatgtcaacgcaaccttcccgcgtgttgagaagtggtactacggcacctagttggccactacgttattatttacccatcgttgcattgattgttgttggcgctttaactctgtttgccggaacgggtgttttattgtggtctattttattaggtatcgtcgtcattgctttcttgcttggcgtgattggttggcttggattatggcttttaaagcaatttaaatttaagcaattgagtgcccgtttagcggtgacacgtttattacgccagcctttccaaaccatgacgcaattagccgctttttcattatcctttatgctattgacgctattggttttgctgcaaggggatttattggaaaaatggcaacagcagttacctgaagatagtcctaactatttcttgattaatatgtcaaagcctcaggtacagcagattaatacattattagccacttatcatgtggcaccgacagatgcttatccggttgtgttagcacgtttaacagcgattaatgatcacaatgcgaaagtgtgggcagatgcacgggatgcggggaataataccgtacgaagagagcttaatttaacgtggcacagtgaacttcctaaagataatgttattgtcgaaggctcatggcctcccgtcggtaatggcgtttcaatcgatcagggggttgcacaaaagttagaaataaagctgggggatgagctaacttttgttggtgatactcgcgagtttaaatctgttgtcaccagcattcgccatgttgattgggaaaatatgcgaccaaatttcttctttattttcgcagaagaagggctaagcaatcagcctgaaaaatggatgagcagtttttattacaatggtgatggaagtttgatcaccgcattaaatcgacaatttcctacggtcagtgtgctagatacgggtgcattaattcagcaagttcagcagatcttacagcaagtcagccgagcattagaaattatggttggattagttatgctgtgtggggcattgctattagtggcacaaattcaagtcggtatgacacaacgtcgtatcgagttggtggtttatcgaacattaggcgcgagtaagtcactattaagacgcacgctttgggcggagtttgccttattagggttaatggccggtttagctgcagcgataggggctgaagttgcattagggttgttgcaaaaatcggtatttaatttcccatggcaaccacaatggatgatgtggatagttgttcccgctcttgccgccgtattactttcactttgtggtagtattttaggggttaggctattacaagataaaggccaatatcgtcgtattcagggagaatag

SEQ ID NO: 301459 - DNA, 324 bp, Proteus mirabilis
atgaatgaagaattaatcatgaaatactcaattggtatcggcatagctttggcgtgttttatcgcctttcttgccatatcttttttacatgataaacaaaaaaaacgtcgtagaaacataattattcacatcatccaagctattttactttgtagtttagtggctattgtaagccaatactgtgaaatggcggtggtagattttaaactacactttatctcttttcagatgattaatttctttagctatcttgctatcgcattaatcctacctcagcccgtattatttcgcgtatatttaaaatcactcttcttgtcatcatga

SEQ ID NO: 301460 - DNA, 600 bp, Proteus mirabilis
gtgacacaacttacggatagcataaatctacaaagtcgtgcttatcatgataagtttgaaaataccctttatatgtatcctaaaaaaggtaatagggtcgattatagccattatgatgatcacagcacaggcgctgcattacaattcggtatcgatatggaggaaagtgatctgctctcttttgcggtacattggaaagatgacgttcaccgtgcccaaaaagaaaaaaacggtgattgggtacgttttaaagatagaacttggtcattagccacagaatatcaatgggtagtgagtaacgatcttgatgtcgttggcgccataagttacgactggcgcaaaagtatcgatacagataaaaaggctgataacaacaaacaaaatgccattaactgggaaatcatggctaaatattcattagccaatgacgataatatacgttttacaatctctgatcgcagtcgcttccctacccaaaaagagcgctataccaccgaaaaacccaaagatggatcaagagggattattaaccccaatttagatccagaacgcgcattatcctttgatatgacctacgaaggttatctcaatgagaaatga

SEQ ID NO: 301461 - DNA, 459 bp, Proteus mirabilis
atggcgcatacgctttatcgtcacggtgaagcgctatttcaaaaccaaaacagtggacgtgttgattatctaggcttggatattggtactaaaggaaaaatgaccgattggctagaacttggcctaaattatagctatatccatagtgatccaaagcaagttgaccatattgaaggtttaccaaaacataaagcctatatgtggttaacctttattcctgttgaacaagtgcgctttactattatggaagaagcacaaagttggacttataaccgtatagatgagaataataaactgactggctatacaaaaaccgatctacggttagattatgatgttggatatggtatttcagttaatgcttccattaataatctttttgataaatcttatcaatatacacaaggttatatagaagatggccgtaattattggttaggcgctgaatataaattctaa

SEQ ID NO: 301462 - DNA, 741 bp, Proteus mirabilis
atgctggattttttaaaaaattatgacaatttaaccgtcagtgaaaagaaagtattaaagtatcttaccgataatatcgccgatatcccctatttaaatattaatgatttagtcgctaaaacctttgtatcaaaaacggtaattattaatttatcgcagaagttaggttttagtggctttaaagagctaaagtttcaaattaataattatattctttcgcgtaataaaatagaaaagagtgatcactcatcttataaaaaacaactagagaagaatattaataaaagctttaccctcatcaatgaagagcaaattaaagagtgtgctaaaaccctgcgccattctcgtaatatttttattgtggcaaggggaacaagtaaagcagtcggttattatcttgaacacttattgtttgcactgggcctgcattgcttttttattaatgattataacttatcagattcgtttacacgtttagtgaatgaagatgacacggttatttttatctctctttcagggggaactaaaaagatcattgaaacggcaaaaattgtgcagttaaaagaggcaaatattatcagtatgacagcctttaatactaatgagttaaccagttatgcgacgcatacgctattttgtttcgcggataatcatgatacgaaaaaagatgataccaagtcacgaattggtttttttattttggttgatttgttaataaatgaaatagaaaacctactttaa

SEQ ID NO: 301463 - DNA, 525 bp, Proteus mirabilis
atgtctgccgaattaataacttttattgtcgctattttagctggggtcgtttctatcgttggtcttgttatttcaaaagaaggtaaaatttctgagtttaggcagttatggataaatgacctacgatctgcactaattaagttaaataaaaatatgttcatactccaagaaatgcatattaaagagatgcctgaaaaggaaataatgcatcaaaaggctaatgtaaaagaatcaatatcagaagtgtatctaagaataaatacgtcgaaacccaataaagctgaaattgatttaataaacatcattgaatcaattaaatcacaattaatacatatacctaaaataggtctttttgagtgctacgaaaatgatctcactgataaatcagcagccgtattaaaaaatgaatggaaaagagttaagaaaggagaattcatctatagattttggacttatatatttacctctatattttttattacgctattatatttaataatatcattcataggatttacaaagtaa

SEQ ID NO: 301464 - DNA, 321 bp, Proteus mirabilis
atgaaagtttctaactcttacccttcagataaataccctcgattagcatctccgtcattagcaaaaaacagagaggaaactctagctcaagctattgcaatgattgacggtcaattgccgaatacaagtgtgccagatagggaaaaaagattagcaatggaactgctacacataaacttggatacatcgaaaaatcatcctcctcttcctgagtatattcgagcccaacgagattcaaaaaggacatatgtacctagtaataaatttgaagtcgattactacggaagtgatcgccgtcaaggtcaatatttaggggattaa

SEQ ID NO: 301465 - DNA, 165 bp, Proteus mirabilis
atgaaaattgaccaagatattttccgtctagcgcaagctcaggcgcaggtagctattcgccagaaatgtgaggatatctggtggttagcaatggaattactcaaagaaagttatcaggaggatttatgtaaatttcatacagctactcgaacggaattcggataa

SEQ ID NO: 301466 - DNA, 684 bp, Proteus mirabilis
atgaacaaaaaaactactgcatcacgattactaaaagcactcttggcggcttcttttttatttcctgctgggtgctcaataacggcacctaatagcgaagaggctcaatttgctaaaatgggagaggataaatttaagctcaaaagtggtaactcagaaagcgttgcgactctcagagagaaatatttagacctttacggtagtgaactgataaaaccagaaacattgtcatgccgatggaattctaaatgctacttcaagaggtggctaattaattacaataatggggtagaggaaatgaaagccaaggaattggcggataagaaaaagaaacaactagaagaacaaaatctgcgcagagaggcatgtatgaaaaatccagagtgcgtaagaggtgagaaaatagattcagcagcccagcagttaaacatgggttataacgttctccagggaatgtaccaatatgataagggtggtgctgacaccttggcaagaatggtctgcagagaatcaggtaaggcacagagagataaagtaagcaaagaacacatcaatgaatgggttaactctcttgatggaataccgccttatgtaaggcggtatgttgttcaggtagcagaatcatgctgggatttaagttcgctaggtatttcaaacgggacagttaaattacggcgttattaa

SEQ ID NO: 301467 - DNA, 324 bp, Proteus mirabilis
atggcaactataaaagtgaagaaatcacgcaaaccagactttttacgtggtaactctgcaaatagacgtcatgccagacggaaagtagaagccattgcaattaaagatattgagatgcaactagactcaatatttcaactagaaactaaaaaactaaaccgcgttgaaaagacactatcactgagccacattcctgtgactagaagtattgaacctaaattcaaaccatcagtagataactgttgcttacctaatgtagcagtattttcaagagttaaaacaaaacagccaaacagtaagtttagagtgacagttagggcttaa

SEQ ID NO: 301468 - DNA, 522 bp, Proteus mirabilis
atgaatactaatggactcttataccttattgatgccaatattgttatacacgccaattctttttattatcctttaaatagagttcctgaattttgggagtggatattatttcacgcacaaaataataatgtgaaattacctaccgaaattataaatgaagttaaaggtggcgataaagatgaacatgcaaaatgggttcatgacaaatcgaataagtccatactgcaattaaatgaagatttaaatataactaatctaaataaagttctaagagaaggatatgccaacgatcttactgatattgaattagaaaaaatagggcaagatccttttttaatatcttatgcaatgtcatctcctcacaacagaattattgtaagtaatgaaacatctagccctagcaaaattagagccaacagaaaggttcctgatgtttgtaaagcaatgggggttcggtgctgtaatgtttacactatgataagagagttggactttagaacaaattggaaaaacagtatttaa

SEQ ID NO: 301469 - DNA, 1167 bp, Proteus mirabilis
atgtcatcaccgaatcctaaaatgctaaaatgggcaagagagcaggcaggtttaaacttgcatgaagcagctaaaaagctgggcttaaagagtgcccgcttttctccggaagaggtgttgatgatgtttgagttaggtgaaaaagtgccaactcaaaatcagctgggtaattttgctaaagtctaccatagaccactaatatctttttacctagaaaaaccacctgttattgcaaataaaggcgatgattttcgtacactttataatgctccagacccactagaaaatgcaactgtcaacacattaataagagatgtacatgtaaggcaaaagattgtcaaagaggcactgatagatagcgattcagcgatctctttaccatttataggcacattaaaaaatgacacgactgtaagtgaggccgcatctttcgttattgatactttcaaaatagatatctccacatacagaaaacaaaaagacgcccattccgcatttaactttttaagaaatgcaatagaagacaatggcatatttgttttgctgattggaaatttaggaagccatcatagtaacatttctgttaattattttagaggttttgctctatctgaccctatagctccttttattgttattaatgataatgattcaaaatacgcttggtgtttcacattgcttcatgagttagtccacctacttataggcaatactgggatcagtaatgcaagtattgataatctggttgagaaatactgtaatgatattgctagccaggtgctaatatctgatgatgaatttaaatctataggtgatatccatagtctaccaatggatgctttagtggaaaatatcagtgaactaagtattaaattcaatgttagttcatcaatgattgcatatagattattcactcaaggaaaaattgataaaaataattgggaatacatatccgatttttttctaaagaaatggcttgccagtaaagaagaaaataatagtgggaaatctagtggagcatattacccaaccaaaagacataaagtaggaaaagctttatctaatttggtcaaaagatccattattgacggggtgctaacagaaactaaagctagcaaagttttaggcgtaagctcaggaaatgttattgaattggtgggattataa

SEQ ID NO: 301470 - DNA, 177 bp, Proteus mirabilis
atgagtaaagtgttattattaattattttttttagttattttgttagtgctaattctagtttagatgttaattttcgtgggatattaactagcaccacttgtcaattatcatctgattcattagaacaagaaattgcaattaataatttacgttggcaatatttaaatgaatactga

SEQ ID NO: 301471 - DNA, 945 bp, Proteus mirabilis
atgaataaacctcttttaatttcttctcatgatgctgcattcaaacgcttcatgatgaatatcagtaatgctaaggatttcttttttatccatttatcagatgaattaaaaagctattgtgatttttcaactttaaagctacaaaattcctcttttatcgatattaaattacgttctcgtatgtcagatattctctactcagtgaaaaccaaaacggggaatatctcaatttatttcttaattgagcaccaatctcgaccagataaaatgatcgcttggcgtatgatgcactatgcgttttgcacgatgaatcagcatctacagcaaggttacacatctttgccattggttgttcctatcttgttttatcatggcaaacgcaagccttatcctttttctgtcaattggttagattgttttccgctttctacattggcaaatcaactctatcttaataattttgcattaattgatttgaattcaattgatgatgaaattttattaacacatagaaaagccgctgtaatggaaattgcaatgaaacatgtgaacagttgcgatgatcttgataagttagcgatgcttctctcaaaagcgataaatcagaaaaactgcagtgatgaagacactatcgctgttgtacaatatttattctcaattatggacgcggcggattttgaatccatcataaataagatagctgaacaagtagataatcatagagagacgattatgaatattgcatggcggttagaaaataaaggatttaaattaggaaaaatggaggggatagagataggtaaaaatgaaggtatagaaataggtaaaaagatagtacaaatacaattagcaaaaaacttattaaaagaaaatgttgagttggaatttattgaacgaataactggtttaagtatacaagaacttaaaatattacttttaacttaa

SEQ ID NO: 301472 - DNA, 1164 bp, Proteus mirabilis
ttgattaaatcagctatactggttctagaagatgggaccgaattccacggcaggtcgataggcgcagaaggcgctgctatcggtgaagtcgtttttaatacttccatgaccggttaccaagaaatattaaccgacccttcttactcccaacaaattgttactctcacctatcctcatattggcaataccggcgttaattcctcagatgaagaatcagcaactatccatgctcaagggttaattattcgcgatttacccctagtgatgagtaattatcgtgccgaagagagcttagccgattaccttaaacgtcatcagattgtggcgatagctgatattgatacacgtaaattgacgcgattattgagagaaaaaggcgcacaaaacggttgtattatcgcaggcactcatcttgatgctaaacaagcgcttgaaaaagcgaaagcgtttccaggattaaaaggaatggatttggcgaaaacggtgacagtgaaacaaccttatcaatggacacaaggcagttggacattaaaagggaagttgcccgccactcaatcaccacaagatctccctttacatgtggtggcctatgattttggtgtgaaacgtaatattttacgtatgttggtggatagaggctgtcgagtgacagtggttccagcacaaacctcagcccaagaagtgttagcgctctcacctgatggcatttttctctctaatggtccgggggatccagagccctgtgattatgcaattgacgccatccaaactttcttaactaccgatattccagtatttggtatctgcttagggcatcaattattagccttggcgagtggtgcaaaaaccgtaaaaatgaaatttggtcatcatggtggcaaccatcccgttaaagatttagataataacagtgtgatgatcaccgcccaaaaccacggctttgctgttgatgaagcatcgttacctgattgtttaagggtgacacataaatcactatttgatggttcgctacaaggtattcatcgcacagataaagctgcatttagtttccaaggtcacccagaagcgagtccagggccgcatgatgcggcgccgctttttgatcactttattgaacttattgagcaatatcgtcaaaacctgcaatcagtgacaaacaaataa

SEQ ID NO: 301473 - DNA, 3228 bp, Proteus mirabilis
atggctaaaagaacagatattaaaacaatcctgattttaggtgcaggcccgattgtgattggtcaagcgtgtgaatttgattattcaggcgcacaagcgtgtaaggcactgcgcgaagagggatatcgtgttgttttggtaaattcaaatcctgctaccattatgacagatcctgaaatggcagatgccacttatattgagcctattcattggcaagtggtcagaaaaattattgagaaagagcgccctgatgccatattaccgacaatgggcggacaaacggcattaaactgtgccttagaattagagcgtcaaggggtgttagctgaatttggcgtaacaatgataggtgcaacggctgatgctattgataaagcggaagatagacaacgctttgataaagcgatgaaaaaaattggtctggatacggctcgttcaggcatcgctcatactatggacgaagcatttgcagtggctgagcaagtgggtttcccttgtattattcgcccttcatttactatggggggaacagggggcgggatcgcctataatcgtgaagaatttgaagaaatttgtactcgaggtttagatttatcaccgacaaatgaactattaattgatgaatcattaattggctggaaagagtatgaaatggaagtggtgcgcgataaaaatgataactgcattatcgtttgctccattgaaaactttgatgcgatggggatccataccggtgactctatcacggttgctccagcgcaaacgctaacagacaaagaatatcaaattatgcgtaatgcctcgatggcagtattacgtgagattggggttgaaaccggtggctccaatgtgcaatttgccgttgatcctaaaacagggcgtttaattgttattgaaatgaatcctcgtgtttctcgctcatcagcattagcgtcaaaagcaacaggtttcccaattgcaaaagtcgcggcaaaacttgcagtaggttataccctcgatgagttgatgaatgatatcactggaggaagaaccccagcctcttttgaaccttctattgattatgtagtgactaaaatccctcgctttaactttgaaaaatttgccggtaccaatgaccgtttaaccacgcaaatgaaatctgttggtgaggtgatggctattgggcgcactcaacaagagtcaatgcaaaaagcattacgcggactagaggttggtgcaactgggtttgatcctaaagtaaacctcgacgatcctgaagcgctcaccaaaattcgtcgtgaattaaaagaagccggatcggatcgcatttggtatatcgcggatgctttccgcgctggaatgtcggttgatggggtgtttaatctcaccaatatcgatcgttggttcttagtgcaaatagaagagattgttcgcctagaagagcaagtggcacaacttggtttagctggtctaaatgctgatttcttgcgtcaattaaaacgtaaaggttttgctgatgcgcgcctagctaatatcttgaatgtgaaagagcaaaccattcgccaattaagagaacaatatcaattacacccagtttataaacgggttgatacttgtgcggcagaatttgctacggataccgcttatatgtactccacttatgaagaagagtgtgagtcggatccaaatcaagacaaacctaaagtgatggtcttaggtggtggtccaaatcgtattggtcaggggatagagtttgattattgttgtgttcatgccgctctagcattacgggaagatgggtatgaaaccattatggtcaattgtaatccagaaacggtttcaacggattatgatacctccgatagactttattttgagccagtcacccttgaagatgtattagaaattgtacggatcgaaaaaccacaaggcgtgattgtgcaatatggtggtcaaacgccattaaaattagcaagagctttagaagctgaaggggtgcttgttatcggcaccagtcctgatgcaatcgataaggcagaagacagagaacgtttccaaaaagccgtggataagttagggttaaaacaaccagaaaatgccacagtgacgacattagaagaagcggtagagaaggcaaaatctattggttacccgctggtggtacgtccatcttatgtccttggtggacgagcaatggaaattgtttacgatgaaattgatttacgtcgttatttccaaacggcggtcagtgtttctaatgatgctcccgtactgttagaccgattcctagatgatgccattgaagtagatgttgatgcgatttgtgacggtcagcaagtggtgataggcggtattatggagcatatcgaacaagcgggtgttcactctggagactctgcttgctctctacctgcttatactttaagccaagatattcaagatataatgcgcaagcaagtacgtgaactcgcttttgaattaggcgttaaagggttgatgaacgtacagtttgcggtgaaaggtaatgatgtttatcttatcgaagtgaatcctcgtgccgcacgtacagtgccttttgtctctaaagcaaccggtgtgccattagcaaaagttgctgctcgcgtgatgataggacaaagtcttgaacagcaaggcgttaccaaagaggtgatccctccttactactcggttaaagaggtggtacttccctttaataaattctcaggtgtcgatcctattttagggcctgaaatgcgatctaccggtgaagtgatgggggttggtgctacttttgcacaagcttttgctaaagcgatgttaggtagcaattccaccatgaagaaaaaaggaagagcgctactttcggttcgtgaaggtgataaaaaacgtgtcgttgatttagcaactaagctattgaaaaatggttttgagttagatgcaacacatggtactgccattgtcttgggggaagccggtatcaatcctcgcctagtgaataaagtgcatgaagggcgacctcatattcaagatagaattaaaaatggtgagtatgactatattgtcaatacgactgccggtcgccaagctattgaggattcaaaattgatccgccgtagtgcattacaatataaagttcactatgacaccacattaaatggcggatttgcgacaacactgtcattgagtgctgatcctactattgatgttatttcagtccaagagatgcatgcaaagataaaaaaatcttaa

SEQ ID NO: 301474 - DNA, 6495 bp, Proteus mirabilis
ttgttaattccattatatgaacaaaaagagaagctgatctttgctcaaactaactatcatcgcaaagatcttcgtagccaatttaattatggtattggttatcgctattttactgaaaaatttatggtcggcattaatggcttttatgatcatgatttaacgcatcatcataatcgtttgggaattggcgccgaaatttggcgagactatttcaaattaagttctaaccattatcaccgtctatcaagttggcgagcctctaataatatcttagattatagtgaacgccctgcgaatggttgggacattcgaacagaaggctattttccagcttatccacaattaggcactaaattaatctttgaacaatactacggtaaagaagttggtctatttggcaaagataaacgggacaaaaatccacatacctacacattagggattaattatactccgataccattagtcacattaaatgccgagcgtcgtattggcttacatgatcgtgctgataataacttgaatatcagcttgtcctaccgcataggagaatcactcgcttcacaacttaatcctgataatgtcaaagcaatacgtacattagcaggaagtcgttatgactttgttaatcgtaataacgatatgattttagaatataaaaaggaaactttagttttcctttctatggttgattcaataaatggttatgctaaagaggagcgcgatttacaagttcaagtaaaaacaaaatatccgttagccaatattgaatggtccgcaagtaagttaaatgcccaaggcgggcaaataaaacatcatggtggaactcactacaccgtgattttgcctcaatatcaaattggtgcaattgagaaaaatagctatatcattagtgctgttgccattgatacccatggcaatcgttcagcgcctgttcaaacaacggttattgtagataaatcgttaatcaatacgcgtaatagcctattttcacctaaacagagccaactattcgctaacggtgaagcaacccaaaagttaatattatccatcgttgataatgataatttacccgttgatattgatagtaaagaaattactttacagcaacagtctgatacagaaaaaggcaatagccgtatttctactttctctcgtttagctgctgggaaatatcaattaacggttacagcaggaagcataccggaaaaattaaccctaacccccgtattccgtgataataccttcaactcagcaaccgtgacacttattgccgataatcaaactgcccatattgcaaaaggcaacctaacggttacaaaagataacgcgccagccgacggtaaaagtcaaaataaaatcaaagtacgagtcactgatagcaaccacaatccattggctcattatccagtcaactttactgccagtaatggtgctaatgtcattagctcaagaaaaacggatgaacaaggtgagattattgcttcagtgactaatactcaagtagggagttcgcagattggtgtacaagtaaaagggataacctattcgactgaagtccattttagtgtggataatgatagcgcctatattccacaacaaaacttcacgatcacaccaccactttctctagccgatggtaaaacagaaaaaaccatttcattacaagttgttgataagcaaaataatccgatacccgctactcatgtgacattatcggcagataaccaagcacaattaaaacaaaccatattaaccacagacgagcaaggtaaggcgaccaccaccatgataagtaaagtcgccggtacggtcaccgtgagggccaaaataaacgacaagatgactcacgcgacaacccaatttatcgccaaccaagctaagggggttattgtctccataaccccatcctctacaactcatgtcgcagatggtcaaacccctgtcttccttactgcattagtacaagatcagtttggtaagccgctccctcatgcacaaattagctgggaaactgagcacgataaaagtattgttaacattgaacataccacaatgactaatgagcaagggatcaccaccaacaagttaaccagtacacaagcactcagtgtgcgggtaactgcgcgtataaataacaatgcttttactgctgagccaattacttttattgctaatgggcaacaagctttgattagtgaattattggttaataaaaatcagattgttgcagataagcaagatcccgcagaacttactgcaatagtaacagataaactgggtaatcaacttcctgatactattgttaattggcaagggagtgctggtactcaatttgctcagcaacaaactaagaccgatgctcaaggtatcgccaaaaatacgctaacaacatcacaatcaggtatcacaaccatcaccgcgcgattaaataatggtcaacatgcacaaactaacttagttgccgttgcagatctcaaaagtgccactctcacattaacgacattaaataataagcaatctgccatagcagataaccaagatagcattaccgtagtagcaaacttaactgatgcttatcataacccattgaaaaatatccctgtctattggcaatcaagtattaatcatattgatgaaactattactcaaacagatgaaaaaggcagaacgcaagttgtcatttcaggaaccaaagcacagccaacaacaattaccgcctatttatcaaataaagagaaaaaaagcattcaggtaacctttgttgcgggagcgccagtgcaacaaaatagttatttgacgattgaaccacaatctatcattgccgatggtaatgcctttgctgtgggtaaaatagacctgcgtgataaatttgataatccggtaataggtcgtagtaacgatattgcgttaattggggataacaacaccatcaaattcagtaaaatcacagaaacggctaacggcaattatcaagcacatattagaggtacaaaagcgggactcagtcaaattaccgccactattgatagtattacggtaacgcaatctttaggatttttaacagataataaaacagtcaagatccactccgttaaggttatggcaccttataccgtaacagcgaatggtaaagacaaagtcattattcaagcacaaatcaccgataaacataacaatccagtatcaaaaggcgttactgtcggttggataagtgatctcggtgagcttgcagcaccattaagcatgaccaataagcaaggaatagctgaaattaccctctcaagtacccaggcaggaaaagcgaaagtaacggcagtgctcaataatcaacaatctgtcaatgctgatcacattgtcacctttacggaaggtgatatttcggcctctctttctactgttgccatattccctgacactattgtagcaggggcaaataaagcgaccgtaacaataaccttaaaggataaagaaggtaatttattgcccaacttagccaataaaatcaccttaacgccacaggctaatttacaaacaacgattacgccctttaaagagaaacaaaaaggcatttatcaagcccaagtgagcgcattaaaaaccggaaaaacctcgttatcggctcacgttgctccattagcaataaaacaatccgtttctttaacggtgctccctaataacacaacagcaaaggtgaaaaactttactattagcaatatgcaaccacatgctggggagtccattacttataaagcctatttggttgataaccatgataatcctgtcggtatgggtgtacctgtcgcttggtcaacgaatgaaggtagtcaactcgaaacaccattaacttttacagatgataatggtgtagcaatagttggattatctcgacgctctgtcggtgttgccaaagtcagcgcaatattagcaacaggtacttatatagcagatgatgttcactttttaacgggtcacattgatgaaacgatgtcagaactgtcgttgaatccgagtcaaatcattgctaatggcaaagataaggcattattgacatttgttattaaagataaaaatggaaatatcatccccaaccaacaagtaagcggattttctaaaaatccaaccatcaaatttagtcaagcacaacaaatatcaccgggacgctatgagattgaaataacaggaactcaatcgggcacagcacagattggtgttatggtaaatggcacccatttcaaaaaacaaaaaatattacaacttaatgccgatgtgacgacatggaaaatacgcgctgttgaggttgatagaacaaccataaccgcaggagataaaggtgttaactaccaagcaactgtcgttgatgccaataataatgtattacctaatgttattgtgtcatggaaattactcggatcagcagatgattatcattacagcacttatactaatgataaggggatagcaacgaatcgagtgactagtcatgtctcgggacgcttgaagatgagcgcttatcttgattctaataattataaatcaacacaagatattactgtaataccggctgaaatagatattcataaatcaacctttaatagtcatcgtcgttctataaatgctgataataaagatagtacgttattaagcgtaaaattaatggataaatacggtaataccattgatggtaagaatgttgagattaaaactatcagtggtaagcctaattttagtgacaatccattaaagtcagtgggcaatggtgaatatcaaacaaatgttacagcaaatacgatgtccgatattatcttaaccgctcaagctgaaacaataactatcgcagagccattgacgattaaagtggctatccctaaatctgaaattacctttgagaaacctatccaacaggaaatctacaaatcaactgtgattgatgcgttaagttataaaggtgtaccacaaaatatgcaggtaatatggtcaagctctgatcctactgttgcttccattgatacaacaagtgggcaaatctccatgaaaaaggctggtactacaattattaccttacaaaccttaggtaatgagcaatatccatcagctaaaaatagctatcctttagtgatagaaaaagcgccaccaaaactgaaagtaacctctcctcacaccatacaatcgatctggaatgatggcattacccatcaaataacagcggaatttgataatccagaggttaaaaatacccccattcatttctctagtagcgataccttggtagccaccattgatagtaaaggtaacttaaccgccattaaaccaggaaaaacaaaaatagtaatacaaagtgatgctacagataaattcctagctgatagacaaactgtagactatcagcaagaaaaagctgcactaagttattattttaaaaagaattatattgtattaacacctgattctgctgcagataaattattgatggctcaaagccctacgccagatgtccccgttgaagcgaatgcaacttggtatagtagtcaacctaacatagttgaaatcaccccagatgggattatcaaaaaccttaatattgggcaaacaacattaacacttgaggtgaaaaataataattattttcaagatcatgagcaaagctataacgtcattatacaagcatcgcctcgcatcaaaattaactcatttgagtttctatctgcgggagagagcaaatcaaatacacatttggatgatttaacttggcaacctttatacacttcagacgatcagtttattgttaaatggtcttcatcagacacacctaaagcgattaacttcgagttatttgatgaaaacggcacttctatcgccttagaagaaagacaaaactatgcacctaaatataatatacatgacccagtaaaaattcaggtaccgaaacaatatctaaccagtccaaaacaattaacactagaagtcacaacctttgatagtaataatcagccttatgtcgatcctaaaaagtataaaattaatattgactattttcctgccaataacgcatataaaataatctctcttgattataattctaaatttatctatacagatacaggtacccttgcttcatcttgtcaaaatggttggtcaaccactacaacacatcttattttaacgccaagattagtatttaaaggtgagccgaaaaagttactttatcccatttatattactacggaattatatgatgtaacattaaatccatcggataaactcatcggacatattaatgagaaattaacttatccagataagattatatttagcgagcattctaaaaaaatagctgaaatatcgccgacatcagcacactacgcattagacgaagaatgtagaattaatgattctggtcatggtacgttaaaagcaaatataaccataggtaacagatccagttatcttaaaaaagaatttcattgggatggccaaatagggggatatttttaa

SEQ ID NO: 301475 - DNA, 3042 bp, Proteus mirabilis
atgctaataaaaaattctttagcttatgcgattacactaagtttctgcttatccttacccgcacaagcattaccttctctttctcatgaaccttttggcgatctttatctttttgaagatgaaatgccaaataccttgagcacctcaaatgaccatcagctatcactaagtaaagagcatgctaaagatggcgtacagtcactcaaatggcagtatcaaccccaatcaacattaacacttaataatgaagttaattatcaagatgataaaaatacagcaacaccactcacttttatgatgtggatttacaatgaaaaaccacagtcgacgccccttacattacaatttaaacaaaataatcaagtagcattaagttttaaaacggaactgaatttcacgggttggcgaggtattgcagttccttttcgtgatatgaaaggctcagcaacaggcaaattagataaattagtcattactgcgccagatcaagcaggtacgcttttttttgatcaaataattatgagcgtacctttagataatcgttggcctattcctgactatcaaattccatatgttaataatgcagtaaatacaatggtgagtaaaaattggagtgcattattgatgtacgatcaaatgttcacagcgcattatcctacattaaattttgcgactgagtttcgcgatgatcagcctgaagtggcatctatttatcaacgttttgaatactatcaaggtgtcagtcgtgataaaaaaatcaccgctgaaatgatcgacaaaaatttagcattatggaaaaaattagccttagaacaacatgctgatggctcaataaccgcaaaagcccttgatcatcctaatcgccagaattttatcaaagtcgagggggtctttagtgaagaaacccaaaaagcattacttgatgccaacatgctaagagatgtaggcaaaacgcttcttcaaacagcgatttacttgcgtagtcactccttatcagcaatcgatagaaaaaaattagaaacgctctatttattaggcactcgttacgttcttgaacaaggtttcacacgggggagtggttaccaaattattactcacgtaggttatcaaacaagagagctttttgatgcatggtttattggtcgccatattctagcaaaacataatctgttagcaccgacacaacaagccatgatgtggtataacgcaacagggcgcatatttgaaaaagataatgaaatcgttgatgcaaatgtcgatattctcaatacccaattacagtggatgataaaaagtttattgatgttgccagattatcaacagcgccaacaagccttagcacaattgcaaagttggctaaacaaaaccattcttagttctaaaggtgtcgctggtggctttaaatctgatggctctatttttcaccattcacaacattatccagcttatgccaaagatgcatttggtggcttagcgcctagtgtttatgccttaagtcattccccttttcgtctttcatcaccagcacatgcacgcttaaaagatgtattattaaaaatgcgtatctataccaaagaaacacaaattcctctggtattaagtggcagacatcctacggggttacataaaataagtattgatcccttcaaatggatggctcttgcaggtacgcccgatggtaaacaagagctagatactacattagcagccgcttatgcaaaattagcaaacaaagatagctttgaaggtattaaagcagaaaatgaaccggtaggtgcatgggcaatgaattatgcttcaatggcaatccagcgtagagcatcaataacagcgccacagcaaagctggcttgctatcgctcgtggttttagtcgttatttagtgggtaatgaaagttatgagaataacaaccgttatggtcgttacttgcaatatgggcaacttgaaattattcctgcggatttaactaaatctggttttagtcatgcaggttgggattggaatcgatatccaggaacgactacgatccaccttccttatgatgaactagaagcaaaactaagccaattgccaagtgcaggcatagaagaaatgttgctttcaacacaacgttattctggtgccaatacactaaataataacagtatgtttgccatgaaattacatggtcacagtaaatatcaacaacaaagtctaagagcgaataaatcctatttcttatttgataatagagtgatcgcattaggctctggtattgaaaataacgataaacaacatacaacagaaacgacactgttccagtttgctgttcctaagttacaatcaattataattaatggtaaaaaagtgaaccaactcggtactcaattaaccttaaataatgccgatacattaattgatccggcgggtaacttgtataaattagctaaagggcaaacggtagaatttagttatcaaaaacaatactctgttgatgacagaaattcacagcaaacagaacaattgtttgcaacagccgttatctctcacggtaaagcccctaaaaatgcaaattatgaatatgcaatagccatagaagcacaagataataaagcgcctgaatacaccgtattgcagcataataatcaacttcatgcagtaaaagataaaatcacgcaagaagagggatatgctttttttaatgccaccgaagtcaattcatctcaagctttattattatcaagtgattcccccactatggtaatggtaaaaaaacaaaaacaacaattaacgctaagtattgttaatcctgatttaaatttatatcagggtattgaagctgaccaaattgataataagggtaaccaggttgaagtgagtgtttattctcgccaatggcttacagccgatcctcaaccaataagtagtacagttactgtaaaagggatttggaaattagccacaccacaattaggtgttaatattagatatcaaaatagtaatacgctaattacaacaacgactatacaagcaataccaataacagtttatttaattaagtaa

SEQ ID NO: 301476 - DNA, 318 bp, Proteus mirabilis
atggcaactattacagttaaaaaatcacgcaagcctgagtttttacgtggagcatctgcaaatagacgtcacgccagacggaaagcagaagctattgcaaaaaagaatattgagttgaaattagaatcagtatttcctcaggagaaaagacttacatcagtagaaaaaacactgtcattaagtcacataccagttactagaagtattgaacctaaataccaaccatcggtagataactgttgcttacctaatgtagcagtattttcaggagttaaaacaaaacagccgagcagtgggttcggggttacggcgagatag

SEQ ID NO: 301477 - DNA, 183 bp, Proteus mirabilis
atgaatattgataaatacaaattacgtgtagcccaaagtaaagctggaattgctttatctctcacggacgaggacggatggagcgaagcaaacgaaacattaaaaacagcatacggagtacagcatgaacgcaaagcagaaacacataaaacatcagatattcgcactattgcgagagtctga

SEQ ID NO: 301478 - DNA, 177 bp, Proteus mirabilis
atgaacgcaaagcagaaacacataaaacatcagatattcgcactattgcgagagtctgaaatgacaaatgagcaaatcgacgacttagtttttcaatggaaaatgaaagtgtctatggagcgcacaaacctcattcagcatgaaattaacacacgcaaggagcgcgcgtttacctaa

SEQ ID NO: 301479 - DNA, 252 bp, Proteus mirabilis
atgttaacgaatacatacggactcagaaacgactggtacgaacgccaaatggaacgagaagcgtttgttaattctcaggaagataaaatatcagttgatgaggttatggatagcctgcccgaagaactactgtgcatggatttggcaaggaagttaaatccggtatttgaaattagcccccaagcacttgatgcagttttagatggaattagaacagcaatacagattgggatagataaggaggtattgtga

SEQ ID NO: 301480 - DNA, 699 bp, Proteus mirabilis
atgattagtaatgacatcattctaagcaaaacaggcatcgatttaaccaaaatagagcaaggaagcgaagaatggatgtctatcaggctcggtgttgtaaccgcctctgaggcatggaaagttatctctaagccaaagtcagggaaaaaatggacagacacaaagaaaacatatttaaacacacttattggtgaagtctgtacaggagtttacaaggaagtatcagcaaggacgctggactggggtaaaaactacgaactagaagcaaggatgacattcgagttttacaccggattaacggtaaaggaagtgccaataatatttaaagatgagcaactacggatggcttgctcaccagacggcatttgcagtgatggctctggattagagcttaaatgccctaataacacggacgtatttatagacttggcattgaatggaatcgatgcaatgaaaaaggaatatgtggctcaagttcaatattccatgtgggttacaggtaaggatatctggcactttgcaaattttgacccacgcatgccggcagggaaagaaatcgcatatttccctgttgagcgtgacgaaaaaatgatgaaagaattcgacgagttagtacctgagttcattgaggtaatggatcaggggttaaacaagttaggcattcaatttggcaatcaatggagtgtatatggcaattaa

SEQ ID NO: 301481 - DNA, 180 bp, Proteus mirabilis
atgacagataaactcaaagaagaaaatgaaaagttgaaagaagtgctttttgctggcgctttcttaatggctaaagcggttcataaatatgatttcggcgttggaatggaagagcaagccaccgactttatgaaggacgcagaggaacttacaggtaataagctaccaaagttcgcatga

SEQ ID NO: 301482 - DNA, 2598 bp, Proteus mirabilis; identical to SEQ ID NO: 294950

SEQ ID NO: 301483 - DNA, 960 bp, Proteus mirabilis; identical to SEQ ID NO: 297937

SEQ ID NO: 301484 - DNA, 882 bp, Proteus mirabilis; identical to SEQ ID NO: 297276

SEQ ID NO: 301485 - DNA, 531 bp, Proteus mirabilis
atgaataaaatgcttcttgctgcgatgatcgcaggtattttttcatcaacagtttatgctgcttctgataataccattcgctttcaaggtgaagtttctgatgaaacttgtactgtaactgttaatggtaattccacacttccagttgttttattaccaacagtaccagtcactgcattagatactgctggtaaaacagcaggtcagacaccatttactatcactgtaagtggttgtactggttctaaaccaaccgatacaaatattaaaactatttttattgctaataatctgacaaaagaaggtcgtattggtaatacagcatcagataacaatgttagcttagaaattattgatcctgcaaaaacaggtaccaaaattgatttaactggtgttggtaacgaaggtttagtgttaaaagcaaacgaaaaatcagcatcttatgattatgctgtacgttattatgcggatgacattgcaacagcaggtaaagtagaaggtagcgtgcagtactctatctcttatcaataa

SEQ ID NO: 301486 - DNA, 504 bp, Proteus mirabilis
  misc_feature (490)..(499): n is a, c, g, or t
atgaaaaaaataataatgttaattgccttattttttttaagttatagcacagcatcgcattctagtgtcacgatgctaaaaacacgtattatttattcatcagattcacgctttgaagttttaaaatttatgaataacgatgaaattccttacattatgcaaatatgggcggataaagacaatcctaattcgactccagataatgcagatgctccttttattattcaacctccagtctttcgtatcgatcctaaaacagggagagacatacgattaatttatactggtgaaggtttaccacaagataaagaatctattttctatttaaatgtggcgcaaattccacctaaaaatttgaataaagatataaaagaaggaaatagctttacggttattgtgcatcatcgattaaaaatattttatcgtccaacagcaattgtttctcagctaaataatatcgagaaacaaatatcattcttaaaagaaaatnnnnnnnnnngttaa

SEQ ID NO: 301487 - DNA, 2529 bp, Proteus mirabilis
atgaaattaatagaaaatagcactgcacaattaaataagagaataaaagtcgtattcttaatcggctcattttctctatttactcaatcaatgccctctacatttgcagatgattatgaatttgatccttctttactattaggtattaaaaataacatcaacattaatcagcttcatgatagtaattatgtggagcctggtgattatgatgttgacatctacattaataatcgttttattgaaagaaaaaccgtgagttttcaattaaatgataagggtaaagtcacaccttgttttactcaaaaacagattgaggaaatggggctcttgctagatatcgagccaaatcaagataataatcaatgtttaatattgagccaatttaataaaaacatcgtagactcgtatgatgcttctaactttagaataacgattacagtgcctcaaattttattaaaacgaaaaccacaaggttatgtcaatgaagacgatttagatgcgggtaacaccatgttattcagcaattactctggtaattactataagaataaatcgaacggacaaacttcagactatggttttggtagtattaatatgggcgtaaatctaggaacttggcaatttcgacaacaagcatcttactcttataattcatcaaaatcgggaagtaacagtgaatttaattggataagaacttatctacaaaaaccattactgacattaaagtcaatgttagttgtcggtgatatttatacagcaggatcacaattttctagtctggcatttaaaggtattcaattaatgtctgatgaaagaatgttgccggattctcaaaaaggttatgcgcctgttattcgcggtattgcaacaacgactgctcgagtagtgataaaacaaaatggtactgaaatttatcaaacgacggtatcaccagggcaatttgaaataaatgacctttatccaaccagttatgaaggagatttattagtcgaaattcacgaaagtaatggtaaagtttcttctttcacagtgccatttaccgcattacctgaatcagtgagggctggtcgctttaaatacaactttaccgctggtgaggtgaataattttggttcagaaaatagttatttttcagatattgctttacaatatggtatgaataatacggtaacgttaaatactgggatacgtgtaggacatcaatatcaggcaatatttgtcggctctgttattgctacaaaattaggggccataggttttaattcgacattttcaaatgctgaagtggctggtaaaaattatcaaggtggacgattaggtattagttatagccgtactctcagtctaaccaatactgttattacactcgcaggttataaatactcaacagagaatttccgtgaatacaatgatgttttggggttgagaaaaagtgcaagtaatgacatagaatggaattccagcagttataaccaagaaagtcagtttacacttagtgttaatcagtctcttgataagtgggggcaactttatgtttcgggctctatcagcaactattatggtaataaaggacatgatgcccagtatcaaattggttattcaaatacctataaagatattgcttatagtcttgtctatagtcgccaaaaaacagggaaaataacggcgaataatacttttacaccaataactactgatccaatatcggaagatatggtgatgttatctgtttctgtacctttaggacgctctgattattcaccaatgctgtcactatcctctagccactctagtaatgattcgaattaccaaacgaacttatcggggcttttaggggaagataaaacactttcttatagtataaatgcagattatgacacacaaaatagagtggtaggtactggtttgcatttaattaaacaacttccttttaccacgttatcaggcagcatttctaatagtaaacaatacactcaaggtagtgtgggcattcaaggtgcgttagttgcacacagtggcgggataacattagggccaagtattagtgattcttttgctttagtggaagccaaaggtgcaagtggagcgactgtgagtaatggaatgggggcacagattgacccttttggctatgctattgtgccttctcttgtcccttaccaatataacaatgttagtttggatggaaaaaatattagaaataataatattgagctattagaaaatactaaacaaatagcaccatattcaggttctagtaccaaaatcgtttttaaaacccaagtcggataccctgtattgatttcagttaaaccttcaaactcattggcattaggtgaaaatgtttatgataaagatagaaatattgttggcatggtaggacaaagtaaccagatttatgtcagagtcgaaaataaaaaagggacactaactgtcggtaaagatgaagatagttgccaaatcaattactcaataccagaagaaaaagaagacgataaactcattttattatcaggtcaatgcttatga

SEQ ID NO: 301488 - DNA, 669 bp, Proteus mirabilis
atgctgttattgtgtttttcgtttatcgccaaagcgaatttagcgttagacggctcaagggtgatcctttatcactcagacagagaagcatccttaaatataaaaaatgatggtgaattacctgtggtggttcaaacttgggtggatgatggtaacccccaaaataccccagaaacgataactgatgcttctgttttatcattaccgccagtattacaattaaaaccgagtgaatcacaacagatacgagttattaataaatttattaacacagataaagagaaagagacactttattggcttaatttatatgaaattatgccgaagcctacaaacaaaaaatatgatgaaagattgattaatgtcgtcgtcagattacaagtaaaagtattctaccgcccagatgatttaattatggtaatttctgatgttagtcgtgctcttatttttaagaaattagataaacagttactaattgaaaatccgacgcctttttatgtcaccataaaatcagcatctagtaaaaataatcctaatattcttattcctatgatagcgccattttcaaaacagaaagtcaacctagtggatagcaaaataaataccattaactacattttgattgatgattttagtggagaatttaaagataataaagaggtaaaatag

SEQ ID NO: 301489 - DNA, 579 bp, Proteus mirabilis
atgtttaagaaggcgttattgagtttaactgcaggtgcattattatttaatgctagttcagcattagcggctgattatcaaattgataaacaagggcaacatgcttttgtgcaatttcgtatccaacacttaggttatagctggttatacggcacatttaaagattttgatggaagcttcacttacgataaagaagatccttcaaaagataaagtcgatgttgtgattaaaacgggtagtttagatactaatcacgctgaacgtgacaaacacttacgtagtgctgatttctttaacgtcagtaaatatcctgaagctaagtttgtctcaaccaaagtgactcgtgatggtgaaaattatacggtgacgggtgatttaacacttaatggcgttacaaaaccaatttcactaaatgcaaaattaattggtgaaggtactgatccgtggaaagggtatcgcgctggttttgaagcaacaggtaaagttaatctgaaagagtttaactttaaatcagatttaggaccaaaatcgcaagaagcagaattaatcatctctgttgaaggtgtgaaaaaaaattaa

SEQ ID NO: 301490 - DNA, 1170 bp, Proteus mirabilis
atgaagttatcggcagtcgttaattttatggagacatcgtcttttagcagaaagacgatgtctttcttattgatcttgaatagtctttttattatttactcgatattactttctcgtggtgtttatcttgattgggaaatacacggttttgctgattggctaaaatcgttaggtatattgaaattacttgatattcctaaagtgatgttagcgagtgcacttattttgctctctttctttatgtatatgggggcgcggattgcgtggtgcgtttcattaatattattagtgacgatcgtttttttagatgtcgcggtttatcaccaagctggtactcaagcctatacttcattagcattagccattgtattggttatcagccggcgtgcttttcctcatcatagtttaaccagtgccggttttgttgcttttatctgtacgatttcgctactgtgtttctctatgttaggcagcctctatattggtgatgaatttaaaccacatatcacaacgttaatggatgctttctacttttccattgtctgtatgacaacacttggttttggcgatatcgttcctatctcaagtaatgcgagaatgtttaccctaacagtggttattttggggatcactgtttttacgacttctattgtttatgtgatgggatttttggctcgtggtactcgcgatattgtgaagaaaaggatcgctaaaatgcatgatcattttattattattggctcttcaatgttggcagcacaattagagaaagggcttagagagcaaggtaaaccggttattgcgatttgttcggataaaaagcaagccatgtatgataaagaagccaatattattgaaggtgatccaaccaatgtaaaaacattacaaacggcaaatattcgccaagcgagttgggtggcgacgttatctgaaagtgatgcggaaaatacctttattttattaactattcaagagtgtccagaccttcaagcgaaattaatcactatcattaataaagatgagaatagagaaaaaataagtcgattacgtccagatatgctgttgtctttagcttcgttaggcaaagaaattatgatgaaagtcctttgtggtgaatctattaattcgtctgatgttactgatttattaatcaataaatatttaaaataa

SEQ ID NO: 301491 - DNA, 1302 bp, Proteus mirabilis
ttgccagcttcagcggttacactgtctgatctctattttttagcgattaaacatgatcccacatttaatgctgcggtaaaagagcaagtagcaggtaaagagtatgaaaatatcgggttatcacaattgctacccaatatttctgtcaattacaaaaataatcctcgcaactggcaacgtaaggcttatccaataaatatatttcaggataaaataacaacagtggagtatcaaaactatcaaagctattctgtcaacgcgattattagtcaaccactatttgactacaccgcatttagtgaatacaaagcttctatcattaaaacattattagcagacagtcattatcaaaataaattttcagaattaattattcgacttattgataattatattcaagttgcttatacacaagataaattattactaaatcaagcacagcaagaaatctatcaaaaacaactagcttcaagtcaacgcctatttgagttaggagaaggaaccaaaacagatattgctgaaatagagactcgtttatatttaacccagtcacaatataccgatcttcaattagaaattgaaaaggctaaaaacaaactcagtgctatgatcggttcacaattgcctactcatgagcacatcgcaaagctaactgatacaaagtttgttcttcaatcactggctcccgatgactattccacatgggaaaaaaatgccatacaaaataacttaaagatacaatctgctcgtcatgaaatggcgatagctaaacaagagattgagaagaatagaggtgaattttttccaacagtacaattttatgctgcatactctagtagtaattctgatagtaataataccattaaccagaaataccaatctgctaacgtaggtttttatgtcagtatgcctttatttaatgggggtaaaacaacggcatcaatgcgtcagtcgacagcaaaatatcagatgagtgcatttgaaagggatgcgattattcaaaatattatgcaggaattaagatatcaatatcaaatttgctcaacgagtcatattaaattaatggcttttgaacaagcagtaagttccgctaagttacaattaaatgcaacaagaaaaagctatgttggtggtcagcgaacgatggttgatgtgcttaatgcggaagagcttttatatagagcgcagcaagatttaatcaaagccaaatatgattatattcaagcttgggcattattacatcaatataccaatacactagacattgaaaaaataaaaattattgaaaactattttcagtag

SEQ ID NO: 301492 - DNA, 405 bp, Proteus mirabilis
atgaaaaaagttaataatattcaaatagttagattaagaagccgtcatttaggaacagcaggatatattattacaaataaaggtgcccactttttatttaatcatatttcccaaaggcccattagcaatcctatagatcatgaaatatttaatgatttattaatagataataaatatattgttggacaaaccatgccttgcttgtgtatacaagattttgttttcaataaaaatgataacaattttcctagtgcattagaagataatagaattcatcgtattacacataataacacaggaaataagaataaaatttcacgagaaatatctagattaaaagaacaaataatagggttcacgctaaaaggcacaatagaaagaaaagtgtatttttacttaaaataa

SEQ ID NO: 301493 - DNA, 2460 bp, Proteus mirabilis
atgcgagtgttaaaatttgggggaacttcagttgccaatgcagaaagggtgctgaatgttgctgatatcgctgagaaaaaacgagagcagggacaagtcgctctggtattatcagcacctgccaagataacgaattacttggtggcaatgattgaaaaaacggcagaaggagaagaacctctcactcaagtacgagaagcagagcaaatcttcgctaatctattgcaaggtttacgagaaaatcaacctggttttgattaccaaggcttaaaagacaaagttgagcgtgagtttgctgagattaaacatatcctgcatggtatctccctattagggcaatgtcctgatagcatcaatgctgcgatgatttgtcgtggtgaaaagctttcgattgccattatggagtcggtgttacaagctagaggatataacgttaccgtcattgatccggttaaaaatctccttgctcaaggtcattatctcgaatcgacagtggatattcctgaatcaactcgccgtatttccgcccttaatattccgaaagatcatatgatcttgatggcaggtttcactgccggtaatgaaaaaaatgagcttgtggttctcggtcgtaatggctcagattattcagccgccgtattagccgcgtgtttacgtgcacaatgttgtgaaatttggacggatgttgatggtgtttacacctgtgatccacgcctcgtcccagatgcacacatattaaaaggcatgtcctatcaagaggcgatggaactttcttactttggtgccaaagtccttcatccacgcactattgcacctattgctcaatttcaaatcccttgtttaattaaaaatacgggcaatccagaagcaccgggtacgttaataggtgatggtcaaaaagatgacagcacgccggtaaaagggatcactaacctgaataatatggcaatgatcaatgtatcagggccaggtatgaagggaatggtgggtatggcggctcgtgtcttttccgtgatgtcgcgagcaggaatatcggtagtattaattactcaatcttcatctgaatacagtattagtttttgtgtaccgcaaaaagagctaattagagcacaaaaagcactgtcagaagagttctatctagagttaaaagatggcgtacttgatccgttagatattatgaacaatgttgctatcatctcggttgttggtgatggtatgcgcacccttaaagggatctcagcccgtttcttctctgctttaactcgaggcaatattaatattgttgctattgctcaaggctcttctgaacgctctatctctgcagttattgctaatgatgcagcgacgaatgcggtgcgtttatgtcaccaaatgctctttaacactaaccaaatcgtagaagtctttattgtcggtgtcggtggtgttggtagcgcgctaatcgagcagatccatcgtcaacaagcatggttaaaaaacaaacatatcgacctacgtgtttgtgggattgccaattcacgtgcgatgctaaccaatatgcaaggtatcgatttagataattggcaacaagcgctacaagcagctaaagagccttttagctttagtcagcttattcgcttagaaaaagagtaccacttcctcaatcctgtgattgttgattgcacttcaaacgaaatgattgcacagcaatacgccaatttcttacaaaatggctttaacgttgttacgcctaataagaaagccaatacgatgtcgatggattactatcatcaaattcgccaatcagcggaagcatcacgtcgtaaattcttatatgacactaatgttggtgcgggtttacctgttattgaaaacttacagaacttgcttaatgctggcgatgagttggtgcaatttaatggtattctttctggctcactctcttatatttttggtcagctagatgaaggaaaaagcttgtctgaagcgacactttctgcgaaagaaaaaggctttacagagccagatccaagagatgatctctcgggaatggatgttgcacgtaaactgcttattctcgctcgtgaagcgggctatcaattagagttgagtgatattgatgtagagcctgttttacctagctcatttgatagtacaggtgatgtcgagagtttcttaaaccgcttacctcaagtagatgttgagtttgatgctaaagtcgaagaagcccaaaagtcagcgaaggtattacgttatgtggggatcatcaatgaagggaaatgccaagtcaaaataatggccgttgatgctaacgatcctctctttaaagtaaaaaatggtgaaaatgcgctagctttctacactcgctactatcaaccaattcctttagttttacgtggatatggtgcaggaaatgatgtcactgctgctggggtatttgcagatgtattacgtacactatcatggaaattaggagtttaa

SEQ ID NO: 301494 - DNA, 618 bp, Proteus mirabilis
atgccttacaaacattataaaaatagcatagcaatattattcctcgcctctgccttgctacctagattttctgtggctgaaccactcactcatttacctcaaaaagatcgtatttcttattttgctcaagcggagaaaatggccatcactggtgtggcaattaaaaccaaacccgttttagccagacctgcaaaagaaggggaagtgatcaccacttacataaaaggtgaaggggttgaaactatttcggagccagccaaagcgggtgattgggttgtacaaaatatttgtccagcaacaggtaatgaagaaattctggtcagaaaagataaatttgctcagcgctataatctggctgatgcagacaaagcgaaaagcatcacaccgataaggcaaggctatcaagtttttatccctaaagggattgaaatgaattattttattgttccaaaacaaaccgctgagtttgcaatggaagcgccttggggagagctacaacgttttcaagccggtgatgcagttgtgcaatctaccaccgataaacaagatatttatcggatccaacaggccgcttttaaatgcacttatactattttaaaaaccgccaaagagatttga

SEQ ID NO: 301495 - DNA, 1254 bp, Proteus mirabilis
atgttagaacaaatgggaaaagcggcgcgagaagcttcttggcacttagctcagctatcaaccgaacaaaaaaatcaggcactgttagtcatcgctgatttattagaacagcaagaagccattattcttgctgctaatgaaaaagatatggtggcggcacgagagtctaatattaatgctgcaatgcttgatcgtttattactcacatcagaacgtttaaaagcgatcgctgatgatgttcgccaagtttgtcatctagaagatcctgtaggtcaagtgatagatggtcgtttattagacagtggcttacgtttagaacgccgccgagtccctttaggggttgttggcgttatttacgaagctcgtccaaatgtgactatagatgtagcatctttatgcttaaaaacagggaatgcggctattctccgtggcggaaaagagactcaccatactaaccaagccgttgtcgcggtgatccagcaagcactagaaacatgcgctattcctgcggctgctattcaagctatcgataagccagatcgtgaattagtcgcaaaaatgctaaaaatggatgagtatattgatatgcttattcctcgaggtggtgcaggattacataagttatgtcgtgaacaatccactattcctgtgatcacgggggggattggtgtttgtcacacctttgttgacgaaagtgctgatttagaccaagcattaaatgttattattaatgctaaagtacagcgtccaagcgcatgtaattcgttagaaacgctattggtacatgaagctattgcggagagtttcttacctcaattaagtgatgcgatggcagcacaaaaggttactttgcatgccagtcaacgcgctataactgcattgaaaaagggacgtgcgacggtcgtcgatgtgacggaagcagattattgtgatgaatggttatcactggatctgaatgttgaagtcgttaatgatttaacggcggcaattgctcatattcgccaatatggtaccgcgcactcagatgctattttaacgcaatctatcagtcatgctgatcgctttgtacgccaagttgattctgctgcggtatatgtgaatgctagtacacgttttacagatggtggacagtttggcttaggtgctgaagtagcggtgagtacacaaaagctacatgcacgaggccctatgggattagatgctctaaccacctataaatggattggttacggcgacaatacattacgtcgctaa

SEQ ID NO: 301496 - DNA, 3264 bp, Proteus mirabilis
gtgcaggccaacgcatctgccctcttagcctttcaccatcccattaatcagaaaaaaaataccacaaactctctatttcaactctcccttattacttcggcacttcttttttctggctatgctgttgcatattcagaagttggacaattaggtaataaacaaagttgggaaagccctgaatatcaaaaagactgggggcttgcagccatgaatgcctctagtgcttatgctctgggttttcatggtcaaggtgctaaagttggggtgatggactctggtgcactgctctcacatcaagagctgagtggatcacgctttcatgcagtaaaagccaaaggtgaatatggctctacgggaatgcgctatccacaagaaatgggcggacattatgaaaaaggccaagtctttgatgttgatggtaattggatcaaaggggtgaatgatacccatggcacacatgtcactggtactgtgggggctaaccgtgatggtaatggtatgcatggtgtggcgtggggggctgatatttatttagggaatactggggcaacagacagcaataactatggcccttatcaagactacacctatttctatactggctggaaagcgatggtcgatgcgggtgcgcaagtgattaataatagctgggggactaacccgcgtattattaatacagataaaacagaggggcctgatggtggtgataccacgatacatatgcctgttaacaccacggcacagacagaatacgaatatttctactttaaaaaagtctatggtgataaaccttcctttgttgatgctgcttatgatgcagttaaaggaacgaatgttgttcaggtctttacaacgggtaatcgcgactttgctcaaccttattatcgtcctctttatccttattttaatcccgaagccgaacagcattggattgcggtggcgggattgaagcaaaatgcggataacaccggttatgtattagaaaaagtcttcaatgaagcgggtaatgcaaaatggtggacagtggttgcaccgggtcgaaatatctattctacagtagttgatgaagagggaaatccaaactggaaagtctttagtggtacttcaatggccgctcctcatgtgacgggggcgatgggagtattaatgtctcgttatccttccatgaacgccattcaagttcgtgatgtcatgttcactaccgctaaccatcgtgatcctgatggctctttatatgagagctggacggccgcagaaggtactcctgatgtacgttatgggtggggaacaccagatttagataaagggatgtatggtccgggtcaattgctaggtaaatttgaatataacctaaatgcgacaccgcttgatgtgtggactaatgatatttcccaaactgctttagatctacgtaagcaagaagatctcgcatggttgaaagaatataccgaaaaaggtattgcggcaggaggtgattatcatctcggtactgattttgtgattaatgatggcaatcctgatcctacatcacatattgttagccaagaagatgctgaaaaatggcgtcaagaatattaccaaaaacgcgctgatgctattcaagctaaaattgatgctggcttatatgatggtgctttggtgaagcgaggcgaaggtacgttagtcatgacgggaaataatagttaccgtggtggtacaactgtcgaacaaggtactttatatggctttagcggatcttttgggacgcaagccgtcaatgttaatggtgggaaattaggtattattgagcgttataacgatacttttactcaaaaaggccaattaacctcaaaccaaaaccataaagtaaacattaatattaatgataaaggtcgttatttagtgactgcaggacacaatgttaatattggtaacttagtgcttaatcaaggagccgatattgatgtgggggcagataatgttgggcaactaaaagatatttatcttaataatagtgttgttgtcggtgaggtgaatacagatagtttagtcgataatcgcactaaaacgaaaatgttagccagtaaccgtgtggttgcagatcctgccacaaccactactgtcatcaataatgattatgctttatttgataaacatatcacgataacagataaaaccatcagtggtagtttaactaagaaagaaaatacgactttagccacctttgctgataatgaaaatggtcgtgctattgctaatgcattagataatacaggggatggtgagctatttaatgctgtattaccgatgaatgaaaatgatctgaaaaccacttatcaatcattgggtagtgatatgtatttaaatgccaataatgccagtattgttaatgtattgggtttaactcgtacagtgaaagatcaggctattggtatcggtgatggtcgtcatgcacaactaggtaatagtaatgcgcgtatttggatcagcggcatgggtcagtggggtaagacggattatggccacagtgatatggatattgatttctatgttgggttattaggtgctgaaattgatgttactgaaaatactaaagcgggcctatttttcggtgcaggctccaccaaatataaaggaaatcaatatggaaagatagatagtaatgatattcatattggtgcttatgggatctctaatctttatgatgttgcctcattaaattatggatttacacatacaaaccaagatagagatgccaaaagaacactctggataggacaaactgcaggttataactcaaccagttacgatgcgaaaattagtcaattctttttagaaggcgcttatactcaattgaatactagccagtactcaattgaaccttatgctggatttagttggttaagagtatccactgataatatcaatgaaaatgtgggtaatatgaagtttaccactaaaacagatgcacaagatattcaagttgctacggttggtttacgtggtggatatccatttatggcaggcaatattaatatggcattaaaaggtgatatatcagcaagccatctgtttggtgataatcgccctgaatcacgtctatggttatccaattcaggtgaggcatcactacgaggtggtaaactagataatttatttggtgttggtctaggtgttgatgcgcagttaagtaaatcaaccactttcggtatctcttatcaaggtcaatataatagtgatatcaattcgagtggtattaatgcaatattgaaaattaatttctaa

SEQ ID NO: 301497 - DNA, 1473 bp, Proteus mirabilis
atgaataaattaactccattacgacctatacctaccttaattgctgttgttattacccttatcatttggtttgttatccctgttccccaaggggtagatcccaatgcttggcacttgttagcgctgtttgttggtactattgcggctattatcggcaaagccttacctataggggcagtatctattattgctattgcgcttgttgccgcaacaggcgtcactaacccagactcaactaaaggggcgattaatgatgcattaagtggcttttccaacaatcttatctggttaatcggtatttctattatggtttcaatgagtcttaataaaaccggattaggtgctagaattggttactattttatttcgttatttggtaaaaaaaccattggtatcgcttattctctagctattgcagaaacgatcctcgcccctgttacgccaagtaatacagctcgaggtggcgggattattcacccaataatgcgatctattgccgatagctttaattcaaaacccgaagagggtactagtggtaagattggtcgttatttatcgctagtcaattataatatcaatcctatcacctcagcgatgtttattactgcaaccgcgcctaatcctcttattgtaagcttaattatcggtgaaacagggcctgaaaatgagttaacttggtcaatgtgggcaatagcggcttttgttcccgccattgtttcattatttttaatgccgattgtgatctactttttatataaaccagagataacccatacgccgaatgctccccactttgccaaagagcgtttagctcaattaggccctatttcattgccagaaaaaatcactttgggagtatttgcactgttattaattatgtgggcaggaatacccgcactattatttggtgatgcttttagtattaatgcgactactgcggcttttattggtttatcaatcttattatgtactggcgtattaaattgggatgatattttaaaaaacaaaggcgcatgggataccgtggtttggttttccgcattagtaatgatggcctcttttttaggaaaattaggtctaattaaatggctttcattaagtgttggtgccggtattgatagtatggggataagctgggtaagtggtatgatattgctcgtgctgatttatgtctattctcactatttctttgctagcaccacggctcatattaccgccatgtttgctgcattctatgccgcaggtttaacccttggcgcgccaccaatgttattaggacttattttagctttctcttcttcattaatgatgtctttaactcattacggtacaggtactgcaccgattattttcggctcaggctacgcgaccttaggtgagtggtggaaagcaggttttgttatgagcattgttaacctcattatctggataacccttggtagtttatggtggaaggtgctggggtattggtaa

SEQ ID NO: 301498 - DNA, 303 bp, Proteus mirabilis
atgaataaaaaaatatcaaagatagttggcgcaagaataaaaatgttaagacaacaacatggtatgacgggtagtgagcttggtgctttattaggagtaagccagcaacatcaatcacgctttgaaaatggggagtgcaatattcatgtggatgtaatttacttattatcttatatttttaaagttaaattaaattatttttttcaggatataaatgactgttttgatcaagaaggaatagcctataaagaaagttattatcattctgagacgattgtcgaaaagtgtgaactttggcgctag

SEQ ID NO: 301499 - DNA, 1092 bp, Proteus mirabilis
atggcacaagtcattaataccaactatctatccctggtaactcaaaacaacctgaacaaatctcagggaactttaggaagtgcaatcgagcgtctgtcttctggtctacgtatcaacagtgcaaaagacgatgcagcgggtcaagcaattgctaaccgtttcacttcaaacgtaaatggtttaactcaagcttcacgtaatgcgaacgatggtatctctatcgctcaaacaactgaaggtgcattaaacgaaatcaacaataacttacaacgtatccgtgagttaactgttcaagcgaaaaacggtactaactctaattcagatatcacttctatccaaaacgaagtgaaagaacgtttagacgaaatcaaccgtatttctgaacaaactcagtttaacggcgtgaaagtactgagcggtgagaaatcagaaatggttatccaagttggtactaacgataatgaaactatcaaatttaacttagataaagttgataacgatacattaggtgttgctagcgataaactgtttgatgctaaaacagagaaaaaaggtgttacagaagcaggtgctgcaatcgatgcgaaagatatcggcgttgctggtgcaacttcatacgattcaggtacagtaaaagaatataaagtagatggtgttgtttctgctgataaagtaattttcaatgatggtactaaagattacctcgtaaataaaagcgatttcgcactggaaggtgctgacaaagctaaatttactggtgctaaaacaactgaatttacagcagatgcaggtaaagacgttaaaactttaaacgttaaagatgacgctttagcaactttagacaaagctatcaacaccattgatgaaagccgttctaaattaggtgcgattcaaaaccgttttgaatctactatcaacaacctgaacaacactgttaacaacttatctgcttcacgtagccgtatcttagatgctgactatgcaacagaagtttctaacatgagccgtggtcaaatcttgcaacaagcgggtacttcagtacttgctcaagcaaaccaagtaccacaaactgttctgtctctgttacgttaa

SEQ ID NO: 301500 - DNA, 1053 bp, Proteus mirabilis
atgaaactgaccattgacaatataaagccttaccttttatttgaaacaatttcaggtagtcgttcacaaaatttggcaacagatagttcagatactgatattaaaggtgttttttatctacctaaagagatgttttattgctctgattatgtgccacaagtaagtaataaaactaatgatattgtttattatgaattagggcgatttgttgaattactgtgtgcgtctaatcctaatattttagaattattaaatgcaccagagcatgttgttatttatcgtcatccattatttatgcaatttaacccagaatggtttttatcaaaggaatgcgtacagacttttgtgcattatgctcaagggcaaataaaaaaagcgcaagggttaaataagaagatcatggatcctatagataaagagttaaaaacaatccttgatttctgttatatcattgaagatggaaaaagcctattactgaataattggcttaaaaaacgttgttgggagcagcaaaatattgggttggttaaaatcaatcatgcacaaaatctttatgcagttttttatgatccaaatagtgattatcaaggcgtaataaaaaaagataatgccaccgatgttttactaagcagtgtctctgaaacagccatattacaagcctatcttagttttaataaagacggctacagtacctattgcaagcagtatcatgcttattggcaatgggttgaggagcgtaatgaagcccgctatcagcaaaatattgaacatggacgaagttacgatagtaaaaatatgatgcacacttttaggttgctttatattgcattaggaattgccactgaaaaaaaagtcaaagtttggtgtgataacagggatgaattgttagaaattaaatctggggctttaagttatgaaacattattagagcgaagcaaaatattaatagaaaaaattgagcaagcttttcaacaaagtcaattaccagaaaaaatcaatcctcaattaattaagcaagtattagtgaatattcgtaaagaattatatcaataa

SEQ ID NO: 301501 - DNA, 1614 bp, Proteus mirabilis
atgaaattaagcagtaacaatgctgaaactatggagagccttcgcagtgagcggaatcaatatcgtatacttgtcgatattacaaattctgtattagcgcatctagacatggatggcctcatttctgaagtatctaaagaaatacatcgttttttcggacttaatcatattagtctgatgttatgtcgtacttcatcacaaaatagtcatgaaggtattctttattctagtcgttatcagacaggaaaatctgtcattcgtcaacaacgtaagttcagtagcgccaataacaaagccgaagaaattattcatcaaaacaaacccgttttaatcgatatcaataaagaagatcaagacgatgttttgattaaacgtctcgtaaaacaaaatatgcagacggctttgttattgccactggcttttaaccgtaaaccgctaggtttattaatcctagcgcatgaaataagtagtgtttttactgaagaaacttgtcaattattgcaacaaattgccgcgcgcatcgggattgcaattgaaaatgccgccgcttatgaagagataactcaccttaaagatagccttaagaacgaaaatatttggcttaatgaacaaataaatagaaatggtagttttagcgagattatttatcaaagcgatgccatgcataatgtactagaacaaattgagttagtcgctcaaagtgacagtactgtacttatcttaggcgaaacaggtactggtaaagagttaattgcacgagcgatccatcgtttaagtcatcgtaaaaataagacgatgataaaaatgaattgtgcagcagtaccttccggtctgttagaaagtgatctttttggacatgataaaggcgcttttacgggtgcaacacatgcccatgtgggtcgatttgaaatggcagataaaagtacgctttttctcgatgaaattggcgatatgcccattgaattacagccaaaactattacgggttctccaagagcgtgaaattgaaagattaggtggtaataaagttattcctgtggatgtacgcttaattgcagcgaccaataaagatttatgtgaactgacggatgaaggggaatttcgagaagatctctattatcgtctgaatgtttttcctattattatcccgccattacgggagcgacctgaagatatccccttattggcaaaatattttacgcaaaaaattgcccgtcgcatggatagaaaaatagactgtattccaacacatgctttggagcaattaacccattatccttggccgggaaatgtacgagagcttgaaaatattattgagcgcgcggttattttaactcgaggctctacgctaaatttgcaactaaaagagttaaatatcaataaaccatctcgtttaaaacaagtgctttcgcaaccatcagccatagaaaaaaagatgcaaactagcgcacctgaaagtgatgatgaagagcgtgagcggataatacaagcccttagagaaactaacggtgtagtggctggtgccagaggtgcggcattaaaattaggattaaaaagaaccaccttattatcacgtatgcaacgcttaggtatttccattcctgaaattctttag

SEQ ID NO: 301502 - DNA, 1470 bp, Proteus mirabilis
ttgacagggctaattaactttgcaaataacattttatggggatatgtacttatttacttactccttggtgtgggtatttatttcactattcgaacaggatttattcaaatccgccattttggtcatatgttttctattttaaaaaatagtcataagtcagataaatcaggtatctcttcattccaagctttatgtacaagtttagctgcacgtgttggaacaggtaacttaaccggtgtagcaattgcgctgaccgcaggtggccctggggccattttttggatgtgggtagttgcaattataggtatggcgacttccttaatagaaagtacattagcacagttgtataaaactaaagatgatgaaggtaactatcgcggtggccctgcttattatatgacaaaaggtctcaatatgcgttggatgggcgtattattcgccattttcctcatcattgccttcggacttgtttttaatgcggtacaagctaactcaatagcgcaagcagctgcatcagcatttaatttcgatccattatatgttggtattggactggtggtgatgagcggctttattatttttggcggtctacgttggattgcgcgtgttgctgagctggttgtacccattatggctatcgcctatttattattagcattttgggttgttgcagatcattttgaacgtttacctgaagtgtttatgctaatttttaaaagcgcatttggtttacaggaagccgcagcaggggcaattggctatggtattagtcaagcgatgacccaaggtattcaacgcggcctattttctaatgaagcaggtatgggctctgcacctaatgccgccgcttctgcaacaccttacccacctcatccagcatcgcaaggttatattcagatgttaggggtatttatggataccttggtgatttgtagtgcgactgcagtgattattttatcctcaggtgtgttagataattatcaagatggtattaatggtattcagttaacccagctagcattatcgtcaactgtcggtggttgggggagtacttttattgctgttgcgatttttttctttgcctttacatcgattattgcaaattatgcctatgctgaaagtaatatgatttttttaggccgcaatcatatgacagggctattcttactcagatcagctgtactggcgatggtgatgtttggcgctttggctgaaatgccgttagtgtggaaaatggctgatctctcgatgggattgatggctgtcactaacttaattgccattattttactttcaggcgtcgcgttgaagttaattaaagattataaccaacagcgacaagctggtgtattacccactttcaatattcgccaataccctgaattacaaaatgatattgagcaaggtatttgggataaagagcctttacctaatgagccgttagtccgctgtgaaaaggtgaggcaataa

SEQ ID NO: 301503 - DNA, 1056 bp, Proteus mirabilis
gtgatcccctatcaaaatattcccaatgatcattttgaaatattaacgcgattaattcataacagtttaaaacgggctaatatcaccctagaaaagcttcgcgcttcacgtaccataatgtatcttgcaggtcacgggcctagagctgattttatggattaccaagggttttatgataaaaacgatgccgaagacgttcaatattctccacagataaaatcactccatgcagcctcttttgcacaggatgaattagcgaataaattgtgggctgaatatcagttagatttcccacctattcctatctattgtgctagtaattctgcgttaatggctgtgcatataggacataatgaaataagccaagatatggcggatattgtaatagtattgtcgtggaatagcttacttttacaagatatagcttttatggatagccaaggcatgttagttgaagcgcacgctcaacctttgagtaaatacagtgatggggtcaccttatcagatggttatgccgtgatgattttagaaagccaacaacagataaactcgagacaatatcttgcacctgcttatatctatcattccgtttttatgcaaagtaatgctgaacggacaatgggaggcacattatttaacttttatacgatatcaaaagtgatttctcagcttctcgatcttagtcattatttaccaagtgatattggtgctatttttattcatggtaatggttcgattattagtgataaagctgagacggtagctattactaacatctttaaacaacccattcctattattagctataaagggcagataggttatatttctaattgctctggtattattgatttaatgattatagctgattcattaaaaaataatcgattgatcccctcgactacacattatccaatagatgatggaatggaggttaatttcctcactaatcaagagtgtgtgaactatagcgctaaacctattttaaaaatcggcttaggtatggatggatctattattgccatgttattaatcgcaaatggagagcaaggatga

SEQ ID NO: 301504 - DNA, 891 bp, Proteus mirabilis; identical to SEQ ID NO: 297130

SEQ ID NO: 301505 - DNA, 909 bp, Proteus mirabilis
atgcaaaatgtgttgttaacgttatggcctttatttgcgttaattgcgctaggcgctattttaagaagaaataaagcatttgaacctgcattttgggtagggactgaaaaattaaattattttttactctttcctgcattacttctcaatagcttggctaatgctcctttatctgatcctcaattacctcaccttgctggggctattttctcagtagtcatcattaccactattttgtgtgttatttttaaaaaaataaccggctggtctgctggccgttttggtgcgatcgttcaaggcaatattcggtttaacacttatttaggtttagctattgtcgctgatttatttggcgttgaaggtttaggaatagctgctttgatattagcaaccttggttcctctatcaaatgtgacttcagtgctttgtttaaccgcagggcaaaatgtaacttttcgtcaattaatcttcccaattattaaaaatccattaattatctcttgcgtaatagggattgttatcaatttatcaggaatagggcttccttttggtagcgatcaatttctaaaattgttagctgcgactagtttacctttagggcttatctgtattggtgcggcattacatttatcaacactaaaagcagaaagtaaaatgattagtattaacacagtgactcggttgcttattgtaccgataattgcatatagtgttgctaattttttaggtttgtctccattagttatgatgcttttagtcattttcttttctatccctacagccccaacttcttatattttaactcgacagctaggaggggattctgagctaatggcggggatcattacttcacaaaccatgcttgcagcaattaccttgccgatcgtattaagttttttaattccataa

SEQ ID NO: 301506 - DNA, 663 bp, Proteus mirabilis
atgttcaaaaaaagcttattagctatttctttacttactttatcaagtagtatcgctttcgctgcgacaccaaccgctaaattaaaagtaagtggagatatccaaccaccaacttgtaccatcaatggcgaaacaagtgaaactactgttgaatatacttttgctgtaactcctggccttttccctgcaaaaggtgatttaacattagagcctcaatcaaaaaatattgtcgtaacttgtgatgcaaaaacctatctagcttttactcctactgataatagagctgggacagaaaaaaaagaaggtgattcttattttggtttaggcagttataagatggcagtcgatggaaaagaggctgttgatactaaagtaggttactacacagtttcaatgaaaaatgccacagtaaaagaagatttgactagtgaagaaaagaaagtctatgtaatggattctagatatggcagatctacttctaagacactagtaaaaaatgattcattaggttgggctcgtagtaatgctaatgattatgctgacggtcaagtatttgcggcagattttgaagtcacaccaaccatcaatagcgcactaaaaaatagtgatggtgatgctaagttagatggtttagccacattaacattccaattcggaatttaa

SEQ ID NO: 301507 - DNA, 558 bp, Proteus mirabilis
atgaaatttaataaaatagcattaactgttctattagctacttccgctatttctttaaatgctatggctgataattctaatacaggtgttatcaagtttagtggtactgttgtaaatactccatgtaatattgatcaagaatcattagagcaagatgttaagtttggccagttatctcgcaaatcattagaatctggtcaggccgcggagaaggagttttctataaaatttactaattgtaattttgatgagtttagtaaagatgcttcaggtaaccctgtaccagttaaaaccatgaatatggtatttactggtcaaaattatgctgatgcaggtaaaacattgttagcgacatctacaggaaatacaaataatttaggtattgcaatcgatggttttgaatttggtaagccaacagatgttctatcacgaattgttaataaaattggtgataatactttaacatttaaagcattagcaaaagtcgtcgatccatctaaagatgtggtagaaggtacatttagcgcgatctctaatttccgcattacttacgaataa

SEQ ID NO: 301508 - DNA, 507 bp, Proteus mirabilis
gtgagaaacgtcacggtcagtcagtcatgcggtaaatggtacgtcagcattcagactgagcatgaagcgacagaaccacaacatgaatcaacctcaatagtcgggcttgatgcaggcgttacaaaacttgccacgctttcagacggtacggtatatccgcccgtcagcagttttaaagtaaaccagcgaaagctggcaaggcttcaacggaaattaagccgtaaaatcaaattcagtgccaactggcaaaaacaaaagcgcaaaattcaacgtctgcattctcatattgccaatataaggaaagactaccttcacaaagtcaccagcgaaatcagcaaaaaccacgcaatgattgtcattgaggacttaaaggtcagtaacatgtctaaatcggcaaaaggtacgacagaacggcctggacggaacgtaaaatctaaatctggtttaaaccgcgcaatactggagcagggctggtatgaaatgcgccgacagcttgagtacaagtag

SEQ ID NO: 301509 - DNA, 309 bp, Proteus mirabilis; identical to SEQ ID NO: 298042

SEQ ID NO: 301510 - DNA, 354 bp, Proteus mirabilis
atggctgatatttctgaatatgcgggatatagtaggaatagcggggcgttgacttacaagacagtagattttggtgttagtttgtttctttcatttggtgcattagttaaattaaaagatcctaaaaggttactaaatactccttttattcctataaaaaatagaaataaagctatgtatcctagcttaattgatcgttggttgaatgaaaagggggggctttttttatggcatgcaatgcgtgctgattttacatttaaagtaaaacaaatgtcacatccttatttcttatatacttctgctatggcagcaaataagtttaggttattactttcggaatatactgataactaa

SEQ ID NO: 301511 - DNA, 318 bp, Proteus mirabilis; identical to SEQ ID NO: 301433

SEQ ID NO: 301512 - DNA, 198 bp, Proteus mirabilis
atgaaagttaaatattcctacccaagtaaatttgtattcacgtttgataaatttaattttgaaaaaggaaaagtgaaagagataaatacaaaacccattttaattaaagacgagtcgcatttaaaaaatgcactatctcagcttgctaaacaaaatcaagtcgaatttgattatatctatatgcaagttgttatttaa

SEQ ID NO: 301513 - DNA, 135 bp, Proteus mirabilis
atgtccaatgaaatgataacagccgctattcgatttgcaaaggggaaaaaaaccacatttccgattatgacaataaaacaacttggtgaatttatcgagcgtgttcgtatagagcgtataactttaaatcgttaa

SEQ ID NO: 301514 - DNA, 249 bp, Proteus mirabilis
atgggaaatttcaaaccaacaaaaaaagagctagccattctagataagtgcttttttatctcagatgattttttaggagttaaagatctctataataaaacgataacagttggagagcatgacactatcacatattactataaaaacgatgaaatcattggatggtctgacgatgcaagttttgcatttttcttacatgaaagtttaattgatcatgtactaacagaaagattagaaagtgatatttaa

SEQ ID NO: 301515 - DNA, 486 bp, Proteus mirabilis
atgcctaatcgacttcttaaaaaaattttaatcactctaattttaacgtttagttcatcttcctttgcagattgttttgaaaatgcaggaaagtattacggtatagatcccgactacctgagagcgattgcatggcaagaatcacgattcaaacataatgcaataaacaaaaattatgacgggtcgcttgatgtagggattatgcaaatcaataccaacacgttaaaaagtataaaaagagaatatccgaatttaaccaaagaccgtttactcaatgaaccctgcttaaatatctttgttgggggaatgctcctgaaaagaaattttaatgcttatggaaaaaaatggttgtctgtcggtatgtataacgcaggtatgagaaatagtaataaagttattcaaaatcgatacaactatgcatcaaaaataaatcagcattatcaagatttgaaattagggaaaatagaacgaatagctattcattaa

SEQ ID NO: 301516 - DNA, 384 bp, Proteus mirabilis
atgggttataacgtaaatgataacgaaaagggtttaagaacatcgttaagaattcctaaaaggatagcgagaacaatcgaggaagttatcaatcatagaattgataatgaagaagatgagcttcctataaaccgttccgctgttgcaattgagatgatgggaatcggtgcattagttttaaaaaaaggtctaaaagatgattctcaaattcaaaaggcatattcaaaagaatttgaaatagttattaagttacttttgacgtgtgagcattttgcacgaatgacagcgactaatacaggagaaacagattataatgttgattctcctgaactagtggagataagacaaagaattgctgaaatggctaaaaatttacttccttaa

SEQ ID NO: 301517 - DNA, 534 bp, Proteus mirabilis
atgtctacggtatcagagcgattaaaaaagattatagatgaactaggtatacgacaaaatgatgtggcaaacctaacaaatttgtcacaacaaacgatcaactacatattaaaaaaaggcgtagaaaaatcattttacacataccaaatcgctcttggtttaggtgtaaatccagaatggttagcacatggtataggaaaggtttacttagaaaaaagtattgctattccttgctacaatagtattttagatttaaaaattgatttaccaaatttgaaaagaaaaaccttagtgaaggatattcctatcgtgatatacagctttagtgtctatctagatagtcataatttagttatctgcggcatagcacctgatgatgagttagatacaaaagaatatctgtgcatccataacaatcaatactccctgatagaaaatgtagaaaacaaagatgcttacgacctttgttttctcgtattagaaaaaagaaaaagcaatctaaaaaatgaaaaatttaaggaagtaaatttttag

SEQ ID NO: 301518 - DNA, 324 bp, Proteus mirabilis
atgaaaacaaatcaaatcagtttaaaaaataaaacaaattattttttagaaaataaaagtgcaattacaacattaatgttatttgctattggattaattattatgatgatgccaactctgcaagctcatgctgatgatttatttgcatcaggtaaagaacaagtaaaagattcatttggtaaggattcaacgattatctatattttatatgttattgaaattttaatggcagtatttacctatatcagaacaaaaaatctaatgatgatgggtggtatcgcagccgttatgatcttcgttaacgttgcatttggtttattctaa

SEQ ID NO: 301519 - DNA, 300 bp, Proteus mirabilis
atggatggaaagaaaaacaggtatatctttccatccacgctgtcaaatcaacggcgtgtgatgggattacctctcgatgagttttgtatctatgtacccttggcagttgcaggaattttttctaacccatttctttatttcccaattttagcgatagcatatatatcaattaaaaaacttaaaaaaggaaaaggaagtagttatttaatcaacttagtgtattggtttttaccaaaatcaatcactgatttttttataaatgcgttacctgcatcataccttagatattggatatcataa

SEQ ID NO: 301520 - DNA, 537 bp, Proteus mirabilis
atggcaatctctgtcattgttcttatttttatgacaatcctatctattgggttcaattacaagttgtattctgattaccgaattttagtgaatcagcttgttagtaataaacaaattatcattaaaccgatggtaggtagtgatgaagaaatatcattcaaaggagaaagaggagatgcgcgttatcttcgtttaatggcattgagtttcattgggttacgacttgatgttaatgctcaaactgttgaacaaagtcatgagttattgagtgcttatcttgctgatggttttcgagaaaccatgatccctgttttatctcaagagaagcaacgattaaaaattaacaatggtagttcagtattcttcccaaaaactattaaagttagcccttcaaatggcattgttgatgtagttggtgatttacaattttcatatggaattgaaaaggcagaacccgttcctaaacattatcgattaagaatggaaatacgaaatgggaaattcgaacttactgactttgtggaaatggaaaaatga

SEQ ID NO: 301521 - DNA, 720 bp, Proteus mirabilis
atgaataaaaaaatcaagttgttaattatgattccattgatggttttgtctaaaggtatcttggcagattcaatttctattgaccctatgcaaaaaatttcctctcaggtgagtacaaatgagcctaatgttgtttcagtttataacgataaaatcatatctgttacagccaatagtggaaatattttaagtaataacaaaactaacgatggaaaaattatttttacaacaaaagcgacaaaaagtttcaatatggttattgaaactgaaacgggatttacattcacacttattgcacaaccttcaagtcattttaatggcgcttcgctcactgtttataataagcaagctaaaggtaacgatgaagctattagctttgagacagataaagatagttactcagggcttattacagactcattaactcaggtcatgagaggaaaaagtcctataggttttgttgaaacgcaatccgctacacatcatttaccaacaaatatcacacaatatcttgatgtaaaaggtattaactcatggaatggccataactatattattcagcaatttaatgtgactaatcgaaccgtacaacccatagaactcaatgaacgttacttatgggaacagggcgttatggctgtcagttttactcctaacataacggttttaaagcctaatatgagcataaccgcttatgtggtgcgaaaaggagttaagtaa

SEQ ID NO: 301522 - DNA, 1350 bp, Proteus mirabilis
atggcgaataacatcaactcatatattaaaaataatcagcgtaaattatttactattatcactatagcgattgttattgttgtttctgctatttatttcattaataaaaaaatggaggaaggaaaggatacaagtaatgaacctcaatttgttgatgattcgattattgaacccaatttaacaggaaccgttgagaatacatttaatacgcgagttgattctcaggtgcttactgactcccaaactatagcaagagaaagtcagcaagccgtaaaagaactgacgaaagaatttcaaaatataaaaacgaatctcgacaaaaaagaacaggagattggttcccttaaagagaaaattgctcaattagaaaaagaaaaaactctacaaactcctcaagctaacataaatacctcattaaataatgaaagctctacgattgagcgaataggtgaaggacaatatgggatcagtgatagaaaagtaacttacagtacacctaaacctattcaaggcttacttgaaactcaaaaattcacatatgaaaaaaaagagtcaaagaaaagagaacgttattatattccttcgggggcattttctagtgcaattattttagaaggggctgatgctaatgcagctgttacagctaaagagacagatacaacaccaatgcagtttaaactcacaggtaaactccatttaccacagaatcagaaaattgaacagcttgaaggttgttttgttactgctgcgacatatggggatatatctagtgaaagagcaatagttcgtttacaacgattatcatgtgttatcaatgaaaaacatatagacatgcctgttaaaggacacgtttcgttttatggtaagaatggtattaaaggcattcctgttatgcgtaatgggcaaatattgggacttgctttcacttcagggactcttggtggtttaggtaatgcagtatcacaaattggccaaacgtcagttggaattggtgctgaacataccctctctgctggtgaagttgctcaacaatccgcaggtaaaggagttcaaagtgctgcaaataaattagctgattactatattgctttagcggaacaatatcatccaataattcctattggctctgccaatcgcgttgaaattgtttttcaggaaggtttttgggctgaatttcttgaagatcaagaaattgatgaaacagtacaatcagtacaagaacagccaagccaattatccaataactatcaagataactcagacttaccccctgaactggtgaatcaattaggtcaaattgaacgtggaaatcttgaggaatttgttgttcccaacaataagagacaataa

SEQ ID NO: 301523 - DNA, 594 bp, Proteus mirabilis
atgaataaaatacttttgattattatccctgttttacttacaggttgcgctggtatgaacagtgaatttgaatttaataaacctgcaaaagattcaggttactggatgcaacaagctgatgaaatgacagaaagctctaatgactatgttactcaacagtcattaaatagtagcaacagtgggatgagaaaatttaacctcaataattacaaattaattaatattgccaatatcacattgcccgttaaatttgtcagtgacgttaatgtagtctcaaatttaaacacatcgtcaaaagcaaaaagtacaatgggattgaaatcacaatctattccaatggaaaataatccaacaatcacgacatcaaactatgacgtaacaagaacgtcggtcacaactcctactgaagtgactaatgctgtagctaactgcaatcaaaaacgatgctatcaagaggcaggagagccttttgtcacacctgatcgcgttcagcgtgtttggttagctccgtatgtatcgcctgataataatgttcatgttggcgagattgtctactttgtcagtgaagattcacgctggtatggaatggagtaa

SEQ ID NO: 301524 - DNA, 2589 bp, Proteus mirabilis
atggcattagaagattttaatattataagaatcattagtaatattttaggggaacgagatacctctgatgaaacttcacagctaataaaagaattagattatccccatatcagtgatttactaccttgcattggttatgacactgaccatgagttattttataataaaaattcgttaggcttcattattgaagcccaaccgttagttggtgcgaatgaaagtattgttgagggactagaccgaattttacaaaataacgtgcctagagatcatccattgcaagttattttacttggtagccaatcagtaaagagtgcgattgaatttggtttaaaagatttttcttggcagggttatcgtgccgatgaatgcaacaagctaacacattctttttatcttgatgcagcacaaaatacgtttcaaaaccctgctgatcatgcattaactttacgtgattatcgtttgttttttgtttactcacatccagtaaaaaaagcgaacgataatgaaatcatgaagattcgggatattaggcgttctctattaagtggattgaatagtaacagtattcattgccagcctattagtgtgaatgttttttgtggtttgatgcgtgaattggttaactttgaattcgggaaactatctgattattcacatagctatcaaaatgatcgctatttgaataaacaagttgttgatgttggtacgaaataccttgtaaagcataactacattgaaattagtactaataataagcgtggtgagttacaaaaaacgcgctcagtctccatgcacatggacactaacccaagtgaacattatctttggcaaaatggcaacattattgctgatttaatgaatccagatagggggatcacctatccttttgttatgacaatgacattactgactgaaaatcaggaaaagacaacgggtgaagctaatgcgaaatactgggatttagagaaaaaagctaactcatcttttgctaagtttttacctggaacaatcaaagagtttgaagaatggaaaaaccttagggttaatttgttgagtggtagtactgcagcaacacaataccatattggtattcgttttttttgtccgaatgatgatgatttgatgtcaaaagaaacggaaaaaatcactaaagcatttgaaaatcaagggttaaaaatggttcgcagtgattttcaacagctacggggatttttggccactattccgttttcattaacagacaacttaaaattatggaaagattttaaaacaacaggttcaattcttcgcgctgaaacattccaagcggtaaatttacttcccattattgccgacaataaattgagccgtgctggtattctcttgccaagctatcgtaatcaactcgctttccttgatatttttgatgaatccttgccgaacacaaactttaactggtttgagtctggcacatcaggtgcgggtaaatccgttgtttcacaagctatcggtcgtcaagtattagatagaaacggtcgcctgtctatttacgatattggcgattcatataaggcgttttgccacagtatggggggcacttatatcaatggtgcgacattgcgatttaatccctttgctaatattaccgatatttcaatgagtgcggagcgtgttcgagaccagttaagcattctagcgagtccaaacggcattctagatgaagttcacgaagctcttatattggattccatcaccgaacaattccctatataccagcaagatatgcgaattgaccatgttgttgaatatcttgaaaaacatagggatagaatacaagagaaaaacgcgtctaaaatcgtagaccgtatcgatgaaattacttatctgttaagaaagtatacaacgaagggcatttacggggagtttttcaactcaagcgaacccactttacgtgatgatatgcagtttgttgtgactgaattaggggctctaagagctaacggcgatttgcttatggcagtgctttttacgcttatgatttggtcagaaaacatgatgtaccaaaccgaacgtagcctacgaaaaatgaatattattgatgaagggtggaaactgttaagtggctcaaaccctaaaatcagagcatttattgaagaaggctaccgtaccgctcgacgtcataacggttcatttggcactgtaacacagtctatcagtgataaaaatctcagtacagccgcattagctgcttatgacaatagcagctttaaattaacattaatgcaagatgctaagtcttttgagtcctttaaacagaaagaacctaatgcttttagtgagtatgaatttgatttaatcaaaaaattcccacctgctaaaaaagttgggtatagctcattactcgtgaatgttggtgaatacagtagtttccatcgtttattacttgacccactgactaatgaattattttcttcaaaaggtgaggattttacctatagagaaaaaagattatccgagggtgcggatatcaaagatattttatttgaaatggcagattccaaacggggcgatttcattaactatttgcggagtaagcgttatgaataa

SEQ ID NO: 301525 - DNA, 351 bp, Proteus mirabilis
atgaataagaaattaattatcattgctcttttggtgaataccgctatttcgttattaacgcttagtggcgtggggtatctctacgtcaattctccaaaatttgttagtttcgatattaaaagcaccactgatacatttttaaatcaagtcgctaaattgaatctttcagaggaagaacaaacggctttaatgaaaaagtatgaaagaagtattaacaatatcataaatgaatatgataaagacggaaaaattgtatttgtgaaaggtgcagtaattagccaattgtctgatgaaactcaagaaataaaggcaaaactggctaaaaaaatgagaggtgggaatgatgaataa

SEQ ID NO: 301526 - DNA, 624 bp, Proteus mirabilis
atgaataaaaaactcattattgccactatcattttagcgttttcatgttctcccctagctaaagagctaggggcagtaggctctatttggaaaataaaagaaagaaacctaattactgttatacaagaaaggttagctaaaaagtttgaaaataaatcagaagaagaaatacaagatgaaatccgagaacgcatcgagcaacgagcattaagacctgatccagtacagggcgtaacaaaagcgactaaaacagaagttaggtattttgacccttcttttaccgtcactaaagatttagctgaccaaaatggtgttgtttttgcacgtaaagggcaagtttataatccttttgatatcagcggtttcacacaaacattgattttcattgatggtgacgacattcagcaattaaattgggtaaaaagtttcaagccgtccacaatgcgttcaaaaattattcttattaatgggaatatcaaggacacagaaaaatatttaaaacaaaaagtgttctttgaccaattaggtgagatttcagcacgttttgatatcgaacgtgttccttccattattgaagctgcccctcaagagaaaaaactaaaaattacagaggtggggctatga

SEQ ID NO: 301527 - DNA, 999 bp, Proteus mirabilis
atgaaatatttattatcaatattcagcttggtactcacattaacattcagtcataacgctatttcatctacagaatgtcagggtaaatgggtaaatccgataacggatatttgctggaattgtatgtttcctatgagtattgggagtgtaaaagtcagtgtaggagggttaggactccctgatacgcctaatcccagttcgcccattcagttttgtcctgcgccaccgccattattccaacgtataggtattgctattggattttgggagccgtttgcaatggctgatgtgacaagagcacctacgtgtatggtgaatatgggcggttttcaaattcctattactaaagtcggaacgggaaaagccacaaaatcagcaggtgattctacaggtactttttatcatgttcattggtataaatatccattgatatcgtggctaaatattttagaaagtgccgcatgtatgcaaggtggcgaatacgatattgcttatttaaccgaacttgatcccatgtggaacgatgatgaattagcgttgtttacgaatcccgaagctatggtatttgctaatcctatcgctcaaatggcttgcgcggctgatgctattgcagcagaagctggtatgccactagatcctttattttggtgcgctggcgcacatggttcgatttatccatttagtggcagtatcaaccatgaaagttcaggattgaatagttctatattgatgaccgagcgcatgaattttaaacttcatcggcaaggtattattatggattctgtcggtgcagacagggcggtatgtcttgaatatccaacgccaatcattcctaaaagtcgttatcgttatcaaatggtgaacttaattcctgatgctagacagtgtcacccttatggacgtagcgtgttacgctggcaaataggaaaagagctacctacatcgaaaaaaaattatggctatgttgtttggaaaaaacgtaattgcgtgatcctttga

SEQ ID NO: 301528 - DNA, 426 bp, Proteus mirabilis
atgaaaaaaatattactgacaatgatttttacgctatttcctattttatcgtatggaaatatggaatcacctaacatggaagaaaataaaaatgaagttgcctattttttatcttcttcaatccctgaaaaaacgttagcgtcattgatacgttcagcggaaagccaaggtattcctgtttatttcaatgggcttattgatgatagcgtcgataagacagctaaatatatgttgtatttagttcaaaaatacaaaattagtggcgttgaaatcgaccctaatcgatttgaatactacggtgttcgtgcggttcctgcgttagtgaaacgttgtggtggcaaattcgatattatttatggctcaggttctatcagcggatcgctttctatcattgattcagagggagactgcaaaaatgaaaaatag

SEQ ID NO: 301529 - DNA, 1875 bp, Proteus mirabilis
atgaaaaatagcattatgtacattgttattacaggtttgcttttgagttattcacaaattggtttttgtgatgctatgcgtgatgcgtcaaaagagggaagtaacttaggtaagtcctcagtcaaccaagctaaatcaacaatgacaggtttcaatcctgaaaaagaactgcaaggttttactcgaaatcctaatgaaactcagtatcaaaaaaatgattcaggattaagccaagctggaaataaagagcttgctgattcagaacttggtcaatcagcaagagatagttttatcaacaatccaagagataaaatttcgtgggatagtgaacttatcaaaaatgctttaaatataaaagataaagctgatgtaatagtgagtggttcaggggaaaactgtgttaaacaaacaaagaatgaaagctatttttctaatcacttatgtgaaaaagaacataatattaagtcaatatgtacgaaaaaagctgagataaaatggagtgagtcggtaggatatgaagaaaaagaaatttttataaaaaataaccaactagaatatacgttaaaatcagaatctaatggttattttatctattttaaaattccaatcgaaaatgaaaaaataatttcatttacttcttatacttgggctcgttattgtggccctagttcttctgataatagaatttttcctaaaaatactacgtatttactaggaaaggagtggtattcacaagcagaatccagctgtgatgataatgacttagggcgaagtgtagaacatctactttcagaaccaattatagttaaagacagcctatttggaaaagtaacgacaataaaaccacttgctaattattttttaaatagtttaaaacaaggtggtttaaaattaagttttaagtttaaagtattaaaaccatataaaacatttaaacccgaaatagtttgggttgagaattgtcctattaataaagaggaagccgtaaagttaaaagagtggtgtaaccaaaaaggagaaacaaggaaattcaaaaaggatggaagagaatatgaggtttatagtgaatgttgggaatattcagaagaatgggtaactaatgaaggggacgataatacttgctctcaatatgaaaaagatcccaattgtacagttggtgagcataagtgtattttaaaaataggaaatagctgtattcgtagtgaaataaaatatcaatgccaacatacaaataaaacagaaggctatgtttgtggcgataaattttattgtgatgatggttcttgtgttgacaccataggtagtgaaaataatggatttaatgaagctgtaagccaactagcagcaatttctcaagcaggaaaagagatggcggggcttgatgaaagtaagatgaaggctttctcaggtaaagcaatggaatgcagaaaagctgccgcaggattcagtgattgctgtaaatctagcggttggggtaatgatattggattggctcaatgtaattctgaggaaaaagcgattggtcaggcaaaagctaagaaagtgattatctcagttggtacgtattgctctaaaaaagtgttaggtgtttgtttacagaaaaaaagttcttattgcgtattcgataataagcttgctcgtatcgttcaagcccaagggcgttctggtcagttaggcattggttttggaagtgctaaaaatcctgattgtcgagggattagtattgatgaattgcaacgcttgagatttgactatatggatttttcagacttttatgaggacttacagagtaaccttaaaatccctgagcaagataaattacttgatgagatcaatcgtcgtatgaaagaaaaatttgccgaaggaaaaaaataa

SEQ ID NO: 301530 - DNA, 783 bp, Proteus mirabilis
atgaaaaaaatcgctaaaattttatctacagctatttttattgctatcagtcaaccgatattggcagatgttaaaggtaatgaatatcatgatccagttagctggcaattttataatttacctgaaaaaaaatataatgatgagaatagaaaaatatcaactcaaccagaaatgagtttggaagaaaaagcaatgcgccaaatgaaaacgattcaaaaaaaactggaagagtcgaaagcattagcaattatgaatccaactcctgaaaatatagcagtatataaaacgtatcaagatttttttactgaaaaagctagtaaattctcttctcagtgggagaaaatgttactaaaatatcctcatttggactataatattcaaaattctcattacaatgctactgcagcaataaaaacggcaaaagaaagacaagtccaagctcaagcagtaagattagttaatcaacaatacggaattttctttttttatcgaggtagtgagcctttagacaatcaacttgcaagggttgttaaagaattcagtcaacaatatgatcttgctattataccaatcagtgttgatggtcgcttttcttctgaatacccaaactcaaaaaaagatacaggacaatcaatatcaatggatgtgaaatatttccctgctatttttttagttgaaccaagaaaaggatcatttaaaccattatcttacggattcatttctcaggatgatttagctcgacgagttttgaatgttgttactgattttaaaccacgaatatga

SEQ ID NO: 301531 - DNA, 531 bp, Proteus mirabilis
atgaataaaatagtgattgtattaggattttttttttctagttttagttactcatcaacacttgatgaaattaaacaattggaaataaataaaaatttcaaaaataattattctgtacaagttgaaagtagagaaaaaaattttattcaactttcaacagggaaagaaatcaatatttcagattggcaaatagttcattttattaaaagtgattgtccttattgtcatcagtttaacccaacattaaaagaaattgcagatagtataaaattacctgtttttgtatatagttttgatggtaaaggagattctacatttcctgtcgcctatccagttaacaacgaaattattcgtactttttttgcagaaattccgcaagcaacacctacatcattcttaatcaatgtcaatacactaattactgttccattatcacaaggcgcagtgtcagcaaattctttattacaacgtttagatgaaagttttattttgatcgataaattacaaaatgaacaaggagttattgaatga

SEQ ID NO: 301532 - DNA, 1362 bp, Proteus mirabilis
atgaaaataatcaaaaaaacaaaaatcgccttactttgtttatgtagtttatcattttcactccatgcggatgtaaactcagatctcaatgacttttttaacaaactaggaggtggttctaatgttactcaagggggggcttggcaaggtcaatcagctggttatatgactggtgggaatctatttgttcgtgtaccagttcgaaatatacagcttatttcagtcacattacctgatgtaaaggctggttgtggtggaattgatgcctatctaggggcattttcttatattaatagtgatcaaattaaagcaatggcaaaacaaattttaagtaacgctgttggttatgcatttgatttagctttagaaaccactatgcctcaagttaaatctgtaaaagattatttgcaacgattagctcaagatatgaataaccttaacgtatcaacatgccaagcagctcaaggtattgtcggaggattagcccctaaatctcaagctacaagtgaatttgtgtgtcaatcaattgcacaaaatcacagtgtttttgcagattgggcggccgcaagacaaggttgtggtgctggaggggaaacagataaagtttttaataaggctaacgcagaagagagaaagcggattccacgaaataaaaatcttacatggtcggcatttagtaaaattagtcagtttatttctaatgatcgagaattaaaagaaatgatgcaatctgtggttggtacggtgatttatgataataaaggtaatttaaccattatacccgcaatgggggcaagtgactctttggtgaatgcgttattgtatggtggcgaaaccgagatataccgttgtaatgatgaatcacaatgtttagcacctaagaaagctaaattgacggttacggcaagtaaagcaatggttgagcaagtcagaacaacattggttggtatctatgacaaagtgaaaaaggataccccgttaaccgataaagagaaaacattcatcaacagtacccgtgtaccgattcaacgctttattgtggattcagccatgctcaatatggatgcaagttttattaccaatcagtcagagtatattgcgcttgatattacactcgcctatatcgatggtttaattgataccgtagaaatggcagcggcaggctctttgaacacagaagaagaaaataaacagtttcaagataatcttgccagtgttcgagtgaaactcggtcaacgtcttaataaaattcaaattaagcaaaactcattcctagaagcggataggcagttatctactttaagaaagcaattatcaaactccgtatcatcccaaatgatgcaaaactatacgtgggagtaa

SEQ ID NO: 301533 - DNA, 2808 bp, Proteus mirabilis
atggcgaatccattagaaattacagttttgtatggtgttgatatcgttgctcagaccttccaagcggtcgccactatcatgcaaaacaacggttggaaaaccttgttatatgcagccgaaacaatgggcgttttggtttgtatcactaagtatattaagacacatgatcttcgtacttttggggcgtggatgctcacttttgtgattgtctacgctatgttgttaacaccgaaaaccaatgttgttattcgagacttggctagcccgatggttgtgaagaaagttgataatgttcctgtaggtttagccgttcctttctggtttttaactaacattggaaatagtaccgctcgaatgtatgacacatttttcgcgcagcctgacgagtttcaatattcaaaaacaggtttgttatttggtcaaaaattacttcaagatagctatacgctaggtatcaaaaactctgaatttaatatgaatttcagtgactatacaattaactgtattattcctgatatggaactgaatcataaatacacgatttcaggtttatttaatgatccgaaggtgtatgaaaagatattttctaatgcgagtccagttagggggatttattacaaatttggcagtacagctcaacctcaatatatgacatgtaaagatgcagctacacgattaaaaccgattattgatcaagaggtgagtaaccctaatagtgcaacactttcatctttaggtcgtcgatatgcgataggtgaaaacggtcaacaaaataacgtattgttaccctctagggtgaataatgtttattctcagcttatcggtgcaagtcaaagctccgttgatatcttaaagcaaaatatcactgcaaatgctttacgttcttctatgggacgttttcctgcggcaatggatggtagtgctgatctaatcggtattacatcccaacaatctttaatgaaaatgaaattagcgcagctttcgagctatgaaattgcaggcgaaatgctgccgttcatgcatactgcttttttaacattgttaattggcatctttcctatcatggtattagctcttttcattaaagaaatggcatggggggtgactaaaaattacctcaatgttttggggagtttaatgttgtggccagtcatgtttgctatttttaataatattattaatacgctttcaggtgtcacattacatggacaagcatttaccatttcgaatatggacaccgcgctaaaaaatgcaagctcaatggctggtgtcgctagttggctaatgttatcgataccctttatcagctttaaattatttacgggattggggcaacaaatcgcaagtgctggctcatacctcggtaatgctttaaccagtgccacgtctgccgatgctgctgctgtcgcgtcaggtaactacaacatgggtaacatgagtatgcaaaatgtgagtgggtttaaaacagatttaaaccattcatatagagaaggcttgtcaagcgtacaaacgtcgactggtgcgatggtcacaacgacacaatcaggacaggttatttacgacaccaattcgagtatgtctcgtttgccaatgaaactcgatacatcttctatacttgattctagttttagtaaagcattaagtgctcaacaacgagaaacacaatcttaccaagaaggttatcgtagctctgttaatgatagttataacattgcaactgcattaagtaacaactttgcaaaaagtggcgatatggaaacgggattatcgaaagaacagcgagaatctattgaacaaataacgcgccaatctaaagaagcaagtaatagccaaagtacatctgattataccagcagagattttgtaactaatacaagcagcactgataccggtaatattgggcttggtgcaaatgttggtgttggtgtagataaaggtgttaaagcaggtgcaaatgcaaatataggatataatcatagaattgatgatacaaacactgatgctgcatcgtatggctctagaacatcagatgacaaacgtatttcagataattttacaaacagtgagtctgtacaaacagtgcgtaatatgtctgacagtgatattaatagaattcgtgatagtgaaacccgaaatttagtctatgacttaagaactagcttgaataaagccagtgaaaactttgcttcttataatgatagtttgagtaaagaaaaaactatctcagaacaagctaaccttactgaaagtgaacgtttatcttatgcagaatcgttggaacatgaatatgctcaatatgttacaagtaaggttggggttgaaaaagcaacatctatactaactgatgctggttctcctgaagctcgagcacaacgggagcaattcaaagatgaatttacgaatgacttagcaaaaagtatcaaagatggtcatttcaataatgaatctaaagtaaatgcaagttattcaggtatgaatgtacctactgatgctatgaaatttagtgcatcaagctatcaaaaaaattcggaacagttcaaagagttagcagagaaaggtggtattgttcaacaagttacaacacttgattttgagactaatgaacgacaacgttctaatttaattgatgctataaatagagatattagtacggatggtcgagcgtataatgcggataaagaagcaagattaaatcaattatctcaagaaagaaagatcgaagatccaaacgaaaaatatgccgaatatgaacatagaatcagtacacaaaaaggactcaataaacatgactatgatgataaatattga

SEQ ID NO: 301534 - DNA, 507 bp, Proteus mirabilis
atgaacaaatttaagtatattgttataggaacgataatttacctattaaatattttttttgttagtaaaatagcaaacctattaatattaggttcattaattatatctttaatagttataattattggggatgattatataaaggctaacaaatatgtaaaatatgcatacttattgtcaattggctctattttaatattgttttttctatttgattctttattttcaggagaggttgataaattaagcctttattatcaatttttagttttttcttttgttttcttgcttgttgttaatattttttctattttgtttattaaaaaaacaaaattggatattaaattaaaaaatagtaattttagtaaatttgagtttaatgatggcgctatgaagcaaagaactatagagattaatcctgcatcaggattaccaatgaaaaatggtattgattctgttggaaatatcataggacaaaactcaaataattctatagataaaaattaa

SEQ ID NO: 301535 - DNA, 2055 bp, Proteus mirabilis
atgagcttagatgcacgaaatatgacacaaggtggtcaggttatcaaatacatgctcagtatgtttttgcagataacaaaccttattgtgtattggacaaccattcttggtgttataacatttttttcatatttgctttcaataatgaaatggatttacataaaaaatggtcttttttatttctatattaaacatgtggttttaaatattggattaggtagcaaagaaaatatatataaaaatgaatatgttgtttcagtgctagaaaataataacattatagaaaaaaaacttacagtcgcaaaaattattgatagcccttactttgtagagtgcggacgtttattaaaggaaaatgcatttgaagcatttggtgtggggttatttatttatctattctcatctataataattttttattatttaggacgaaaaggtgctcaacaaagaaaaaatgatatcattggtgggcgttatttagctaaatctgtaaaagatgttaatcgatatctcaaagcaagaggtgaacaatcttatttgaaaataggtgatttgcatattgtaaaagatagtgaaactcaaaatatcggggcacaaggttcagtaggtacagggaaaagtaccattatcaatagctttcttgcacaagttcaagccgccaatcagagagcgactatttatgataaagggaataacttcattaaacttttctaccgagacgggaaagatattattttaaatccgatggatgctcgatgcccccgatgggatttatggcttgaatgtttggataaggcagattttgaatcattcgcattgcctttagttcccgatagtaaaggtgatccattttggaatatgtcagcacgtaggttattcgtttcaaccgctgaaaaaatgagagaagaccctgacaggtcgataaaaaaattactggataggttactgtcattttcgttagctgatttacaaaagtacgtagaaggtacagatgcttcaagtttaattgatggtagcgttgagaaaacagctatgacaatacgagcggtgttaggggcttatgtcaacgcactacgctattgtgagcatttagataatgtcagtggtgagccttttgcaatacgtgattgggtgcataatgcagaccaaaactcgtggatatttatatccagtgatggtcgattagaaactgcactcaagccattaatcaccacatggattaatattttaatgcaatcaatactatcccttagcgtagatagaaaaagacggatttggacggtattggatgaattagcgagtttaggtaagttgccaaagttacaagattttatgcaagaagcacgtaagtttggaggtgtgacttttatcagtattcaaaacttcccacaactcgaagaactttatggtactaagtcagcaagtgcgatttgggatctctgtaataccactatctactttcgtgctccgagtagttcagttgctgagtgggttcaaaaagagattggcgaaattcatcataacaaatttcaagaccaatacagctacggtgttgataccattcgggatggtgttaacttttctaaaaatgatacgagagataaaattgtaagttattccgacatccaaaatctgaatgatttggagtgctatgtatcattaaaaggagactaccccgttgttaaattaaaacttgcgtacaaagcctatcctgaaattgccgaagggaaaattgaaagacgtgatatcgatatttccaaggtggaactagttacagaaacgaatgaggatgaatttgttgataaagttttcaatactcaaaaaagtaataatgatgggagtgagactggcaatgtacaatccgagcaacaaagtagtggaattgaaaaggtaatgacaaaacccaaaatagcagatttaacagctaatccaaaaccattaagcaatgagcctattgaagtagacccgaacgaaaaatataacgctgaaaataatatcatcaagaaaaataaagacaaagatgatgatggctacagtaatttaattggcttttaa

SEQ ID NO: 301536 - DNA, 4938 bp, Proteus mirabilis
atgttatcactttcaagggttagtagtgccagtggtgcatccagttactatgagcaagaagataattattattttcttggtgaagccacaacagcatggtttggcaaaggtgctgaaagtttagggcttagtggtgctgttaatcgagaggattttaagcatgtattagagggtaaattacccaatggtgaaagtttagagcatatggttaatggtgaaaacaaacatagaccaggctatgacttaactttttctgccccaaagagtgtttccattcttgcattagttgttggtgataaagcagtattagacgcgcataacaaggctgtaaaatttgctttaactgaaatagaaaaatcagcgtcaacacgtataatgaaagatggtgtggtcagtattgagcaaacgaataacatcaccgctgcgttgtttatgcatgatacaaatcgaaatttagaacctgctttgcatactcatgctattttaagcaatattacagagactaaggatagtaactggaaaacattgtcaacggacaaatcattagaatctaatgcatttattgaaaccatttggaaaaatcccattgcatttggatctttgtatcgtcaacatctaaaagctgatttagagagtcttggctataatttaattgaagctggtaaatatggacaatttgaaatagaaggtgtaccaacagaaatgttttcatctcgaagaaaagagattgaaaaggctgttggtaaagatgctacagcaaaacaaaaaagtattgctgctaaagacacacgaaaaaagaaagatttttccaatatcgacgaagttaggaaaagttggaaaaaacagttatcacaaacaggctttgatcatgaaaaaatcaaaaatcatgaaaaaatcatcaatacaaaagacaatgatgttgatattaaagctgttgttaagcaggttattaaaaatttagagaaaaataatgctaagttcacgcacgataaacttttatcacaagtgattaattctattggaatagaacgttttgaaagtattaacagcctaagagatatcattaaagaagaaataaaagaaggttatttagtccctcttaaaagcaatggcgatctctttacaacattaggtcatttaaaaagtgagactaatgttgtaaagctagttcatcaactctcaggtgaaaaaataaaattatcatcaaaagatagttcatctttagctaactatatggtcagtaatgatagtcaatttaagtctatatcaattataggtaataatgaattcttgattcaaacattaggctcaatttctcaactggcaaaagaaaatgagaaaaatagtgttgtgattgttcctgataataagacaaaacgattcatttctgaaaatatgacgggtgacactaaggttttatctgtcagagatgttaatgacgataaaaaacagttattacaaaattcaattatttcgatatataaatctgaaagcatcaagctagattcaattaatgacattttgaataaagctaaagatgataattcgattgttatttccattgatactaaaacaagaactaacgaaggtatttttagtgatgtactaaagaaggcagatatagaaacattcagcttttatgagaataataagagtaaacagatttattttgttagtgatgttgataaggatgatagattaaaaattgcattaaagcaatatatgacattatcaattaataataaagatgccattattcaagtgcataacaataaaactaaacagcaagtcaataatacgattagggggcagctaattaaacatggtttgctttcggaaagtaatatcaacgttagaaatgaacaacaagtttttctatcggatgaaaatagaaacctacggaatacgtataagaaaggactcattctcgataatgtaaaagaaaataaaagatttaaaattgtggatgttgataaggctaaaaatgcgcttttgctgattaatgacgagggcgaaaagtctagattattgattaaagatattgataagaattataatcttatcgaagaaaaaaacataaacttacgcgttggcgagaaagtgaaaacatatcaacgtgttggtaacttaaaatcaaattgtgaatatacggtctcagccattagaaaaggaagtttcttgtttggggaaaaagtatatctagaagataaagaaggaaaaaccgtctcactaaatcctaaaaaaacaactagccttgattataattatagtgagacgtttggttcatccttgaacttaaacagaaccgtgattgctattttgaataaaaatgatgtttccagtaccacgatgaataaaatcaaaaaaagcggtgattcaattattgctatcacaggtatgagtaaagaaagtgctgaatctagaattgaaaaagttcatgcagggataaatcatatacctaagaatacagggaatatttttgacacgatttcaaaaatcaatgagatgaaaaaagatactctcagtgattttgataaaattattgagttaagtattgatagatccagtggtgggaacgtcttttttaatggtgcagccgttgtgatgaatgcgactaacctagatagcagtttatctctagagaaaattacagatgcaattaatattcgtatagaaaacgggcatattattcctatcacaagtaccgcattgactgataactatgtaaaaagagaaacgtttaataatgaagttaacattattaaacgtatattcgaaggtaaaaataaagcgacaccgattagctctgacacatcccttttagacaataataaatcattaacgaaagggcaaaaagctgcgagtgagcttttattaacgtcgaaagattcgattattgctattcaaggctacgcaggggttggtaaaaccactcaatttagaactgtagcacaagcgatacaaaccactcgacctgatattacattaagaggacttgcgccaacgcatagagctgtttcggagctgaaaggtgctggtattgaatcacagacaatagccagttttactcaagaaatggcagtgaatgaatttcaagcaaattataaaaataccgtttttattatcgatgaaagttccatgacaggaaataagggattgagccaattacttgattccataacaggtaatgggggcagagttattctgtcgggtgacaaagaccaattaaaatcctttgaaagtggtgttcctttcaaattgactcttgaacgtagcgcaatcgatcatgttgtcatggatgaagtcgttcgacaaactcctgaactaaaacctgcggttgaagctatcattcaaggaaaagtgcaagagtcgatatcggttatccaaaaagtatcacctaacactgtccctcgctcaaataacaattatgcgcctgatacttccgttattgatctcaaaggtaaagaacggaatgacaaactgaatataatcacgcaagatttcgtgagtcggacgttcgatgcccgtaatgatacgtttattattactccactgaatagcgatagaaatgcgattaatgaacgcattcatgatttgttagtacagagcagagcattaccaagtggcgttgaaattcaaacgtatgagcgtgttaataatcaagaatatgatataaagactacgcaattttggcaaagcaatattgataataccgttaaaattagtaataactatttcaatatcgataacattaataaggatggtattattaccctcaccaacttagaaacaaaacaagagtttgctttttcagctttagaagctgacccgagaaatatttctgtatatcgggagcgaaatattgaagtgagtgttggtgataaaatgcgaatgaccgtgacggatattgaacaaaatgcatttaacaatgatatcggtgttgtaaaaagcattgataaagagcatgtgacgatggattttaatgggcgtgaagttacatttgacccacaacaacataatgggaaacatattgattatgcatacgctatcacatcatattcttctcaaggtgcatcaataccttatgtcattgtctatgatggttcagaagataataaacgcaatttagcggctttagataacacttatgttgaattatctcgaagtaaagagcatgtccagttatacgttgatgatttagaaaaatgggaaaaacacatcgaatataacacgggagaacgagtaactgctcatgctaaactgaattattcagaaaatcaaaaagctaacatttcattaaaaatgtggaatgaaagcgcaaatatctcaattaatctagctaaaaaacttcctgatattttacaaagtattgcaagattttccaataaaagccaagaaattttactacctgtacatgatgaatacggagtgcaaagaggtaattatcatattccggtgggaatatttagtggaacattagattttgaatcagctcaatacaaaggtgctaatgatggaaatattattgttattaacaagggggatgatgagttaacacctattgtctatgaaaaaaagaatatagaacaagcaattagtcatgatttaactgatagctctatcattataaagttagatgaaaaagataaaaatgatcatcaggttgaattaacaaaagaagaaatttcgttacaagaagcaattgaggaaattatatctagtaaagataaaacagaaatcgatatccctattaatgaggaaaaagaaaggattatggataatatcattgatatgaaagaagaaattagccacggtatcgattatattagtgagtatgacaataaagatattgataaacgtatcagacatgatgaagaaaatattttaaggcatacccccgaaaaagaatcaagtaaaaatatggatattgatatttag

SEQ ID NO: 301537 - DNA, 207 bp, Proteus mirabilis
atgaaaaataaatttgactggttaaaacagctaagaagatgtcaaaatatgagcacactagatacgatgagtgagcgaattatggttaaattagccactaaggaaaaagagtattttcagttagctcttgaccatcgcaaagctgaaattgttatgaatcagtattatgatcacgtacccgtttccgcatggaaatatgtcgaataa

SEQ ID NO: 301538 - DNA, 453 bp, Proteus mirabilis
atgtcattaaccactgaacaagaatatgaaattaccacagcaattattggtagtattacttcactccgaaaatttttaaaagaaaaagatctatcatggctcaaagctacttatgaaaaatttgagagcatcattaaagaacgtgaagaagaagaagagttacttgaacttgaacgtcaagaaaaagagcaaattaagcaaaagatattagaagttgctgcacaaatggggttagaccctacaacaatatcatttgatgatgatgctaaatcaaataaaaaaagaaagaaatctttaaaagtgactcaacccaaatatcgttttattgatccattaactggtaaagaagatacttatagtgggcaaggcagaatgaaaaaagggttaaaagcgcttttagaacaggggcattcattagatgaatttttaattgataaaaatgaacatcaataa

SEQ ID NO: 301539 - DNA, 582 bp, Proteus mirabilis
atgaacatcaataaattactaatcacagctattatttctctatctgcattgccccttttggggcagtgcaaacccctattcataggtgactcattaacgtatgaactcgccatgagctacaaagaacgtgcgcctgtagatgctaagtttttagaaagtacagggctacaatcgacaaagctattacattggcaaaattacatacagaaaatcaattttcagcagtacgatacggtttatattgttcttggtacaaacgatttgatccatcaatcagatgtgcaagcctatcaacaaaaagctatgcggtttattaacgtcattaaaagtaaaaacaaaaatattgtttggctcttaccgccaacattaaaaaatgaaaagaaaaatgcgttattaaacaacacaagacttgctataaaaaatgcggcatatcaagaaggcataagaacgctagacatgagaaatgcgcttgggagtgattatagagccattattaacggcattcaggttaggacgaatgatgggattcacattaccaaaaatggtgctgattcagtaattgaaacattgttgatgaaataa

SEQ ID NO: 301540 - DNA, 900 bp, Proteus mirabilis
atggctattgaccttagcaatcttgtcacggaaagtcgcaatcatcacagtgaacatattgatacactttcaacacttgaaatgctaaaagtcattaataatgaagataaaaaagtgccttttgcggttgaagccacattaccccatattgcacggctggtggataaggttgtaacagcattttctcaaggtggtcgattaatttattgcggtgcaggtacttctggtcgtttgggaattttagatgccagtgaatgtcctccaacctatggaaccccccatgatatggtgattggcttaattgccgggggacacaaagccattttacaagcggttgaaaatgcagaagataatgtccaattgggggcagaggatttacgccagcttaattttaatgctaaggatgtactagttgggattgcagccagtggtcgaacgccttatgtgattggcgcattagaatatgcacgctcactaggtgcggtgaccggggcaattagttgtaatcctgatagtcccatagcgcaacgtgccgatattgccattacgccgattgtggggcctgaagtggtaactggctcatcacgtatgaaagcaggcacagcacaaaaactggtattaaatatgataaccacaggtgccatgataaagatgggtaaagtgtttggtaatttaatggtggatgttgaagccactaatgccaaattaattgaacgccaaattcgtattgtgatgcaagcgacagagtgtgaacgagccacagctgaacaagcactagcacaatgccaacgtcattgtaaaacagcgattttgatgattttagccggcgtagatgcacaacaagcaacacagttattggcgcaaaataaagggtttattagacaagctctagctaaatga

SEQ ID NO: 301541 - DNA, 1488 bp, Proteus mirabilis
atgaaacagaaaccaacagcttatttccctaaccttgtattagaagaagggtctattagctcacaagtctattacgccgttagaaaggctattttagaaggcgttctatctccgggtagccgtctaccgtcaagtcgcacattggctgaaatgatgtcgatttctcgcaattctgttattgccggatttgaacgtttaattgatgaaggctatttatttactcgtcgcgggtcgggcacttttgttacgaataccattcctgatagcattaattccaatcagtgggttaaaacaaccctgccgacgtcttcattgcatatcgataatgaattaggaacacttaatcctaatttgcaaaagatgcatgctttttggcaacaatcacaactaaataccaatagtcgctttatgtttcatgtgggtgttgggtgtattgatcttttcccccatgagctttggggaagattattaggacgagtttggcgacactccaaaaaagaactcgcaacctttaactcgccaacaggctatacaccattaaaaaagatgatatgccaatatgcccaatcaacacgtgggcttaactgtcaacctgagcaagtcatcattgtcaatggcacacagcaagcgattaatcttgctactcgagtgctattacaagaggaagatactgcttggttagatgatcctggttatgacagcgctcgagctatctttacatcgtatggtataaaaatacaccccgttcgttcagatagtgacggtatggatatttctcaagctatagaccaatgcccgcaagcaaaactggttttcaccacaccttcacatcaattccctttaggtaatactctttcactttcacgtcgtattgccttattagagtgggcatcgtccaataacatgtggatctttgaagatgattacaatagcgaatttcgctatcacactaaacccattcaagctctacaaggattagacaaacatcagcgggttatttatgccggaaccttttcaaaaatgatgtacccaggatttcgtttaggctttttagtggtacctccatctttaattgacagctttaaagtcgctaaatactacaccgactctcattctggttttttagaacaagcaacattagcgctatttatatctcaaggacattatgctcgccatgttagacggatcagaaaagcctgttatgaacgttatctaacgttaaccaatacgataaaaaagtatctctctcacatttttcgtattgaaccgactgattctggcatccatattgtctgctggttacagtctggttatacagaagaatatattgtgaaagagggacggaaaattgggttagccatacagcctttatcgcgttattgtattcaatcttatcctaaacagggtgtattattaggatatgccgcacaccatccctctgaaattgaaaaaaatattattttgcttgctcaagctttatctaaataa

SEQ ID NO: 301542 - DNA, 2634 bp, Proteus mirabilis
atgagcgacattgccagagaaatcacaccagttaatatcgaagaagagctgaaaagctcatatttggattatgcgatgtccgttattgtaggacgcgcattacccgatgttcgagacggactgaagccagtacaccgccgagtgctatttgcgatgaatgtactgggaaacgattggaataaaccttataaaaaatcagcccgtgttgttggggatgtaatcggtaaatatcacccgcacggtgacagagctgtctatgaaacgattgttcgtttagcacagcctttttctatgcgctacatgttggttgacggtcagggtaacttcgggtcagttgatggtgactccgcggcggctatgcgttataccgaagttcgtatggcgaagatcgcccatgaactgctggcggatttggaaaaagagacggtcgactttgttcctaactatgatggaacagaaaatataccggctgttatgccaacccgtattccaaacttgttagttaatggctcttcaggtattgccgttgggatggcaacgaatatccctccgcataacctcggtgaagttatcgacggttgtcttgcctatgttgataatgaagacatcaccatagaagaattaatggaatatattaccgggcctgattttccgactgctgcgattattaatggtcgcagaggaatattagatgcttatcgtacagggcgtggaaagatttatatccgtgctcaggctgatattgaaactgatgagaaaacgggtcgcgaaaccattatcgtgacagaaattccttatcaggtgaataaagcccgtttaattgaaaaaattgcggagcttgtaaaagataaacgtattgaaggtatcagcggattacgtgacgagtctgataaagacggtatgcgtattgttgttgagatcaaacgtgatgcagtcggtgaagtagtattaaatcacctcttttcacaaactcaaatgcaagtctcttttggtattaatatggttgcgcttcatcaaggccaaccaaaattattgaacctaaaagaaattatcgcagcctttattcgccatcgtcgtgaagtggtgactcgtcgtaccatttttgaattacgtaaagcgcgtgatcgtgctcatatcttagaagcacttgcggtcgctttggccaatatcgatcctgttattgaattaattcgtcaagcaccaaccccagcagaagcgaaagcggcattaattgcccaaccttgggatctcggtagcgtgtctgcgatgttagagcgtgctggtgatagcaatgttgctcgccctgagtggttagagccacaatttggtgtgcatgacggtaaatactatctaacagaacaacaagcacaagccattttagatctgcgtttgcagaaactaaccggacttgagcatgaaaaactgctagatgaatatcgtgaattactgctacaaattgctgagttattgcatattttgagaagccctgagcgtttaatggacgttattcgtgaagagctaacagcaattaaaacacaatataacgatcctcgtcgtactgaaatcactgaaaataccgctgatattaatatcgaagatctgattaatgaagaaaatgtggttgtgacactatctcaccaaggttacgttaaatatcagccattgactgattatgaagcgcaacgtcgtggaggaaaaggtaagtcagccgcaaggatcaaagaagaagactttatcgatcgcctactggtggctaatacacacgatactattttgtgtttctcaagtcgtggtcgcctgtactggatgaaagtttatcagttaccagaagcgagccgcggtgctcgtggtcgcccaattatcaatttattacctctagagcaagatgagcggatcaccgctattcttccagtaagagagtatgaagaaggtaaatttgtctttatggcaacggcgagcggtacggttaaaaagacaccattacaagacttcagtcgtcctcgtagtgccggtattatcgcggttaatttaaatgatggcgatgagcttatcggtgttgatttaaccgacggtagtaatgaagccatgctgttctcagcagatggtaaagtggttcgtttcgcagaagagtgtgttcgcccaatgggtcgtactgcgacaggtgttcgtggtatgaaactggttgatgatgataaagtggtttcactgatcattcctcgtggcgaaggtgatatcttaacagtgactgaaaacggttatggtaaacgtaccgttcaaagtgaatatccaaccaaaaatcgtgcaacacaaggcgttatctcgattaaagtgagtgagcgtaatggtaaagtggtaggcgctattcaagttgaagaaactgaccagattatgatgatcaccaatgccggaacgttagtgcgtacccgagtatcagaagtcagcattgtgggacgtaatacacaaggtgttaccttgatccgtactacagaagacgagctagtcgttggcttacaacgtgttgaagatgaagatgatgcattagatgatgatgaagttgatgaaatgatcagcgacaatatctctgatgttccagagtctgaaccaacagatgatgcggatagtgaagaagaataa

SEQ ID NO: 301543 - DNA, 126 bp, Proteus mirabilis
atgttagatttagaatatctcagagagaactgcgaatatttagaagatgacataaaaaatcataatgaattagagataaaagaacgtatcaatcaactggataaatggatccgacagttgctgtag

SEQ ID NO: 301544 - DNA, 219 bp, Proteus mirabilis
atgtctacaactgcaatatctagattggttgatcttactagagacacaaataatgatgtaaaaactgctgctatttatgctctaggagaatctggttataaaaccactgctaccatatccagattgaccgatttaactagagacatcaacaatgatgtgaaaattgccgcaataaaagctcttggtaggattctaagacctgacacggctacccactag

SEQ ID NO: 301545 - DNA, 531 bp, Proteus mirabilis; identical to SEQ ID NO: 296987

SEQ ID NO: 301546 - DNA, 5085 bp, Proteus mirabilis
atgaatcgagatcaatttagacagtacacggaaaaaagagggtaccgttggtgtacacttgcagtggtactggcttcagcattagctttaacaggctgtgatgataacaaaacagaagatgagcaatcttcgacgagtgataactcacaaccaacacaagttgcggaacaaaaaagcacatcgcaacaaacgacaacacaacttggtgataaaaccgcagttacaaccaaaacgaataatcaaactgcattaactagccaagaagtgcgcaatgaacttgctcgtcgttatgcaggtaaagaggtgactgtactagatgcctctgaattacaacgcgatggcgcaagtacgatggtagtgactttttcagtaccactcgatcctgatcagaaatttgatgatgttatccgtcttgttgatactaaaaaaggtaaattagaaggggcttgggagctatctgataatctgatggagttacggttccgccatttgccaccttcaacagagttaaacctgactattgatgctcaaattaaaggaattaacgaacgtaaattagtagagccatttagccaaaaatttactacagaagagatttttccatcggttggctttaccagtaaaggctcattattaccgttagaagcaacggaaggtttgccaattagcgcattaaatgtcgaacaagtcgatgttaactttttccgagttaaagatgatcggttgacacaatttttaactcaatgggaaagccgctctaatattaactattgggaatcagacgattttctgtcacaagcggatttggtgtatagcgggcgctttgaacttgatacagaaaaaaacacccgtgaaaatgtcttattgccactcaaatctattgaagccctgaaaaaagagggtgtctatatcgccgtaatgcagcaggcaggtaaatactcctataccatgccggcaacggtatttacttttagtgatatcggtttatcagtacatagctaccttaatacgctagatatttttactcaatccctgaaaaatggcgcagcattagacaatattgaaattcgtcttttagatgaaaaaggtaatttaatatctaaaacaaaaactgataatcaagggcatgccacattagaaaagagtgataaagcacgtttattactcgctattcgtaatgggcaaaccagtatgattgatttgcgtaaaccggcccttgatttatccgaatttgatatcggcgggccacaaggttatagcaaacaattttttgtttttggtccacgcgatctgtaccgccccggcgaaaccttaatcgttaatggtttattgcgagatggtgatggaaacccgattaaagagcaacctgttaaagttgacttattaaaaacggatggtcaggtttcccgtagttttgtttggcaacctgaaaatggtttttatcagttgaaactgatgatccctgaaaatgagagtacaggtattcggaaattacgttttgatttaggcgatggcactccacgcttctaccaattccaagttgaagattttatgcctgagcgtatggcattagagatcaccggtaaaaaaggcattttactcagtggtaataatgcttattttgatattaaaggtcgttatctttatggtgcaccggcagcagataatcgcttgcaagggcaggttttcttaaaagcttcgcgagaagcagtcagtcaactgccgggttatgaatttggtgccgtaaaagatgaaaatttaagtcgtttattagatgaatttgaacttactcttgatacggatggtgaaggggcattaacggttgataaagaccgttatgctgaagtgaaatcaccgattaatattatcttacaagcaagcttacttgaagccggagggcgtcctgttactcgccgttatcaacaagcggtatggccagcgacacatcttgcgggaattcgccctgtttttgctaaaaaagaggtgtatgactaccgtaatgataaatataaatcaggctatagtgttgatgaaaactcaatggcggagtttgaaatcgtttataccgatcaagagggtaaaaaattacctgctgatgacctaaaagtaagatttatttacgaacgttatgattattattggcgttggtctaattcaaatggttgggagtctggctacaatcaaaaagatctgcaaatggatgagcagactatcaaaatagctaaagatggtagcgcaaaagtggctttccctgttgaatggggctcttatcgtatagaagtggtcgatcctaaaacagaacttgtcagtagcttacgtttttgggcgggctattcttggatggataatactggcggaaccggggcagtaagacctgatcaagttaaattaaaattagataaagagagttacttaccgggtgaaaaagtcaaactcaatattgcagcccctcatcctggtaaaggttatgtgctattagaatcgagtgatgggccactatggtggcaagagattgatgtacctgaaaaagggcttgatgttgaagtacctattaataaagagtgggcaagacacgatttatatttgacttcggtggtggtaagaccgggggatacatccaaacaagcgacggtaaaacgtgcagtaggtattttgcatttaccactacaagataacaatcgccgtatagatattgcactggatgcacctgaaaaaattcgtccaaatcaagatctaaaaattcggattaaagctaagcccgtagcaggccagccattgccggaaaacatcaatgtattagtgtctgcagttgatacaggtgtcttaaatattaccgactataaaacgcctgatccgtacgaagctttctttggtcgtaagcgttatagcgttgatcaatacgatgtttatggtcagttaattgaaggagaagggcgtttagccaacctacgttttggtggtgatggaagcgaagaaagcgcattatctcgtggtggtaaaaaaccattaacagatgtgcaaatcattgctcaacaagcaacacctgtaaaattaaatgcacaaggtgaaggtgaggtttctttacctatacctgagtttaatggtgaagtccgccttatggctcaagcatggactgccgataaatttggtagccaagaaggtaaagttgttgttgccgcgccattagttactcaactctcattaccacgctttatggctgggggagatgatgcgttactgtcattagatttaactaacttaacggatgcaccacaatctattacgttaaattatacggcatcaggattagttgatttagcgggtgtcgacagtaaaaccgtttcattatcgaaaggtgaacgaactcaagttcaaatccctattacggcaaaacatggatttggccaaggagaattttccctgtctatttatggtattaaagtacctaatgaagagataaaaccttatcaaaatacttggaaaataggtgtacgccctgcgtatcctgctgagacaatacattacgccaatacattagcagatggtgagtcttggcgcctaccaaacgaagcattaaatcaatttaatcgctcaacgcttgagggggaattattacttaccagtcgccctccgttacaggtagcgcgttatgttagagagttatttgcatatccttatggatgtcttgagcaaactgttagtggattatatccatccttgtattcaacagagaaagagttgaagcaattggggatcaaaacacaaacagatatgcaaagaaaagaagccatagaaaaagggattgctcatatcttaacaatgcaaaaatccgaaggaggatttgccttgtgggctcaaggtgggcgtgaagagttttggttaacggcgtatgcaacagatttcttatttagagcgtctcaacaaggttatgaagttcctactgaggcattaaaacgggcaaatgatcgtctactacgttatttacaagataaaaacattgttaatgaagagtatgtggttaaccaagatgcggctcgattctcagcaagagcatatgcagctttagttctggctaatcagcaaaaagcccctttgggagaattgcgccgtttatatctagaacgtaatcaagcgggtagtggtttagcgcttgttcagttaggtgttgctttgaaattgatgggggataactctcgtgctgaaagcctgattgctgaaggggtcaccatgccacgtaaatataattacggtttaggtgattacggcagtactattcgtgaccaagcgttgattattgcgctactcagtgaaaacaatttggaaactcaaactcgtgatgccagtgttattacattatctgataacttaacagggcgtgaatggttctctacacaagagagtaactcactataccttgctgggcgtttctttattgatatggcagagaagccttgggaagtaaccattaatcgtcaagtgccagcaatgagtagtgatcgcgcagttaatgaagcattgacagcaacacaattgcaagaaggtttagagctaaacaaccaaggtggtacaaccatttactctcgaatgaatgttgtcggatatccaaaagttgccccagcgccttatagcaatgtattgaagatcaatcgtagttattacgatctaaaaggcaatcgagtcgatcctaatcgcttacaaagtggtgaaatgctggtggtaaaattagaggtttcagctaatagagatgtacctgatgccttagtggttgatctattaccagcggggcttgaaattgaaaatcaaaacttagcatcaagtagcgcaagcttaagcgatagcgctgctgatttgcaggagtttattgatgatatgggacaagccaatattaaacatcttgaatatcgtgatgatcgttttgttgccgcaatagcggttgataaatatcgtcctacgacattactttacttagcaagagcggtaactccggggagttatcaagtaccgcctccgcaagttgagtcaatgtatgtgccttattggcgtgccgtaggggcaacaaaaaataaaatcgatgttgtgccttaa

SEQ ID NO: 301547 - DNA, 573 bp, Proteus mirabilis
  misc_feature (546)..(555): n is a, c, g, or t
atgcttgaggttattaggaaagatttattcgatattagaagtaaattagacaatggctactatcaaatatttaaagatagactggtagatcctacattctatttagataatattcttgttcaacaagaaggaaatattttatcgtcgacactctgtaacggtgcaaaatatataatagcagatagtgaactttataatagtattgaaaatggtgatattatatctgtttcaaatagtagaattagagttattttatctcgcaaggcaaatcataatacgttacttgttactgagcgttgtaataatttatgtcaattttgttctcagccccctaaaaatagagatgattcttggcttttagatgatgctctacttgcgattgctgcttttaatttcgatggtgttattggaattagtggtggagagcctttactttatggcaataaatttattgattttattagaaaaataaaaagattggcaccgaggacagttttacatgtattaacgaatgggcgaaggttttctgatatttattttacaaannnnnnnnnntctttattcatctcataa

SEQ ID NO: 301548 - DNA, 1269 bp, Proteus mirabilis
atgccagtcacgcaacaaaattttggtcctatctatcagtggagcatactgatactgctaggtttagtgtactttctcgctaccgcaacaacatttacctctttaggtgtggttctacctagtatgatagctgaactagagtggaactggacacaagctggccttggttttactttattgggcttaacctgtggacttgcgagctttttacccactttacttatccgtaaattaaacgtccgcttcacactcctcattggactgattatttttgtcagtggattctattttctatatgaaaccaataccatcacacgctactttcttggtaccgccttacttggggtaggttttacgctattagcaaccgtaccgggcacttacgtgctatcgcgtctatttgaaaaacagtcttttgcttttggtgtctattttactattggtggattgggaggagttgcaggcccttggatctattttttagccacacacctttggcacacatggcgtatgcattggcttatttcagctattattctatcaattattaccctgctgactattttagtattacgagaaggctcagcagaaaaagcgcatgcgaaaaaaatcagtcaattacaaagtagcaaacgtatttatcaaaccaaagcgatatggaccgcacgtcatgctttacgaacatggcaattttatgtcattgctgccacttacaccgcttttctatggtgcgggatcacagtaaatagttttgcagttgcacatattattgaaaatggttttagtgaaactattgctgcaacgctactgagcaccatggcttttatcaatgcattctcacgattagccggtggagcgattggggaatggttagagcctaaaaaattactgattgccagcttaacgattattattatcggtctattagcactgagtatggctaatagttggatctacctaatgctatttaccctttgtgtggggatcggttatggtatgaccttcttagcctcaagtgtattactggctaactattttggtcgcgcaccttatttagaactattttcggtgatgaacctgatctcaacattggcctgtttagcccccttctttgctggggctattaaggatatttcaggcagcttcacacctgcatttttaattctcactatccctgttttagttattttggtgatcacactatttatgcgcccaccaatttatcctaacttccaacatgccagtgaaaaacataatgcaccaagataa

SEQ ID NO: 301549 - DNA, 1683 bp, Proteus mirabilis; identical to SEQ ID NO: 121645

SEQ ID NO: 301550 - DNA, 1380 bp, Proteus mirabilis
atgtttacacccgaattgctctctcctgcaggctcattaaaaaatatgcgctatgcattcgcttatggcgcagacgcggtctatgcaggtcagcctcgctatagtttacgcgtacgtaataatgagtttaaccacgaaaaccttgctaaaggaatacaagaagcgcatgaattaggtaaacgcttctatgttgtggttaacatcgccccccataatgcaaaattaaaaacctttatccgtgacttaaaaccagttattgatatggggcctgatgcgctgattatgtctgatccgggtttgatcatgatggtgcgtgaagctttccctgatatggatatccacctttcagtacaagctaacgccgttaactgggctaccgtaaaattctggcgtcaaatgggcttaactcgcgttattctttctcgtgagctatctattgacgaaattgcagaaattcgtaaacaagtccctgatatggagcttgaagtcttcgttcacggggccttgtgtatggcttattcgggtcgttgcttattatcaggctatatcaataaacgtgatccaaaccaaggtacatgcacaaatgcctgccgttgggaatacaaagttgaagaaggcaaagaagatgaagtggggaatattgtcgagaagtaccaacctatcccggtaaaaaatgttgagccaacgttaggtgtaggtgcccccactgataaagtgttcttaattgaagaagctaaacgtccgggtgaatatatgactgcgttcgaagacgaacacggtacttatattatgaactcaaaagatctgcgcgctatcgaacacgttgagcagttaactaagatgggtgtacattcactgaaaattgaaggtcgtactaaatctttctattattgcgcacgcacagcacagatgtatcgccgtgctattgatgatgctgttgcaggtaagcctttcgatccaacactgctgacaacgctagaaggtttggcacaccgcggttataccgaaggttttttacgtcgtcatacccatgatgcctaccaaacctatgaatacggctattctgtatcagatacacaacaatttgtaggggaatttacaggtaaacgtgttaacggtttagctgaagtggatgttaaaaataaatttatcttaggtgatagcttagagctaatgacaccaacaggaaatattcaattcactttagatgcgttatttaataaaaaacaacagccgacagatgttgctccgggtaatggccatgtggtttatttacctgttcctgacgatgttgatttaaactttgcactgcttattcgtaatctgccaggaacgacaacccgtcaacctcataaaattgatgcggtagaagtgaagtaa

SEQ ID NO: 301551 - DNA, 570 bp, Proteus mirabilis; identical to SEQ ID NO: 299159

SEQ ID NO: 301552 - DNA, 339 bp, Proteus mirabilis; identical to SEQ ID NO: 296949

SEQ ID NO: 301553 - DNA, 1110 bp, Proteus mirabilis
atgtttcatcgtcttctcaccctgataatgaaagagctacagtcattattacaagagccgcaaacacggattatcttaatattaccggttatctttcagatgatcttattcccttttgcggccacccttgatgttaccaatgcctctgttgctatttttgatgaagacaatggtaaacaatctattgaattaacccaacgcatagccaaagccagtgctttttctgaaaccctattattaaaaagtgaacatgaaattaaagagacgattaataatcgtaaagccttgctattagtgcgttttccacaaaattttagtgctaatttagccagtcatactccggtaaaattacaattaattcttgatgggcgtaattctaatagtgcacaaattgcggcaaattatgtacaacaaattgtgcaaaattatcaaacagaattagccggcgataccccatctttactgaataaaagcgaattagtagtacgtaattggtataaccccaatttaaactataaatggtttattgtgccttctttagtggccttaattatcaccatcggggtaatgatagtaacatcactgtctgttgctagagagcgagagcaagggacactagatcagctattagtttcaccgttatcaacttggcaaatctttgtaggaaaagcggttcctgcgatggttgttgcggcagtacagggaaccattgtattaattatcggtattttcggctatcaaatacctttttcaggctcactgctattattttactttaccatgcttatttacggtttatcgctggtaggttttgggcttttgatttccgcgttaagttcaacacaacaacaagcatttattggtgtgttcgtatttatgatgcccgcagtattattatcaggctatatttctccagtggaaaatatgccagtttggttacagcaagccacatggataaacccaatccgtcatttcactgatattaccaaacaaatctacctcaaaaatgccgatattaccgtaatatggcatagtttatgggcactgattgttattgctattgggacaggatctattgcctattatcttttccgcaggaagatagtataa

SEQ ID NO: 301554 - DNA, 438 bp, Proteus mirabilis; identical to SEQ ID NO: 14572

SEQ ID NO: 301555 - DNA, 1392 bp, Proteus mirabilis
atgaataaaaaaacgccaagttatagttcactcgatgatgtttatgcatcggttgatttatcacaatccttaccgaaaacacattttccgcaacaagagagccatcctcgtcatgtttttgatgctgtaagggatgagctgatgctagatggcaattcaagacaaaatctggccacattttgtcaaacctgggtagatgatgagatccgtgatttgatgaatttatctatcgataagaacatgatagataaagatgaatatccacaaacggcagaaattgaaaaccgttgtgttcatatgcttgctgatttatggcactcacccgatccactcaataccctaggttgttcaaccattggctcctctgaagcggcaatgctggggggacttgcattaaaatggcaatggcgtaaaaaacgccttgctgctggaaaagcaacagataaaccaaatcttatttgtgggccagttcaagtctgttggcataaatttgcccgttattttgacgttgaactcagagagatcccgcttgaaggtgatcgcttgatgatgagtcctgaagaggtcattaaacgtgttgatgaaaatactatcggtgtagtgccaacattaggggtgaccttcacctgtacttatgagccagtaaaagcggtacatgatgcactcgatcaactacaaaaagagaccggacttgatattcctattcatgtcgatggtgcgagtggtggctttttagcgcctttctgtgcacctgatttagaatgggatttccgtttaccgcgtgttaaatccattaactcatcaggccataagtttggtttagcgccattgggctctggttgggtagtatggcgtgaagccaaagacttaccggaagagcttatttttaatgtgaactaccttggcggtaatatgccaacctttgcgcttaatttctcacgtcccggtgggcaaattattgctcaatactataatttcttgcgtcttggcagagaagggtatgcgaagatccacaatgcctgttatcacaccgcgcaataccttgctcgagaaattgaaaagctagggccttttgaaatgatcttcagtggtgatagtcaaaaaggaatacctgcattagcgtggaaactgaaaaaagaggctaaggtaagctactccttatatgacatcgctgataaattgcgtagccgtggctggcaagtacccgcttattctatgcctgctgatcgccaagatttagttattcaacgtattcttgttcgtcatggtgtgagtttagatttggcgacattactgatagaagatatgaaacgtactctcgattatttcgaaaaacatcctgtcagcacacctttatctgaagaggacggcggtggctttaaccacagctaa

SEQ ID NO: 301556 - DNA, 1554 bp, Proteus mirabilis
atggcgacatctgcaacaagttctgcctcaaaacagctcacattattaggtttttttgctataactgcatccatggtgatggcggtctatgagtatccaacttttgcaacttccggctttagtctagtctttttcttattactaggcggtttgttgtggtttattcctgttgcattatgtgcagctgaaatggcaaccgttgaaggatggcaagaagggggcgtatttgcttgggtatctaatacgctaggggagcgctggggatttgcggcgatctcttttggttatttacaaatagcgattggttttattccaatgctttatttcgtattaggagcattatcttatattcttgattggcctgagttaaataccgatccgctcaccaaaacgattgccgcattagtgattttatggggattagctttaactcaatttggcggaactaaatacacggctactattgctaaattaggtttcttcgcggggatattattaccagcaatcattttagtgcttttagctattagttatctggtcagtggtgcgcctttagcaatagaaatcagcagcaaaacctttttccctgattttactcagattggtactttagtggtttttgtggcctttattttaagctatatgggcgttgaagcctcagccactcacgtcaacgaaatgaaaaatccgggccgtgattatccacttgccatgtttttattaatgattgtggcaatatgcttaagctctattggcggtttatctgttgcggcagtgatccctcataacgaaatcaacttatctgcgggggtggttgaaacctttagtgttttagtcagccattttagtagcggattagcttgggcggttaaaattattgctgcactattattgcttggcgtcttggctgaaattgcgtcgtggatcgttgggccttcacggggaatgtttgtggctgcacaacaaggtattcttccgccaacactggctaaagtaaataaaaatggtgtaccggtagctttagtgatcactcagctaattattactactattgccatagtggtgctgactaacactggtggtgggggcaatatgtcatttcttattgctttagcgctgacggtggtgatttatctatgtagctactttatgctgtttattggctatatgcatttggtttgcaagcaagctgataaaaaacgtgcatttaatattcccggtggtaaaggtgttaaattattagtggccgttgtcggtctgattgtgtctattttagcttttgttgtttcattcttcccgcctagctctttaccgggtggcagtagtgatacaacgtatgtttcattgctagtggtgagttttattattatttttgctttaccttttattatttatgcgtgctctcgcaaaggcaataaagccaatgtatcgatgatccacattaagagtcataatgcaccgaaaggacacttttttatccatcctcgtgctcgttcaacgcattatttagtgccaatagataaaacagatcatgatagtcagcaacagaaataa

SEQ ID NO: 301557 - DNA, 657 bp, Proteus mirabilis; identical to SEQ ID NO: 295708

SEQ ID NO: 301558 - DNA, 1155 bp, Proteus mirabilis
atgagtacatcttgtgtagaagaaggccgaaagacctccaatgatccttatcaacggatcgcatcagagctgctcgctcaagcagacattcatatcaatggttctgaaccttatgatatccaagtgcataataaagatttttataaaagagtattacaacaaggctcattaggtctcggtgaaagctatatggatggttggtgggactgcgaacgtcttgatatattctttcataaagttttacgagcaggtcttgaaaataaattgccaagtaactggcgcgatattttaaaaatagccatggcacgcatttttaatttacaaacacaaaaaagagcgtggatggtgggtaaagagcattacgatttaggtaacgacctctttaccgcaatgttagatccttatatgcaatattcctgtggatattggaaggatgcggatagcttagaagttgctcaacagcacaaactcgaccttatttgccgtaagttagagctaaaaccaggtatgacattgcttgatattggctgtggctggggtggtcttgctgcttatgctgccaaaaactatggcgtttctgttacaggggtgaccatctcagttgaacaacagaaattagcacaagagcgctgtaaaggtcttgatgtcaatatcatcttagaagattaccgtgacttaaacgagcagttcgaccgtatcgtttctgttggtatgttcgagcatgttggcccgaaaaactatgccacttactttgatgtcgctcgtcgtaatatcaaagaagatggattatttttattacataccattggttctaatcacaataaagttaatgtcgatagttggataagtaaatatattttccctaacggttgtttgccgtctattcaaaaaaccgctgaggcaatggaaaataaatttgttatggaagattggcataattttggtgccgattatgacaaaaccttaatggcatggtatgagcgttttttagctagctggcctgaaattgaatctaactatacacctcgttttaaacgcatgtttagctactacttgaatgcttgtgcgggtgctttccgcgccagagacattcaattatggcaaattatgttaagcccgaaaggtagaataggtggattacgcacacctcgctga

SEQ ID NO: 301559 - DNA, 1929 bp, Proteus mirabilis
atgtctacacgttatctgtattggcgagcaacccacacacttaattttaatacctctattgaagggatattgggtacaggattatttttggctgagatctactcttggattattttagttttaggttatttccaaacagcttggccattaaatagaaaaatagcgccattaccaaaagatatctcgttatggccaacagtggatatttatgtacccacatataacgaaagtttagatgtggtacgtgatacggttttagctgcacaaggtattgattatccaaaagataaaatgaaagtttatcttttggatgatggtagccgtgaagagtttaagcaattcgccaatgatgttggtgtgacttatattgagcgtgaagagcacgatcacgctaaggcaggtaatctaaatcacgcaatggcattaactgatggtgagcttatttgcgtctttgattgtgaccatatctctacccgtatatttttacaggcaacggtgggttatttccttgaagatccaaaattagctttggtgcaaacaccacactatttctattcacccgatccttttgaacgtaatttaagtgccgccaaaaacggccctcacgaaggtgcacttttttatggccctgttcaacgaggtaatgataattggaatgcaaccttcttctgtggttcatgtgcggtaatgcgtcgtagcgccctagaagaaattggtggtattgcggttgagacagtcacagaagatgcccatacggcattaaaattacaacgtttaggttggaattcggcatttattgatattcctttagctgcaggtctagcaacagagcgtttagcattacatgttaatcaacgtattcgttgggctagaggaatgacacaaatctttcgtgttgataaccctatgttaggccgtggcttaacatttcctcagcggttatgttatctcaatgcgatgatgcattttcagtatgggttgcctcggattatctttttaaccgcacctttactgtttatgttattcaacctcaatattatcgcctcttctgccagtatgatttttgcctttgcattaccacatttaattatgtcggtgtatgtaaactcacgaaatattggtaaatatcgctattctttctggggagaaatctatgaaacagtgatggcatttagtttagtactgcctacattgctcagtttagtctcgcctaaattaggtaaatttaatgtcactgataaaggcgatttgcttgataaaagctatatggattatctaacggtacgccctttgattattactgcgctacttctagttatgggtatttcatgggtcatcattcgttatttattaaatgattttcaaggcatcgaccctttagtcattgtattgaatttggtttgggcaacttatagtttatttattgtgttggcatcgatcgcagtaggtaaagaaacacgccaaattcgtaaaaatacccgcattaaggcatcacttcctatcactttacattttgatgatggcgctgaattacaaactaccaccgaagatatttctatggggggagtgcgtattgcgattaataaaatagctgaattacgccagcgtactgttaatagcattacgttaatggtgcaacgtgatgttgttacgcttcctgtggaaatggtcagtttagaaaatagccagttacgtctcgcttttttaccaatggatttaaatctacgccgtaagttagtacgggtgatctttggtcgagcagatgcttgggttcatcaaacacaatatcaagacaaaccattaaaagagttaggtgctatcactggctgtatttttgagttgttctttggtcgtcgtcaaaaagtaaaagcaccggtaaaaagagcaaaaacctctctctctgtgcaatctattaatggggatgactag

SEQ ID NO: 301560 - DNA, 471 bp, Proteus mirabilis
atgtctctcaaacagaaaatagcggcggtaacaacagcaggagccacagccatcgcgttagtagtaatagcccattttgaaggtgtgcgttatgagccttatcgtgatgtggcgggtgttctaacagtttgttatggccacactggaaacgacatcattcaaggtaagacatacacacaacaagagtgtgacgagttactacagaaagactttatcagaacgcaacagcaagttgatgtcctggttaaagtgccggtcgatgataaaacaaaagcttctctatattcctttgcctttaatgtcggtaccacagcttttgcacgttctacattgcttaaaaaattaaatgcaggtgatcagaatggcgcttgtgaagaaatgaaacgctgggtttatgcgggtggaaaggtgtggcgagggttagtcagtcgtagagatgcggagtcagcgctatgtcatggaaatctttaa

SEQ ID NO: 301561 - DNA, 270 bp, Proteus mirabilis
atgcgcatggaaaaattaaccaatgtaacttatggaacagcaggcctaacggccttttttgccagtctctctttatatgaatggggatttgttatcgggatggcgtttagtatggttctgggattagctacttattttatgactcgtcgagagcaacgaaaacgcactcaattatttgaagagcttgttcgacatgttgacccacaaaacccaactgaaaccctaaaaaggcttgctgaattaatggtgaaagcgccaaaggatatttaa

SEQ ID NO: 301562 - DNA, 258 bp, Proteus mirabilis
atggacgacaaaactgctgaaattttagctctacaacaaattgttgcgttactactacatctgcttcctgaagaaaaaaggcagatcgcaaacaccactattgagtgtataaaaaaccaaaacttcaaagccctaatgcttgagaacaatccaaacttaacaggtgaacaattgagagagggagcggataagctttcaaaagcctattcatctatcttgaagtctgctttgttttttgataaaaatcttgatttttaa

SEQ ID NO: 301563 - DNA, 267 bp, Proteus mirabilis
gtgaccttttttcgtataaaagaggtaagtatggacattcagcaagaaacaaaaatttgtacactatcggcacgagtagaacgacaaggacaacaaattgcagagttacaaaaacagctcgctgatatgcaaaaggcaacgagctgtgagttagatagcgccattcaaaatgtcttattacaaggtgtagaaaatggtgcaaaaaaagcaaaggaacttattaaaaatcaagatttttatcaaaaaacaaagcagacttcaagatag

SEQ ID NO: 301564 - DNA, 336 bp, Proteus mirabilis
atgaagctattattaaaaagtattgcttttactgttagtcttttatctgcgagttttgttatggcggataatggcgatgagataacgaaagtatcttatgcatgtgaaaacaatcaaataatggaagtcatttatataaatacagcaaaagatagctatgcaatcattaatcaaatggatgaaatgataccaatgaagattatgaaaatggcttctggtgcaaactatgaggcaatgaataaaaattacacctataaactttatactaaaggtgacaatgccgatttagttgaaggaaaagataaatcagtattgagtggttgcaaagctggctaa

SEQ ID NO: 301565 - DNA, 423 bp, Proteus mirabilis
atgtcaaaagagataaacgaattacagtttagtcttcactatgcctcagaaacagacagcgaaatgaatatctcaaccattttaacggccaatattcatacggctgatggtgaaactcaacaactgacacaattaatttgcacaacgtctcccgcaggtaaaaagcaatatcgaattggcttgcaaaaaattagtgatgcaggagagccatcgctagtggcgattgaatcttattggcgtaaaaacacacaagagagttgtgtttatttgttagagaaagcgaagcaatttattcaaggacacttacaacaaacgaatacatggatatctatgtatggtcttgtgatcgtttctaatgcgtcactggaagaacagttgcctaaggctttatttacaataatgaatgaactaaaaataaattga

SEQ ID NO: 301566 - DNA, 1023 bp, Proteus mirabilis; identical to SEQ ID NO: 300240

SEQ ID NO: 301567 - DNA, 384 bp, Proteus mirabilis; identical to SEQ ID NO: 300206

SEQ ID NO: 301568 - DNA, 639 bp, Proteus mirabilis; identical to SEQ ID NO: 300208

SEQ ID NO: 301569 - DNA, 363 bp, Proteus mirabilis
atgcgtcaaatcgatgggcgtacccatgagcaaatttgtgccttgttcgattgggccaacaaagattcattctggtaccaaaacattttaagtcctcgtaagttacgtaaacactttgatgaactattcgttcgtagtcaaaagccaaaggatgagctaaaggttcaagttgacaccgttgaacgtgatagtgccttttcccgcttgattggctctcggtctaaacctaaaaaccgcattgaagaaattgcgcttgaactagcgggtaagacaggcattcgccgtatgagtgagttttctggtcgccaagcatggaacagtatttggaagcaagcgacagaaatgtctctggaggctcagtaa

SEQ ID NO: 301570 - DNA, 894 bp, Proteus mirabilis; identical to SEQ ID NO: 297051

SEQ ID NO: 301571 - DNA, 1212 bp, Proteus mirabilis; identical to SEQ ID NO: 297054

SEQ ID NO: 301572 - DNA, 933 bp, Proteus mirabilis
gtgcgagtcctattagcgccaatggagggggtgttagacccccttgtgagagatctactgacggcgattaatcattacgatctctgtatcacggaatttattcgcgttgttgattcattattaccgccaaaagcattttatcgtttatgtcctgaattacacactcaaagccgcacgcaaagtggcaccttggtgcgggtacaattattagggcaaaatccacaatggttggcagaaaacgcttttcgagccgtctctttaggttcatggggggttgatcttaattgtggttgtccttctaaaaccgtcaatggtaatggcggtggtgcttcgttattaaaacaaccagaaacgatttatcaagcaactaaagcgatgcgtagtgctgtacctgcggatttacctgtttctgtaaaggtacgattagggtgggattgttcatcttattgccatgaaattgccgatgcggtagaacaaggtggcgcgacagaaattactatccacggtagaacaaaagaagatggttatcgtgctgataagataaactggcaagcgattggtgaaattcgccaaaaattgactattcccgttatcgctaacggtgagatttggtgtcgagaagatgctatctcttgtttaaagataaccggctgtgatgcgattatgataggtcgcggggcgatgcatacgcccaatttaagtaatgtgataaaaggtattgaagaaaaaatgtcttggtcacaagtgatccaattacttaaacgctatattcgtctagaaaagcaaggggataccacttattaccatgcttcccgtataaaacagtggttgggatatttaagaaaagagtatcaagatgctgatgcactttttagtcaaattagaacgctaaaaacctcacctgaaatagccaaaataatagaagcgttataa

SEQ ID NO: 301573 - DNA, 3336 bp, Proteus mirabilis
gtgcgcctgataatcagtctactttttagcttttttctgactatctcattcaatacttcggtgtttgctgcggatgttgataaattacgtcaagatatcaaacaacttgaaggcagtactaatcctcaagatattgaaactgttcaggcgctacaaggcaccatcaattggataaatgatggtgaaaaagctcaagttaatgcggataattatcaaaagactattgatgaatatccgcagatcactcaagagttaagggctaaattactcgaagagagtcactcagttccaacaattccagaaaaaattactattcctgagcttgagcaaaaaatcattcaagtgagtagccaactgatggaacaagctcggctacaacaacaagagcaagataaaagccgtgaaatcagcgaatcactcaatttactccctcagcaactttcagaagctcgtcgtttactaagtgatgcaacggcacgtttagcggcaataggggcatcaaacaccccactagcagaagcacaaaataaattaacccaagctgaagtcacagcacgaaaagcgatggttaatgagctggaaatggcgcaactttctgctaataatcgtcaagaaattactcgactgcgcttggagctatttaaaaaacgttatcaacgacttgacgtacaactgcaacaattgcgtagtttactaaatatcaagcgccaagaagtggcagatctcgctttagaaaagacagaaatgctcgccgagcaagggggcgaactccccgagtttctgactaagcaaatcgagactaaccgtcaactttctcagatcctcaataaacagacgcaagaaatgagtgagttaaccgaaaaacagcgtctaacaacacaacaaacccaacaagtaagacagacactcacaaccattcgagagcaagcccaatggttaagtggctctacggcattaggtgaagcattaagaacacaattggctcgcttacctgaaatgccccgctctcaagagctggatagagatatcgttcagttacgtgttgagcgattaggctatgaagagatgctagaaaacctaggcaaaatccagcctcctgaaactaccgatggctcaaagctaccagaagctcagcaatatatttttgactccctcattcaagcgcgccaagagttactcaattctcttttatccggttatgactcccaaatcctagagttaaccaaactcaaagtagccacaacacaacttgcggatgccttaaaagagacaaaagatgccacaaaccgctatatgttctgggtggccgatatcagcccaataaaactcaattatccggttttattaattaaagatattactcgcctactctcattagatactttctcacaattagggcatgctgcggttaacatgctcaaaaaccaagatacctttatctatctactggtcaccctatctattgtcggttttagtcttcgtacccgtaagcattacaatgcgtttcttgaaagagtcagtaatcgcattggtaaagtcactcaagatcatttctcattaacggtgcgtaccgtattttggtcaatattaatcgccttaccactaccgctattatggtctgccgtaggatatggtttacaaagtgtcgaatggcgttatcccatggcgggagcgattggttatggtgtgactgccgcagcccctgtgctatggctatttatgataagtgctacctttgctcgccctaatggattatttatcgcgcaatttaaatggaaagagagtcgtgtgaaaaaagcgatgcgcttttatcaactgtcgattttcgtcattgtgccgttaatgatgtcgcttatcacctttgaatactatagtgacagagaatttgcgccaacggttgggcgtttttgctttttattattgtgcattgctttaagttttattacctcaagcctaaaaaaggcacatgtgccgctttacttagataaacatggctctggtgataatgtgataaataccattttatggtggttcttacttgttgcccctgttcttgcagccctcgccgctatcttaggctatctctcaacctccatcgtattactgggtcgcttagagatgtctgtggcgatttggtttgccttgctgattatttatcatattattcaacgatggatgctgatccaacgtcgtaagcttgcctttgaacgagccaaacaaaaacgggcagaaattttagctcaacgagctaaaggggaagatgagaataccattgttggcagcagtggtgagagtaccgctaacttagagttggaagatcaagccattgaccttgatgcgattagtgcacaatctattggtctagttcgttctattctgaccatgattgcacttgtgtccatgattttactctggtcagagctcaatacagccttctcttttgtcgataatatccgactatgggatgtgacttcctccgttaatggcgtcaatactatccagcccattaccatggggtctatcttagtcgctatattagtgattattatcacggcacaattggtaagaaatctgccagcactgcttgaactggcaattttacaacacttagatctaacacctggtacaggttatgccattaccactttaacgaaatacagcatcaccctaataggcagtattgttggtttctcattattaggtattgagtggtcaaaactacaatggttaattgccgctatgggggtaggtcttggttttggcttacaagaaatttttgccaacattatctcagggttaatgatcttgtttgaaaagccaatccgtattggtgataccgttactatccgtaacttgactgggaatatttctaaaatcaatacgcgagccaccacgctcaccgattgggatagaaaagagatcattgtgcctaataaagcatttattacagagcaatttattaactggtcattatcagactctattacacgtatcgtaatgaccatccctgcgccagctgattgcaatagtgaacaagtgactaatgtattattagaagcctctaaacgctctaccatgattttagacaaccccgctcctgaggtttacttggttgacctacaacaagggatccaaatcttcgagttacgtgtttatgccgcagaaatgggacatagaatgccagccagacatgagatccatcaaaatattctgctagcctttgcagagcatggcattccattaccattcccgccgttccaagcacgggtagatatggtgggtaataccattagtacttcaatgcgtgcaacaccaagagaagtaggcggattgtag

SEQ ID NO: 301574 - DNA, 2286 bp, Proteus mirabilis
gtggcagcaaccagtgccgtgaggaaggcatgggcggataaagaggcggcattatcggcattgaattctgcaaaaatgagttatcaagtggcgaaaggaaccgcggcagaaggttatgccttagagaaagtgattgcgacaaaatcgttagcgacggaagcctctttaagatacaaacaagcactgatagcagaaacggcgacacagcgggcattaacgacggcacgccgtcaagccacggtcgcaggaagagcgttgagtgggacattggcattagttggtggccctgttggactggcgttaacggcaataacggctgttggaatgggcgtctatgaatatagcgaacatatcaaacaagctaaaagagaatcgatcgaatttgccaatgctctagatacatcaacagaagctttaaaagcaatgaataatcaagcattgctgacgaatataagcaaattgtctgaaggtattgatgctcagattgaaaaattcgaaggatctctagaaaaagctaaaaaattggcagcagactcgaagtctggttggagcttaaatgcctcgagttacttgagctttacgggtgaccatgaaggttataaagcgataatcgcacaacagcaaagagaagcgaaaatcgggcttgatgcggcgatgggggaggtggcttcacagttgacagcattagagcgtcaacgagccaatatgcgacaactgctggcattggttgaagaaaaacacggtaagcaaagtgatgaatatcagcgttatgcatcgaaagtaaaggagactgagagtgtcattaatcaatttagggtgaccttaaaaaacttgggttatgattttgatgcattaatgaataagaccgatgaggcggcaaagagccaagccaatatgactgaagtgatagcgaaaaaaatagaagattctatcgctgaatctcagcgcactatcatgaaagccaaagcttctccatctgagttggctaagttgaatgcggaagatgtgctgaaaagacggggaattaaacctgaagaaaaaggctatgaagaggctttgaccgaagaaattaaagcgcaaaacgcgttactggctcaaagacataagccaagaaaagccaccattgattatgccaaacagtacaccaaaatcttgacggaattagagaaaaaacaagcctcattgattgcagatggacaaagtattcagctgtatggcactacctcttcctttaatgaatacacatccgccttagctgatatcaaacagaataaagataagtttgatgccatcttaaaaatcgatcccaaagcgattgagacgataaaagaaaaagcgaaagccattgatgatctagcgcgtgccaactcggttgcgcaatttgcttatgatcgcggtaaagaaattgagcagatgcaatttgaaacttccttgataggaaaatcacgcgcagagcaagaaaagcttaatgcccttcgtcagattgatgtgctgtatcagcaagccagtgtggatttaggcgaaaaagagctggcgaacttacaacgcaatgtcgagctcactaaacagcaaattgaggaagagctgaggaaacgagaggccatgaaaggtgatccgatggcgggattaaaacaaggcttatcggatttcagtgagtcggccatggatgtaatggaaaacgtcagaaacgtcactaccaatgcccttaataatatgtctgatgcattagccgattttgctttaacgggcaaaggaagctttaaagattttgccaatgctgtgatctccgatatcactcgaatggtgatgaaaatgctggttttcaaagccattgaagcaggcggacaagcaatgggctttgatatgggatggatgagcaaagggcatgcttacggtggctatacggggcatggaggtaaatttgaacctaaagggattgtgcatggtggtgaatttgtttttaccaaagaagcgacggctaaattgggtgtcggcaatctctatcgcttaatgcatgcggcgcaaggttatgcttcggggggctttgtgggggcgatcgctgggcgaatacccgttacaccgcaaccgacgttagcccgtgcgggtggtgtgcaaatgacggtcgttaatcatattacggtgacaggaaatggtgacgccgtacttgcgcaggcaatgaaggaagccgcacaacaagggacagaagccggtgcacagaaagctcaggcgatgatgttacaagactttcaaagtaatggtgcagctcgcagaacattaggagtttaa

SEQ ID NO: 301575 - DNA, 705 bp, Proteus mirabilis; identical to SEQ ID NO: 61560

SEQ ID NO: 301576 - DNA, 636 bp, Proteus mirabilis; identical to SEQ ID NO: 294891

SEQ ID NO: 301577 - DNA, 924 bp, Proteus mirabilis; identical to SEQ ID NO: 296919

SEQ ID NO: 301578 - DNA, 1392 bp, Proteus mirabilis
atgaattttccgttaattattaacgtactcgtctttgttgtgctattactcatcttggctaaattaagccaacgtcagtggagcctgtcaaagaaagttcttgtcggtttggtctttggggtggtgtttgggctggcgttacatgcattctatgacgcacacgatcctattattaaagaatctatcctttggtttaacatcgttggtaacggttacgtgcaactgttacaaatgattattatgccattggtatttgcttctattttaagtgcagtatcacgtttacaccaagcatcatcattgggaaaaattagtgcactaaccattggtacacttctatttacaacggcaattgctgctcttatcggtattgttatagccaatatctttggtttaacagctgaaggtcttgttcaaggggaacaggaagcgcagcgtttagccgctattcaacataattatataggtaaagtgtctgacttaactgtacctcaattaattttatcttttattcctaaaaatccatttgccgatttaactggtgcaagctcaacctcgattattagtgtagttatctttgcggtattcctaggaatggctgcaataaaactgcttaaagaagataaacctcgcggtgaaaaagtattagcagcgattgatagcttacaagcgtggatcatgaagttagtccgtatcgttatggcattaacaccttacggtgtaatggcactgatgactaaagttgtggcaagctccaatctgcatgacattattcaactcggtagcttcgttgttgcctcttatgttgcgctgggcttaatgtttgtcgttcatggtttattagttggatttactggcttaagcccaattaaattcttcaaaaaagcaggaccattattagcatttgcattcacaagtcgctcgagtgcggccagtattccattaaatatcgaaacacaaactcgtcgcattggtgttcctgaatcgattgccagtttctcatcgtcttttggtgcgacaattggtcagaatggttgtgccggtatttatcctgctatgttagccgttatggtggcaccaacagtcggtattaatcctttcgatcctctttggattgccactttggtgggtatcgtaaccattagctcagcaggtgttgcgggtgtcggtggtggtgcaacctttgcagccctgatcgttttaccagcaatgggattacccgttacactggttgccctactgatttctgtggagcctcttatcgatatgggtcgtactgcattaaatgtcagtggctctatgaccgcaggtactattactagccaaatgatgcgccaaacagataaagagatctttaatcaggaagaagaagctgaacttaatgttaaataa

SEQ ID NO: 301579 - DNA, 663 bp, Proteus mirabilis
atgaatcactcaataaaattaacgtcgtttaataaaaaccagaagttcattaatacaaggaatgagttcttcgggacatctaatgattggaatatatcgaccttcctcataaatttcattgcgtttaagggtatcaaaaaaacgctctacagcatggttatatttcttgccttgttttgtagtcaagtgagggcgcaaggctctgaaattatcttgagtgatatgaggtatgtttctttttccatctacacagtcgtcgcgaaatttatcaagaatcaggaacaagggatctgcaatagcattgaactccttcctcttgtctcttctgcgagcgagggagtgaccaagccaaattcccaagaaaaaggaaaaaatagcccaaaagagagtaataaggctgaggctggttttgagaaacgagaccaagtgacccaagaagatatcgaacatattaagtcatcctttatcggtatgttatttgcgtctttagtgatgatccctctagggatgatatttagtgaatgtatcagtccacgcattttagcaaagcgtaaacgttggatgaagcttcatgagttaaaagcaaagcggttttacagaaataaccctgataagcattacgtcatgccacgcaaaactttttgtcaatggctgtggttttaa

SEQ ID NO: 301580 - DNA, 216 bp, Proteus mirabilis
atgcaaacaccattaaggttattgcgaattaagcaaaatcttacgttgagtaaagttgccgaagcagttcaaattgatgtaggaaatcttagccgtattgaaagaggcgctcaaaaaacttcgttagaagttgctgagcgattagttgcttttttcaacggtgaattaacagagatgcagattttatatccgaagaaatttagcaatcacaaataa

SEQ ID NO: 301581 - DNA, 690 bp, Proteus mirabilis
atggaaataggaaaaaaaatcagatcaatccgtttaaaacggaacatgacaattgctgaactggctaacgctattgatagcgacccaggcaacgtgtctcgtcttgaaactggtaaacaaaaatcatttaccgagcaacaattaaagaaaattgctaacgcactatcaatatctttacttgatttattttcagatgaggataatcatactgtatataaacacagtaatttgaatcatgacgaaatgaacgaggatctttataaagtgcaactacttgatattagtgcgagtgcaggaccaggttgcgtgagaacaagtgatgtcatagatgtcattcattccattgaatatgatacagaacaagccaaattactattcggttctcggcccgcgaactcagtaaaagttattaacgttcgtggtgacagcatgtctggcacaatagagccaggcgatattatttttgttgatatatcaatagattatattgatggcgatggtatttatgtgttttcttttgatggaaatatacacgtaaaacgcctacaaatagttccagatgaaataattgttctctcagacaaccccaaatatacacaatggaaaatcaacagcacaaatgaacatagattttgtgtgcacgggaaagttttgattagccagagcctcgaatataggcgtcacgcttag

SEQ ID NO: 301582 - DNA, 204 bp, Proteus mirabilis; identical to SEQ ID NO: 300215

SEQ ID NO: 301583 - DNA, 375 bp, Proteus mirabilis
atgagccaagaagatcgtaagacaaatgtccctgactttctttctgaattagatgctggcgtttttgaaaataaagtctctgctgttttaaatgatgtggctttaggcgttttaaataatggtggaaaaggcaaagtcactattgaattagattttgctcgccttagtaattcaatggaagaaaaacgagttgaaataactcataagcttaaattctctgcaccaacacctagaggaaaacggactgaggaagataccaccaaaacacctatgtacgtgggtaaaggtggtaagttgaccattatgcaagaagaccaaggtcaattattttctttgcaaggtcagcccggcgggaaattaaaatccgttaattag

SEQ ID NO: 301584 - DNA, 1563 bp, Proteus mirabilis
atgacgatcgcctgtcaattttctcagcttaatattgaattcaatcaagaagcgcttttcccaccgctgactcattcactggcttgccaaagaaatgctttaattggtcagaacggtaaaggaaaatcggtgctgttaaaattgttagcacaaaaactattgccttcatcaggccatatcatgtggcgtatgccttttattcatgtcgatcagcttactcgcctaacaggtaacaccattgctgatgctttaggtatagatactttttttcaagcatttaaacgggttgataacggcagtgcttcattagaagattttgagttacttgaagataagtggcatttgcccatgacttggcaaaatttacttcattcagcacaactgccggtttcacttgatacacctattccccacttaagtggtggtgagcaaacgcgtttagcattatgtcaggcttttttacatgacgatcattttctattattagatgaaccagataaccatctcgatcatcaaggtcagcaatggctcgttgaacaattaatgcatcataaatcaggtgtattatttattagccataatcgacatttattatcttatgctgaaaatatatttgaactgagtgaaaaaggcttacaagaatatggcggtaattattcgctttatgaaacacaaaaaaatgcgcaaatagcctcaatcgaagctgcaaatgagcgtatcaatagtcaaataaaacaggaaaaacgccaacaacatgtaacattacaaaaagcattaaagcgacgtaaacaaggtgaaaagataagaaacagcggctctcaatcactgttacttcttgatatgcaaaccaatcgagctgagaaaaaacagtcatcagtagctaaacgacatcagcgcgttatggatgatatgcagtcacaaaaacaacagttagaacaagagttaactcatattcatcagcaaaaattaatattaaactatcaaggcgatggccatcggttaaatgtatttgccacagagcttgttttaccttttggcaagcaaactccctactccttttccgcttatggtggtgaacattggcatatacaaggtaaaaatggcagcggtaagtcaaccttattaaaatgtttaatgggcaagctatccccgttatccggcgaatatcgtctcaacccaaattattgctatcttgatcaacatttaactttattagataaatcattacccgttgctgaagcgttatatcaatatcagccattaatgaccattgagcagtggcgcacaaaactgggtatgttacgtattcgaggtaacaagtctttatttcctttagaaacactcagtggcggtgagcaattaaaagcaacactattagcattaatttatagtcctcaaccccctgccgttttattattagatgaacctgataattatttagatttagactctaaacagttattggaaaatttattatctcaatatcaaggaacattattattaatctctcacgatgaagattttgttaaacaatgtggtataacaaatacattattactctaa

SEQ ID NO: 301585 - DNA, 249 bp, Proteus mirabilis
atgataaaaacggcgtacagtttatctggattaaataaaaagagagttggtccaggttgcatatctttcatatacaatacaccaatgataatagctgccgcagaatcaccgggaataccaaaaaccaatgaaggtatccaacttcctgctaaactagcattattacttgctgatgcatcaacaataccttcttctgagccttgcccatacttttgcggtttttttgataattttttagataccgcataa

SEQ ID NO: 301586 - DNA, 153 bp, Proteus mirabilis; identical to SEQ ID NO: 298933

SEQ ID NO: 301587 - DNA, 468 bp, Proteus mirabilis
atgaaaaaatacgaccttatctattgtgatcctccgtgggattacaaaaataaagtttcaaacggtactgctaaaaatcattatccaacaacctccctcttcaatttaacccatatctctattcattctattgcatctgataacgcagttcttgccatgtggtatacaggcaattttgtactcgaggctatcaggttagctgaagcttgggattttaaagttaaaaatatgtttgggttcgcatgggttaaattaaataaaaatgcagaagatagaataaataaaaaacagccaaaggactttttcgatttcatggaaatattaaataatgagacgaaaattaattgtggtaattatattcgtcaaaatatcgaaatgtgtttaatagccacaagaggaaatggattacctcgtcaatctgcaagtgttcgacaagttatttatttgtgcttagatgaacacagctaa

SEQ ID NO: 301588 - DNA, 1101 bp, Proteus mirabilis; identical to SEQ ID NO: 297478

SEQ ID NO: 301589 - DNA, 831 bp, Proteus mirabilis
ttgctagctaaagaatctattgcggtaaagaaaaaaagtttagatagacataataagattatatctgaattaaatgtgatagcccgtaatgatgaagggcgtgtttctgaatatgttcaggcagaagcaagaaaaatattagtagaacaagatattaactattatgaaaaagaattaatgacaacgttaagtacgttatcaaaatatacgggtttccccgttggtgaaagcgatcttgtcaatccttttgatggaatgacggtcagtgatatgtatagcgaattcactgcggaaaataataatcaaaatccagcttatctcgtgagtcaggctgatatcgatgctaaaaaaatgggcgttaaagtagaaaataaaaaacaattaccaagaattaatttaactggaaatataactaaagatgatcgtcagataggcattgatgtgacatgggacattattaatttttcatcattatattctattgatgaaaaagtaagtcagttaaacgcggcacaacagagaatggagagagtgattagagatattgaagaagcaagacgtttatcagtaattaatatccaaaaaagtactcaaaaattgaagatattagatgcacaaattttatcatcgacaaaagtagtcgatttttatcaattgcaatttaatgttgcacgccgttctttgttagatgttttgaatgcagaaaaagagttatctgatgttgaattatcttatgccacgacattgagtgatcttaggtacgggatgcttgattatttgtatgcacaaggaaaactttcgcactgggcacttaattcacacactcactaa

SEQ ID NO: 301590 - DNA, 462 bp, Proteus mirabilis
atggaaagtcgtaagaaagcagaggagaagaaaaaagccgctgaggataagcttaataaggagaaaaaacgtcatcagccaggaaccgccacgggaaaagggcaaaaagtgggtgataaatggcttgacgatgcgggaaaagaaaaaggcgctcctattcctgaccgtattgcagataaattacggggtaaaaaatttaataatttcgatgagtttagacggaaattatgggaggaggtatctaaagatccagagttaagtaagaattttatacaaagtaacagaactcgaatgcgaaatggtttggcacctagggctagatataaagatagtgttggagggagacgttcctttgagcttcaccatgataaaccgattagtcaaggtggagaggtttatgatatagataatattcgagtcgctactccgaaacgtcacattgatattcacaaaggaaaataa

SEQ ID NO: 301591 - DNA, 261 bp, Proteus mirabilis
atgatgaaactgaaaaatagcattaatgattatacagaagctgaatttaaacaatttattgaagctataattgattgtgaaggtgacgaaaaaacacaagatgataatttagaacattttattaaaatcactgagcatcctgaaggttcggatctgatttattatccagaaggcaataatgatgggagtgctactgctattattaaagaagttaaagaatggagggctaaaaatggtaagcctggatttaaaaaaggttaa

SEQ ID NO: 301592 - DNA, 339 bp, Proteus mirabilis
atgactaaaaaatattatattaataatatgttctggggatggtttataggtatattacttatttattcttgcctagataatgatataagagaatataaatggttatcattatttattatcagcattataggaattgggctctatccattggctaaatttgctgttgagtcattttttttaacctttaccacaaaagaattctggaatacaggttggtttatagatactcctgggaaaaaaggtatattagcgctatattccattacaatttttatctttgccatccctatttctatactttatataatagctattctagcaaaaaggctacttatataa

SEQ ID NO: 301593 - DNA, 231 bp, Proteus mirabilis; identical to SEQ ID NO: 300704

SEQ ID NO: 301594 - DNA, 3255 bp, Proteus mirabilis; identical to SEQ ID NO: 297498

SEQ ID NO: 301595 - DNA, 558 bp, Proteus mirabilis; identical to SEQ ID NO: 296507

SEQ ID NO: 301596 - DNA, 1770 bp, Proteus mirabilis
atgaaacctgccatgtcacaaacatttattcccggcaaagatgccgcactggaagactctatcgctagctttcagcaaaaattaactcagttaggttttaacattgaagaagcttcatggttaaatcctgttcctaacgtttggtctgttcatattcgtgataaagattgtccgttatgttttactaacggcaaaggtgctactaaaaaagcagcattggcttcagcattaggcgaatattttgaacgtctttcaaccaattatttcttttctgatttctggctaggcgctgatattgcagaaggtgagtttgttcattacccaaatgaaaaatggtttccactgacagatgatgatgctgttcctgaaggcttattagatacacgtttacgtcaattttacgatcccgaaggtgagctatgtggcagtgaactggttgatttacaatcaagtaattcagaacgtggtatttgtgccttaccgtttattcgtcaatcagataaaacacctgtatatatacctgttaatatcattgcaaatctttacgcatctaatggtatgtcagcaggaaatacgcaaaatgaagctcgagtgcaagggctttctgaagtgtttgaacgctacgttaaaaatagaattatcagcgaaagaattagcttgcctaaaattccccatgaagttttagcccgttatcctgctgttattgaagctattacgacattagaaaaagaaggcttccctatttttagttttgatgcatctttagggggacaattccccgttatttgcgtcgtgctgtttaacccacaaaatgggacttgtttcgcttcttttggtgctcatcccgattttggtgtggcattagagcgtactgttactgagttattgcaaggccgtagccttaaagatctcgatgttttcaatccaccgagttttgatgatgaagaagtcggtgatcacactaatcttgaaacccactttatcgactctagtggtttaattagttgggatctgtttaaaaaagatgcagactatccatttgttgattgggatttcagtggttcaaccgaagaagaattccacacattaatgtcactgtgccagcaatgtgatgcagaagtgtatattatggattataaccatttaggggtttatgcttgccgtattttagtccccggcttatccgatatttatcctgctgaagatctgcaactagccaataacattatgggtgtccattggcgtgacaccattctttctttaccaacaagtcatggcacaaaagaagagtacctctcacttattggccaatttgatgaagatggcttagatgactttactcgtatcagagaaatgattggtattgcaccgggtaaagataatggttggagtcatttacgtgtaggtgaattaaaatcaatgttagcactcgctggtggcgatttagaacaagcattagtttgggttgagtggacacaagatttcaacgcatcattatttacaccagcgcgtcaaaattattatcgttgcctgcataatcttttactcctacgtgaagagcatgagcgtgagcctgcacaatatatggaggctttttctcgtatgtatggcgaggaaacactgcaagctgcattaaatgcaattgaagggaaacaacctttttatggcttgcaacccatagatccatcattagcgaatttgcctgttcatcaatctttattagccgcgtatgaaaaattacaacaagcaaaacgtcaatcgaataaataa

SEQ ID NO: 301597 - DNA, 669 bp, Proteus mirabilis; identical to SEQ ID NO: 295338

SEQ ID NO: 301598 - DNA, 471 bp, Proteus mirabilis; identical to SEQ ID NO: 297226

SEQ ID NO: 301599 - DNA, 1233 bp, Proteus mirabilis
ttgatagtaataccccgcaatagtaataccccgcaagacgctaccgtttatgatccaacttgcggttcaggttcattattattaaaagcgagtgatgaagcaccgcgtggcttgagtatttttggccaagaaatggacaacgccaccagtgccttggctcgtatgaatatgatcctacacaacaacgccaccgcgaaaatctggaaaggcaacaccatttcagatccacagtggaaagaagccaacgggcaactgaaaaccttcgatttcgctgtcgctaccccccctttctccaacaaaaactggactaacggcattaatcctaaaaaggatgaatttgatcgctttagctggggaattcccccagaaaaaaatggtgactacgccttcttgttgcatattatcaaaagcttaaaaagcacgggtaaaagcgccgtcattctcccccacggtgtattgttccggggcaacgccgaagcgcgtattcgtgaaaatctgattaagcaaggttatatcaaaggaattatcggtttacctgccaacctattctacggcacgggtattcctgcctgtattatcgtgatcgacaaagaacacgcacaggcgagagaaagtatttttatggtcgatgccagcaaaggctttatcaaagatggcaataaaaaccgcctgcgtagtcaggatatttataaaattgttgagatatttaccaagcaattagaacaacctcgctttagccggatggtgccattaagcgaaatagtggctaatgactacaatctaaatataccgcgttatattgattccagtgaaccagaagacttgcacgacctcagtgcccatctacaaggtggtattcccaatcgtgatatcgatgccttagaacactactggcagatattcccaagtattcgtgcgaccttattcaaaccagcacgtgaaggttatagcgaagctttagttaaagcctctgaagtgaagaataccattctaaaccatgatgaatttaaacagtttgcgacgaatagcttgcagtattatcacgcttgggctcgcgcatctaatttagctgagatcggtgtaggtgatcagcctaaagcgttaatcgctgaaattagcgaaagtttgttacaaagctattcacaaacaccgttgctgagcaaatacgatatctaccagatcctgatggattactggagtgatacaatatgtgtcactcagaacctcggctga

SEQ ID NO: 301600 - DNA, 2541 bp, Proteus mirabilis
  misc_feature (2512)..(2521): n is a, c, g, or t
ttgatatattcgacaagtaataaatctgatagcgctattattaaaaccattgataataaagtaataaatttatcaaatttctttactgaaatatttaataaaccttttatttatatcaataaagcgcagcttgaacatcatcatgatttagaagaaaaaatggttacagttgccaataactttgcttggtcaattgaatattcaggcttagaaacaggaaaagatgaatattgccaagagtctctcttaactacggccaatggttatattgggttaagaggaactttgcccgaaatgactataagtgatgagcactaccctgctacctatattgctggcctatataatcaagcaagttcacaaatagaaaaccatcaggtgattaatgaagattttgttaatgcacctaatggacaatttatttctcttaaaattggtaagggagaatatcttcatccaaagcaactgataacacaccatttaacacgtcatttagatttgaaaacgggtgtattcactagccaatggcgtgtagaaacccctgaaggacagcaacttgatattcattgtacaaaatttgccaatatggctgatatgtcacattacgccattttatatacctttaaaccattaaatttctcaggtgagataacggttataactcgcctagaaggaaatacttataattacggtgtacaacgctaccgtagccttaatccccatcattatcatgtgctacaaactggagcgaataagcaacacgcatttatattagctcaaacagatcagtcaaaaatagggatcggattatcgtcaacaatcaggggggatttctttgcaaatgaagatattgtttgtcatgtttcagatacgcttgttgaacaaaccatcaccttcaacgctcaacaaaataccacctatcaacttgaaaaatgtgttgctgtaacaacctctacggcttacccagactcatggcaagatgtgattaattgggaacaacaacctttacacagccaattgataaatagccaaaaagcatggaaaacgttatgggatagtgccgatatctcgatttctggcgatctgatgacccaaaaattactacgcttacataccttccatttactgtcatccgcatcaccatttagcaatcagcaacatcaattagatgtttcagtcaccgcccgagggttacacggggaagcctatcgaggccatattttctgggatgagatctttattctgccattttatattatgcacttccctgaaaccgcacgccaactattactatatcgttaccacaggctacctgctgcgcgtcttgcggcacgagcagaaggatttcaaggtgctatgttcccttggcaatcagggcatgatggtagtgagcaaacccagacattgcatttaaaccccttatcagggcaatgggatgccgaccatagttgtcgtcaacgtcatgtctcattagcgattgcctataatgtgtggctatattggctaaatactcatgatcaccaatttatggaacagtatggacttgaactactcaatgacattaccttgttctggttagaccaatgtcagtgggatgaaggcgatcaacgttttcatattaatggagttatggggccggatgaatttcatgagaaatacgcagactcacttgaaggtggcttaaaagataacgcatacactaatttaatggtggtttggttgtttaatcaaatagagatgttcataaacaatgatcgtttttctaaaaaattacaacagctaaacagccaatctagcgttttcaataaaatacaagaagttaaaaatcgtattgctatcaatattgatgctcatgaaattattgaacagttctcaggttattttcaattaaaagatctggattgggaaagctatcgaaaaaaatacggcaatatctatcgtatggatagaattttgcgtaaagaaaataaatctgccgatgattacaaagttgctaaacaagcagataccctgatgttatttaataacttagataagcaaaccgtacattccctaattacctctcttggttattcagtttctaagcactttgctgaaaaaaatctacattactatttagaaagaacctctcatggttccacactgtcacgcattgtccatgcttatctcgcagaacaaatacagttacatgatttgtcatggcaactttatcaagatgctctttattcagattataatgatattcaaggtggaacaactgccgaaggtattcatactggtgtcatggcggcaacattaaataccaccatcatggcttatgccggtgttgatattcgtcaggatatgttgaccatcaccccttcactccctcaacaatggcaaaaactaagctttaaattattgcatcgctctactttatatcaaattaatctcactcataaagaaattagtattttaagtgataagcccagtactattttaattaaccatcaaacgcataagctaaccgccnnnnnnnnnngagacacgcaaaatgactaa

SEQ ID NO: 301601 - DNA, 549 bp, Proteus mirabilis
atgatgaccaataatagtaataaaaaacagtttatactcggtggactattccacttagttatgtctgttactattgctattatcagctataaaatttctcaattttttattcatgataaaataaaatcaatcccatggggggttataagcatattgctactccccaccggatatggcgtgacatttttgacaaagctttctgaggttaaaaaaaacacagttgagctattaaatagatccgaaactagacacctagatattataataaaatacaaaaaaagaggcgcgtatttaacactttgttttcaattaataattgttgctggcaatatatttttcagcgttgggagtttacccgaaaacttacagcagtatcataaagatttgctttgtttgctcatagctttaaccgtaacgtcactataccttatattgccatttatactcggcgtgaacgaagttaatgattttgaatctaaagtaaaagaaagaaagtctagaaaaaagaaaaaagaagaacttcttaagaaattaaaatcagacaaataa

SEQ ID NO: 301602 - DNA, 1029 bp, Proteus mirabilis
atgagtaagcggcaaataaaaacaaaaagaatattatataaggaagttcttattccagggcaaagttcttctcttcagcaactgctatctgatgtcttgtctaagcatcagaaagctgagaatagaaaagaattggtaaacccaaataatgatgatctatttagattaataaataaatcagaaacttttgaagggatgttgttttgccaattagtttcctttgagccaggtcattcacagcgctatattcaattaaaaaatgatgcggaatcatacgagatccgttcggttacatctgcagagcttgccaaactaactgatgaacaggcagatgaaatcaaaaaagaacaaaatcaggtaattagtgagtttatagattcgattttatattttggtgtttttggaaatagtatagttgtcatgcagtctagatcgctaactaccagagagttagaaatacaccttagatggttgcttggaacgctcactcaaaatataactaatggcggcgttcttctaattagagacaagcctaaggaagaaattattgaaaaggtcatgtctagaccgataaagtcagtatccgttggcgctcctatagaagcagttagtaacctagatagtggcaagcaaaaatatctaccttcggggtctggtgctgatgtgataaaagcaatgctagcagagaaatgggatagtttcataaaaggaattaagctgacagattgccttgatgatgctaaccttgaagtgaaactagtctttacttacaagagaaaaaccacagaaaatggagagagagttttaaggcaaatagttgattcaacaagacattacccagatgaggatgtcactgtagagatggtcggcgggacaaagttatcaggtgaagatataagattatggcacacaataaagctaataacgtataacagcttaattgatgagcatgacttgtatgcgcaaatgcatgattggctgagaagcctactaacaacagaagagattgaaggctatgatgaccaataa

SEQ ID NO: 301603 - DNA, 1638 bp, Proteus mirabilis; identical to SEQ ID NO: 297386

SEQ ID NO: 301604 - DNA, 579 bp, Proteus mirabilis; identical to SEQ ID NO: 296290

SEQ ID NO: 301605 - DNA, 354 bp, Proteus mirabilis
atggcgaatatgaaagatgatggttttatatggcttgctgttacatttaatattcaacctccttataataaaaacaatactattgaattatctagaaatagtaaaatttatccatatttctacttctgctatccagagcagaataacaaaaattatgctattcaccacttttctggttcatggcttccatcacattcaagaaaagataaattgaatatttttgataaactaattctaactaggcttatcagaatcagaaacaaaggagatgaaccaattttacataatgaaagaaaattatttagtacaaaagaaaaaaataataaatcttatatcttactcctaagaaaataa

SEQ ID NO: 301606 - DNA, 213 bp, Proteus mirabilis
atgtgtaatcaaaaacaagtgaagttatccaagctatttcgtggcggtcgcttcgttggtcatgcattaagtgttgatggtgagttgttaagtaatcaaaagttagttgttcttccacccgctgatggattatgtaaacaagttgatatcacagtcacactgacatgcactaatgacatgatcatgaatgcacccgatatccatttgaaataa

SEQ ID NO: 301607 - DNA, 492 bp, Proteus mirabilis
atgggcaatatgggcagcgcggatcatgatcttggacggcacacagccgatattgacgcaggtgccgccgatggtgccgcgttcgatcagcgtgaccgtcgcgccttgctcgacggccttcagcgccgccgccatcgcggccccgccgctgccaatgatggcgatatgcaaaccggcgccctcaagtgcatcacggatttttggttcatctttgaaatcaccaacccggatcgagccttgataacccaatgcggcgatggcggccagcagttggttgtggctcacggcggtgtctgccatgacttgcgcgcggctttctggataggacaccacagcggcattcacgccgggaatcttttccaaagcatctttgacatgggtggcgcaggatgtgcaggtcatgccattcacggtgatttcggtcatttttttactccattgaatttcggggtgcagcaggcatcggcttggtgttttcgttggatggcgtag

SEQ ID NO: 301608 - DNA, 144 bp, Proteus mirabilis; identical to SEQ ID NO: 297166

SEQ ID NO: 301609 - DNA, 921 bp, Proteus mirabilis; identical to SEQ ID NO: 297493

SEQ ID NO: 301610 - DNA, 1770 bp, Proteus mirabilis; identical to SEQ ID NO: 297034

SEQ ID NO: 301611 - DNA, 1761 bp, Proteus mirabilis
atgattactataaaaaaaacgcacctgctgttacttaccacacttttttcacctgcactctatgccgcctatgagccagcggttgaagcacaacaaggtatggtggtctcttcacaacatttagcctcacaagtaggaaaagatattttgcaaaaaggagggaatgccattgatgcagctgttgctgttggctatgcacaagctgtggtaaatgcttgttgtggaaatattggcggtggtggctttatgaccatacaccttgctgatggcaccaatacctttattaattttcgagaaacggcgcctacggcagcgtctaaaaatatgtatttagataaagacggtaacttgattaaagaggcaagcctatacggctatcttgcctcaggggtgccgggtacagtgaaaggacttgatgcagcattagaaaaatatggcactctttcacgccaagaagtgatggctcccgctattaaactagccagagaaggctatattttaacccgtgctgatactgacgtattagacaccaccacagagcgatttaaacaagatcctgaatcagcaaaaattttcttaaagcctgatggaacaccatggcagcctggcgatcgcctcattcaaacagacttagccaatacacttgaacttatcgccaaccaaggtgctgatgctttctatcaaggggaaatccctaaaaaagtagaacaagcttcaaaacagcataatgggttattaaccaaagaagattttgcgaacttcactattaccgaaacacctcccattacctgtacttatcgaggttatgaatttatctctgctcctcctcccagttcagggggcgtcactatttgccaaacactgaatattttagaaggctacgatctgaaatcgatgggttttaactctgccgaatatgttcacacgctcacagaagctatgcgtcatgcttatatggatagaaacacctttcttggcgatccgcaatttataaacaatccaacagaaaagttattaagtaaagcctacgccgcagagcttcgccaacaaattacaccgaataaagccaccccatcagaaaaggtacaacccggtattgcacctcatgaaagccctgaaaccacacattattcggtgattgataaagatggtaatgccgtttcaaccacttacaccatcaatggtcgttttggtgctgtcgttatcgccccggggactggctttttcctcaataatgagatggatgattttacaactaaagttggcgagaaaaatctttatggcttagtacaaggtgaacgaaatagtattgccccattaaaacgtccactatcctcaatgagtccaaccattgtgactaaagatggcaaaccctttcttgtattaggctcaccgggaggctctcgtattatctcaatcaccttacaaacggcacttaatattattgagtttggtatgtccccccaagaagccgtcaatagccctcgaattcatcatcaatggctacctgatgaggtttattatgaacaacgaggattatcaaaagataccttagaaaaactttctgccatgggatataaaatggtcgaacaaacgccatggggcgcggctgaattgattatggtcggccttccaggagaacaaggagtgatccctgcttcgtcaggtaatgattctgctgtttcaggggcgatacgcgaaggttatctttatggttcaaatgatgttcgacgtccagcaggtaaagccgtgggctactaa

SEQ ID NO: 301612 - DNA, 1179 bp, Proteus mirabilis; identical to SEQ ID NO: 296744

SEQ ID NO: 301613 - DNA, 597 bp, Proteus mirabilis; identical to SEQ ID NO: 297210

SEQ ID NO: 301614 - DNA, 873 bp, Proteus mirabilis
atgcaatttgaaaccaccctgataggaaaatcacgcgcagagcaagaaaagcttaatgcccttcgtcagattgatgtgctgtatcagcaagccagtgtggatttaggtgagaaagagctggcgaacttacaacgtaatgttgaactcactaaacagcagattgaggaagaactgaggaagcgagaggccatgaaaggtgatccgatggtgggattaaaacaaggcttatcggatttcagtgagtcagccatggatgtgatggagaacgtcagaaacgtcactaccaatgcgcttaataatatgtctgatgcgttagccgattttgctttaacggggaaaggaagctttaaagattttgccaatgcggtgatctccgatatcactcgaatggtgatgaaaatgctggttttcaaagccattgaagcaggcgggcaggcaatgggctttgatatgggatggatgagcaaagggcatgcttatggtggctatacggggcatggcgggaaattcgaacctaaagggattgtacatggtggcgagtttgtttttaccaaagaagcgacggctaaattgggtgtcggcaatctctatcgcttaatgcatgcggcgcaaggttatgcttcggggggctttgtgggggcggtcgcagggcgaataccgattacaccgcaaccgacgttagcccgtgcaggcggggtgcaaatgacggtcgttaatcatattacggtgacaggaaatggtgacgctgtacttgctcaagcaatgaaagaagccgcacaacaagggacagaagcaggcgcacagaaagctcacgcgatgatgttacaagactttcaaagtaatggcgcagcacgcagaacattaggagtttaa

SEQ ID NO: 301615 - DNA, 1260 bp, Proteus mirabilis; identical to SEQ ID NO: 295459

SEQ ID NO: 301616 - DNA, 309 bp, Proteus mirabilis
atgtcagataaacagattaactatgaagccataggacgttgtaaggtcttgcgtgacaaaatcaaagtacagcatcttgaaagatctaaggctataaatgaactgcgagcagtaatctattctcttcaccagaaagggaatatcaatcatgtcccgccagaaatcgttgtttttgatactgagagcttaacttttttagttgataaaattggacggacggatagtgatctcatgcgtgctgtcagtgaatataataattggtgtcatgaggctggtgagaaaccagttaaactgattgaggtagcatga

SEQ ID NO: 301617 - DNA, 210 bp, Proteus mirabilis
atgaaccacgaacaattcatagaaaagaacatacaggccgagttaaagaagctcggcttttctttatctgtcacccagagagcaagctacatggcagtagatcattatcgccgaatcgctcaagcgagtaagaaagggcgaatgtttgacgattgcttgcatatcgccaaagtatgggcgagtaaatttgctaaagagaaaacaaaatag

SEQ ID NO: 301618 - DNA, 585 bp, Proteus mirabilis
atgaataaatccttagtttttaaaggtaacaaaatcaccccatttgataagggtgatggaaaaatctggtttaccaacaagcaactttcagaattgcttggatacaaagatgagtcatcagtaactcgtatctttaatcgaaataaagatgagtttaccgatggcatgtctcagacggtcaatttgaccgttagtagtaaaaacaatgagatacaaaataaaagagtgcggatattttcggttagaggtgctcatttagtcggtattctctctaaaactgatattgctaaagcacttcgacgctggctactagacttggcagagaaggagtcaaaacctcaagcagagctagcaaatcttgatatggatgagctcaaaagccttaccattaacgaaatgcaaaatagattagtagcagcggataattggtcttttgaaaattttggtaagaaaggtagtgacctgatgaatttgcgcaagcgtcatttgaagaaaatacgtaaagcaaagaaagccattattgatttatcacaacttactttacctgatatgggtgattttccagatggaggagaacccgcatga

SEQ ID NO: 301619 - DNA, 669 bp, Proteus mirabilis; identical to SEQ ID NO: 296918

SEQ ID NO: 301620 - DNA, 1473 bp, Proteus mirabilis; identical to SEQ ID NO: 297477

SEQ ID NO: 301621 - DNA, 618 bp, Proteus mirabilis
atgaaaaataccattgtaaaagatctgaaaacactggaagagatttatggtcaacctgccgaaccatcggtcttaaaagaagtggattttattcaccccctttatcgcccttatattgaagctacaccatttgttgcattagccacttatagtgctgatggtatggatgtttctcctcgtggcgatgagccaggttttattcatattgaagacgatcatactttattattacccgatagacgtggtaataaccgcattgatagcatgcgcaatttgttaattaatcccgcgattgctttattagtcctagtccccggcattaatgaaacattacgaattaatggtcatgcggaaattttaatagatgaagaaacactcgcacgctttaaatataacaatgcactacctcgctctgtcttgcgcatccatgttgagcgcgtatttttccaatgtggtagggcacttattcgttcaggtttgtgggaaaacaaatatttagctgataaatcaactattccagcaccgggacaaatattgaaatccatttctcatcaacaatttgatggtgataaatatgatgcacaattgcctgaacgtattatgaaaacattatattaa

SEQ ID NO: 301622 - DNA, 1497 bp, Proteus mirabilis; identical to SEQ ID NO: 297520

SEQ ID NO: 301623 - DNA, 450 bp, Proteus mirabilis; identical to SEQ ID NO: 296620

SEQ ID NO: 301624 - DNA, 657 bp, Proteus mirabilis
atgttacctaattcgttatttataccttcatttttgagtgttgttggtgggttgaaaccactacaaataggtcaagttaccaatcttgccttctttatctatctattatgtagtccaatagctatttttcttgcacggcgtttagagccacgattaatgatgttaataggtattatgattattggaggagcatgtttaatcggtcatcaaattgattatcagtggcgagctaatgatttctttattgtcatatctatgcaagcaatgggggaatgtttgctacttatcggattaattgcctcatttgttactaatatcaagccacaagaagcgttacatttaggggcatatatttcgatagcgagagtattaatgccagcccttgcaggagctattatcaatacttatttgaggatctcatatgatactcattatgatttgttaagaggatacatacaaactggtgagcaaaaattagcagggaatattgctgaacattatcaaacaacgatggcattagtaataagagaagcacatgttgcctcttttattgatggttttgatttgattatgctcttggttattttaggtgctctttgtatgtcatttttaaaatcgtcaccagaaaatccggtagtcccaaggctagtaaaataa

SEQ ID NO: 301625 - DNA, 1320 bp, Proteus mirabilis
gtggttattaccggagtgggggcgattacatctattggcaataatgtaatggagataataacagcgatttcggcaggagataaaacaggtacattaaaacctatcgtatttgcgagtgatgtgcagaaagatatcgacaacttgatgtctgttgtcataaaagataatgattttgagcaatcgttaggacatccttattttgatctcgacattgatcatcgcttaaaaaatagcgcctgttatcatgctatcactgacgttaatccgaaaaaaacattacgttattatgatccaagaaaagctattcctagcgggacttatgccttattcgctttaaatgaagcacttgctaatgctggacgcaaaattaaacgtgatggtgataacttaggttttattgttggaatgtcaaaagggccacaaagtaccgttaatcgttatttacaaagtttaattcctgatccgcaaaaagtaagaacatcagaatttcctggtactttaatgaatgcagtaccgacattttgtgccattacagaaggaataaaaggctataccacgacattggcaacaggggttaatgctgcattaggagcgttaacttatggttatgaaattatcaggcaagatctacaacctcaggtaattgtcggaggggcagatgagcacttcagttctatttcactctattttcaagcgatgagtaagaaagttaatctgaccaagaatgcgacagattatcaggtttattctaatgcaagtgccggctatatccccggagaaggggcagggatgttatttcttgaagataaagagtatgccaagcaacgaggcgctaaaatttatgctgaaattattggctacggtaaagcgaatgataatacttttttagtagacgaaaatattactgatagagtggccgccttatgtaaggctatccaacaagcattatctgaggcgcaactcagttgccaagatattgatattatctgtggtaccagtgatggtaataaagagaatgatgaagttgaaatccgtgcgattcggcaactattttatcaagcggcaaatcatgtaccagtagttaattacaatgccttttttggtttagttgaatcatgcgctgggatattggcgatctctttagtgattcatatgatgcaaagcaacacgataatacctattccttatacaaaaagttttatagctgatgatattcattttgttacccaaccgattaataagcagatagaaactgctttagttcttggttcatcagaaggatgtaatcactatgcaattatcatcaggaaaccgttatga

SEQ ID NO: 301626 - DNA, 945 bp, Proteus mirabilis
atgacggattacacatcagcaacaacgaccaataaagagtcagcagatatgcatttacgtaatgttgatcttaatttattaacggtgtttgatgctgttatgcaaatgcaaaatgtcacacgagcagcacaggtgttaggtatgtctcaaccggcagtcagtaatgcagtttctcgtcttaagatcatgtttaatgacgagttatttgttcggtatggccgaggtattcaaccaacattaagagccaaacagttatttggccctgttcgacaagcattacaattagtccataatgaattgccaggggcgggatttgagccggaacaaagtgatcgtgtgtttagcttatctatttgcagtccattagatatcaagttagcgccaaaaattgtagagagaataaaaaataaaacccctaatattaatgtaaatattaagtcttatttgaatagtaatattgaacaccaattaaaatatcaggaagttgagttctttattaattataaacaatttgataaaccagagtttcattcacaccctttattcaatgatgaagtggttttggctgtctctaaccaacacccacgaattaaagaaagcgttactgaagagatgttattaaatgagcatcattctattgtttctttagaagatgtggggtcttttagtgcggcttattataagaatacagagttagaagatttaattacttatgaaggtactgatttaaatagtgtattaaatctagtctcaaaaacttattcggtcgctattgcgcctagatggttagttgaaagctattcagaacaattgaacattaaggcgatatcattaccttgggagaaggtagaacgtccatgctatttaatttggcatgagtcaacggcgcgagataaaggccatttatggatgaaaaatttacttagtgaggtttgtcaaaactaa

SEQ ID NO: 301627 - DNA, 201 bp, Proteus mirabilis
atggctcgcaaagctttagaagaagcgaatcgtggtcgcactactgaggaaatatgggattcaatcattaagccagtcgatgaaacggatgtgctggcaagcttggtgttaagtcttaaatcagcaccagatgagcgtaggaaattaaaaattaaccgccgaccaattataagtgacggcggtgttaccgctagaggttaa

SEQ ID NO: 301628 - DNA, 171 bp, Proteus mirabilis
atgatgaaaattaatgaatctgaacttgcacttgagtatcttcgcagaagcaaagaagaactaactcctgaagaattttttgataaatatttgtccttgatggaatcatttaaaaaagccatagaatcaaaagaaccaaaggcgacaaacgcttttgatgtattattttaa

SEQ ID NO: 301629 - DNA, 543 bp, Proteus mirabilis
atggagttaaagatagatagaggcactctacttgctgtcatggagtgtatggcaataagagatattcgctactacatttgcggtatctgctttctacctaacggaaaagtggctggcacagatggtcacatgttggcatacggcgaacacgataacgaaattgaaaatgaagttattttatcagtgggtaaattaccaactaagcaattcgattatgcaattttcgatactgatgacggaattgttaggttgttttcagatgaaaatacgctaataggtgtttcaatgtgtagtgttatcgacgggcgcttcccacacatcgacaagctaatcgaaaaaacaagaaaaatgaaagaaaacttaccattcaaaataggtattaacgtttcatttcttgccaaattacagaagatagcaaagtatgttaaccctaaaatgccagctatcgaacttcaattcaaaacaggtcaagacgctatcatttgcgacatattcaacccatgcaagccagtatcggtattgattatgccaatgcgtatttag

SEQ ID NO: 301630 - DNA, 1056 bp, Proteus mirabilis
atgatggatgaacagcgtctggcactgaatgcggatgaactgccagagacggacagtgaatctgaggatgatgacgggcagcgtgacattctgggggaaatggaaatctccgcccgcatgatgatcaccggcggggatgtgcgggaagaagcggagctgaagcgggctgaccgggcgatgatccgccgggcgctgatggcgggggcccgggcgtcttatgccgccgaccggcagatgctgccggcggatttgcaggaggcgctgtatgccctctcccggggggaaggtgaagaggaagggcgggcattaaatccgcagcgccgggcgaaagcggccgaaatggcggaatccctggggatgtttaccgaaccgggcagttttgagcatgagctgtttaatctgccgggggagctgtggccggaggcggatgtgaccctgattgatttggggcacctggcgcgggaagggtatgaggcccagatggcgctgacgatggtgagtcttatcaactccatcaacaatattgccgagcgggatcagtaccgggcccgggacattaattttgtggtggatgaggcgcatatcgtgacggtcaacccgctgttatccccctatgtgaccaaagtggtgaaaatgtggcggaaactgggggcctggctgtggctggcgacccagaacctcgatgactatccggactgtgccgagaaaatgctcaatatggcggagtggtgggtgtgtctgacgatgccgcagaaagaggtggaggcaatcgcccgctttaagacgctcagtgaggagcagaaacaggtgctgctgtccgcagccaaactctccggctgttacacggaaggggtggtgctggcgcggaaagtggaggcgctgttccgggtggtacagccgagcttatatctggcgctggggatgacggaaaaagaggagaagcagcaacggcgggtgctgatggagcaatacggatgcagtgagctggaagcggcgttcagggtggcagatgaacttgaccggaaacgggggttaccgccccgggtgccgggatga

SEQ ID NO: 301631 - DNA, 558 bp, Proteus mirabilis
atgcgactttttggttacgctcgggtctcaaccagtcagcagtctcttgatcttcaggtcagagcactcaaagacgcaggtgtgaaagcaaaccgtatatttaccgataaggcatccggcagttcaacagaccgggaagggctggatttgctgaggatgaaggtggaggaaggtgatgtcattctggttaagaagctcgaccgtcttggccgcgacactgccgatatgatccaactgataaaggaatttgacgctcagggcgtggcagtccggttcattgatgacgggatcagtaccgacggtgatatggggcaaatggtggtcaccatcctgtcggctgtggcacaggctgaacgccggaggatcctagagcgcacgaatgagggccgacaggaagcaaagctgaaaggaatcaaatttggccgcaggcgtaccgtggacaggaacgtcgtgctgacgcttcatcagaagggcactggtgcaacggaaattgctcatcagctcagtattgcccgctccacggtttataaaattcttgaagacgaaagggcctcgtga

SEQ ID NO: 301632 - DNA, 366 bp, Proteus mirabilis; identical to SEQ ID NO: 121650

SEQ ID NO: 301633 - DNA, 210 bp, Proteus mirabilis
atgccttatcaaggacgggaatattttcaagcccagcaagtacaaagtgaggccacaacgcgaattcttattcgctatatcgcggatattgatacctcaatgcgtattgtatggggtaagcgaatatttaatattatttcgattattgacccttatgagcgtcatcgtgagcttcaattgatgtgcaaagagggcgtgaatgatgggtga

SEQ ID NO: 301634 - DNA, 471 bp, Proteus mirabilis
atgggtgagattaaaatcagtggattgtctgaactcgctcaacgaatgcaagacattgcccgtaaaacgagaaatcaaagcgcgcgtaaggcgatgaatgcaggtgcttcggcgttaaaagaagaaatcaaacatcgagtgcctatccttaaggaaacagtgccgcatcgacgcaaaggcaccatcaagcgcaatattcgttctaaaacgaaagtgcagcgcaatgggcaagttaaaacgcgcatttgggtgaaatcattatcaggtaaaaaggtgtctgcctttaaacaagtaacgggaaaaagtgcagcattgaacccgaatgatccgttttattggtggtttgtcgaatttggtaccgccaagatgcccgcacaaccgtttatgcgccccagttttgaagcgaaaaaggaagcgacggctaaagtgattgttcaaacacttaaagaggatattgaaaaagcaaggtag

SEQ ID NO: 301635 - DNA, 342 bp, Proteus mirabilis; identical to SEQ ID NO: 297214

SEQ ID NO: 301636 - DNA, 1167 bp, Proteus mirabilis
atgaaaatcaccatctcaggaaccggctatgtcggtctatctaatgggatacttctttcccaaaacaacaaagttgttgcattagatattaataaagaaaaagtcgaactattaaaccaaaaaatctctcctatctctgataaagaaattgaagagtttttagctactaaagagctcgactttacagcaactttagataaagaattcgcttataaagatgctgaattcgttatcattgccactcctaccgattatgatcctaaaactaactactttaacacctcttctgtagagtcggttattcgtgatgttttagaatataatccaaacaccactatgattataaaatcaaccattccagttggttttactaaacagatgagagaaaaatatcataccgataatattatcttctctcctgagttcttacgtgaaggtcgcgccctttacgataacctttatccatctcgtattgtgattggtgagcaatctgcaagagcagagaaatttgctgagcttttacaacaaggggcattaaaaaaagatattgatgttctttttactgattctacagaagcagaagccattaagttatttgccaatacttatctcgcactgcgtgttgcttattttaatgaactcgatagctacgcccaagcttacaatttaaatgcaagacaaattattgaaggtgtctgtttagatccacgtattggtaatcactataacaatccatcatttggttatggtggctactgcttaccaaaagatactaaacaactgttagccaactacgaatcagtgcctaataatatcattggcgccattgtggaagctaaccgcacccgtaaagactttattgctgattctattatcgctaaatcaccgaagattgttggtgtttatcgtttaattatgaaatcaggctctgataatttccgctcatcttcaatccaaggcattatgaagcgtattaaagcaaaaggcattgaagtagtgatttatgagccagaaatgaaagaagagactttttttaactcaaaactcattcgtgatttagatgcgtttaaagccatgtctgatgtcattattaccaatagaatggcttcagcgctaaacgatgtggaagaaaaagtttatactcgtgatctctttggtaacgattaa

SEQ ID NO: 301637 - DNA, 993 bp, Proteus mirabilis
gtgcaaaaaattccaaaattacctgtacagccacctaatattacgccggatttaactcgccatcagcattatttaaaaaccccaaaaataaaatcaaatgaaataactgggttaggtattatagacgcttggaataaaaatgcttatgggcaaggtatacaggtggccgatattgagtgggattttgatttatcacatcccgatttgttagctaataatatcacgccactttttcctttaactgaaaaaaccgatcaagccgaccatggtacggcagtggcggggttaattatggggaaaaaagacggtaaaggtattactgggcttgcttataaattagatatgttttatgccatatcagaattaagcagtggtcgtattgaagcaattattgccagtaaacagaaattacacgcgggtgatattgttttatatgagatgcagacagtttgtgaacatcatgcttatgttcctgctgattatgaaatgcatatctgggaggcaactcgtacattaacagaagcggggattattgtgatcatggctgccggcaatgggggggttgatctcgatttacctttttatgatagctatcgtcaacgtagcgataaccactctatacgtgtcggtgcgggctcgccttatacgctaaatcgtttacctttctcaacgcatggctcccccatacatgtgcaagcatggggagaagatgtgactactgccggatatggtgatctttttcatggtgacgggaataacaaatatacggctaattttagtggaacatcatcagcctgtgcattagtcgcgggggcggctgcggttattcaatcttggtataaagataaaaccaacacggtattaacgccaatagagatgcgagagctactgattaaaacaggaacttatccatcattaaatgaaaagataggccctttgcctaatgtaaataatgccatcttacatttaaaaaatttaatccaatataattaa

SEQ ID NO: 301638 - DNA, 486 bp, Proteus mirabilis
atggtgatgaaaatgctggttttcaaagccattgaagcaggcggacaagcaatgggctttgatatgggatggatgagcaaagggcatgcttatggtggctatacggggcatggcgggaaattcgaacctaaagggattgtacatggtggcgagtttgtttttaccaaagaagcgacggctaaattgggtgtcggcaatctctatcgcttaatgcatgcggcgcaaggttatgcttcggggggctttgtgggggcggtcgcagggcgaataccgattacaccgcaaccgacgttagcccgtgcaggcggggtgcaaatgacggtcgttaatcatattacggtgacaggaaatggtgacgctgtacttgctcaagcaatgaaagaagccgcacaacaagggacagaagcaggcgcacagaaagctcacgcgatgatgttacaagactttcaaagtaatggcgcagcacgcagaacattaggagtttaa

SEQ ID NO: 301639 - DNA, 597 bp, Proteus mirabilis; identical to SEQ ID NO: 297210

SEQ ID NO: 301640 - DNA, 450 bp, Proteus mirabilis; identical to SEQ ID NO: 297040

SEQ ID NO: 301641 - DNA, 510 bp, Proteus mirabilis; identical to SEQ ID NO: 297057

SEQ ID NO: 301642 - DNA, 558 bp, Proteus mirabilis
atgcgactttttggttacgctcgggtctcaaccagtcagcagtctcttgatcttcaggtcagagcactcaaagacgcaggtgtgaaagcaaaccgtatatttaccgataaggcatccggcagttcaacagaccgggaagggctggatttgctgaggatgaaggtggaggaaggtgatgtcattctggtgaagaagctcgaccgtcttggccgcgacaccgccgacatgatccaactgataaaagagtttgatgctcagggtgtagcggttcggtttattgacgacgggatcagtaccgacggtgatatggggcaaatggtggtcaccatcctgtcggctgtggcacaggctgaacgccggaggatcctagagcgcacgaatgagggccgacaggaagcaaagctgaaaggaatcaaatttggccgcaggcgtaccgtggacaggaacgtcgtgctgacgcttcatcagaagggcactggtgcaacggaaattgctcatcagctcagtattgcccgctccacggtttataaaattcttgaagacgaaagggcctcgtga

SEQ ID NO: 301643 - DNA, 558 bp, Proteus mirabilis; identical to SEQ ID NO: 25303

SEQ ID NO: 301644 - DNA, 747 bp, Proteus mirabilis
ttgaaatcaggaatagacaatttacaacaaagtaaagcattgttagaccgagaaatttctatcactaagccaatagttgcacaaggtgcaatgtctgctgtggaattattaagaatggagaggcaatcagccgatattcaattacaaatagatgaaaagaaaaataaatatttaactgaagctggggctgaattagttaaaacagaagcggaattagctcaagcaagggaaaatatggcagggcgagctgatcctgttgaacgtgctttaatacgtgcaccattaagaggtattgtgaaaaatatccgtattaatacagttggtggagtaatttcagcagggcaggatataatggaaattgttcctttagaagatcagttattagttgaagcttatattagtcctcgagatgtggcctatgtacgtgctggtatgcctgcattagtaaaattgactgcttatgattatgcgatttatggtgggttagaaggcgtcgtgactttggtaagcccagatacattgcatgatcaaaaaagacctagtgatttaaaacttaatcaagatgaagctttttatcgcgtattggtcacaactcaaagtagtcatcttacggataaaaatggaaaagagcttcctgttattccgggtatgatcgccagtgttgatattaaaacaggtgagaaaacggttttccaatatttgatcaaacctataacaagaatgaagcaggcattacaagagcggtaa

SEQ ID NO: 301645 - DNA, 234 bp, Proteus mirabilis
atgagttctttaaaacagaaaactactaatggtctaaaatggagtgctatagagagactaacaactcagggaatacaagttagtgttatgttgattttaggccgaatgctaggtcctactgcatttgccttaattggaatgttagctatttttattgctatttcacaaacattagttgatagtggctttagtaatgcattaattagaaaaaaaataaaaacagaatctgattag

SEQ ID NO: 301646 - DNA, 711 bp, Proteus mirabilis
ttgcctaatgcgaataaaatagcacagaccaatattgcgggtattgggatacaggttaaatttgctggaataggtgcattaaatacaacgtatttgaccccaaaggacccaagtggcaattcttatcgacttcttaccccttattggacagtcaaaattataaaaacaggcagagtaacgcaatcaggaagccttcaatggggcaagattgctcaagcagtacaaaataatacacaacctaaaaacacaacttggaacttaacttcactttatttgcctcttaatgcaataaagataaattcattaaaatgtactacaaaatcatcaaattataatattaatatggggacttggtatgatactcaatttaaaaatattggtgatgtcagtaaaagtgtagatgttcctattacattaaactgtgcggctggcactaacattaaagcgacagtgacaagtagtgctggatatatagatgtaaatacagggaaattaaacttatcgggcactaatcgagccactggtgttgccattcagttattagataaaaacaataacccgataaaactaaatacaaaaaatagtctacaaaatggggtctcctccggtgattatatatttggttggaaagcaagatatataaaaacaggtaataaaataacgcctggtagtgctaactcaacagcaacagtaaatatcttatatgagtga

SEQ ID NO: 301647 - DNA, 195 bp, Proteus mirabilis
atgagcaatgagaacccaaaccaacttgatcgctactataaaaatcaccgaggtatcgttgttcatgttgttcgttatgacagagaaaaacagcgcgttatttttatgcttgatggttgtgacgaccccagtgtgaacctgtacagcgttttaaagagaagtacacacgtattaagtaatgaggtggcaagatga

SEQ ID NO: 301648 - DNA, 210 bp, Proteus mirabilis; identical to SEQ ID NO: 297314

SEQ ID NO: 301649 - DNA, 558 bp, Proteus mirabilis; identical to SEQ ID NO: 301631

SEQ ID NO: 301650 - DNA, 558 bp, Proteus mirabilis; identical to SEQ ID NO: 25303

SEQ ID NO: 301651 - DNA, 462 bp, Proteus mirabilis; identical to SEQ ID NO: 298454

SEQ ID NO: 301652 - DNA, 984 bp, Proteus mirabilis
atggataataattcgctaaaaaatgcgagtttatttgataatgatcccgttctttatgctgcatggctttactatcaggacggactcagtcaaagtgaagttgcaaatattatgagcgtttctcgagtgactgttgtgaagtatttacatctcgcgagagaaaaaggtttcgttaatataagcttggattcatcagtattttctacgattgattattcaatcagaataaaagcaaaatttaatcttaataatgtgcttattttacctgatgaagaaaagaataaatcgcaacaaacatcaaatatgaatcgagaaagattagctaaagcaggggctatgtatctttctcagataatcagcaatgatgatattttaggcgtagcttggggaagaacaatccataaactagggcactatctccccactaaaacactagaaaatgtcactgtgttacaaatgattggggctgtagctccacaacctgattttactactgcggaatctgccgctttgatcgccaataagttttcaggttgcagtattaatttgcatgtgccggctgtagtgtcaaatgcgcgtttggcaatggagctacaagcagaacccataatacggcgtaatttctctgctttaaatcaatgtaataaagctttgtttgtagtgggtaatactcaagatgacaatcctttgattacaacaggcgtactcaccacaaatgagatggcacaatatcgcgatttaggtgctgttggtgtcatttgtggtcgattctatgatgcacaaggtaatcctctgctttctgatatcgaccttagaattatgggaattagtcttgcacagttaagacagatcccacagcgtatttttattgctggaggcgttgaaaatgttgctgcaaccataggcgcaataaaagggggatatgctacagatattgtcatcgatgaagtgacggcattagcattattggaattgagtatttaa

SEQ ID NO: 301653 - DNA, 1017 bp, Proteus mirabilis
atgtcatttttaaaaaaactaccgggaattctgttttgtgcactaattggtgggttattaacattatctggtctaccgatggcgttgatgtttgggccaatcgtcgtggttattattgcttatcgttttaaatggcagctctctgttcctaagcatacactgacttttatccaactgaccttaggcacctctgttggattgatgtttaaccaagtacatttagggagtgcggataatttagtgcttcttttgattatcctcgttatttgtttagccattcaatttgttgtcagtttcttatggtttcatcgtcatattggttggacaaaagaagaggctatgttaggtgctgtacctggcgcgatggcggctattcttgctttaacagatcataccaaaacaccaccacaaaaaattgttatttctcatactattcgtttaatcgtattgattattatggctggatttattgttggctcagataaagcaacccttacggagtttacattacctgaaatgacactgttgtcatcgatgtggttattattaattgtcgcgttagggctagtatctgggcttttattacagaaaattcattttccagcaccgtttatgttgacatcattaggcagtgcaatattggtacaatcttttgtcagtgagccgattgcttttccaatgctattaaatgaactcagtatggtgttaattgggatgaatattggcgcacattttgtggtttttccttttgcttcgttaattaaaaatgctttttcctctgtgcaggtggtcattatcaacgttattttaacggtgatcgttgcattgagcgcagcttatttaacaggggctccctggacaacgctggtattagcttgggcaccgggaagtatggaagcaatgacatttgccgcgatcactatgaatgtcgatgcggcttttgtgatgtcgaatcatatattgcgcatgttgtgtattatcttctggagtgggctgccatgcaatcatcggtgctaa

SEQ ID NO: 301654 - DNA, 558 bp, Proteus mirabilis; identical to SEQ ID NO: 301631

SEQ ID NO: 301655 - DNA, 621 bp, Proteus mirabilis
gtggtcacacaggtgctgggcagcaaatcggtccgcacctgcaccaatccggcggattgtcagagcggcggtgaggcggagcaaccgggcagttcccagccaggaaccgggctggcaccggtgctggagaccaccacccgggaaaatttggaacagctgcataaactggtgaacagccggggcgcggtcggggcggcagagttggcgaaactgaaaaccggcagcctgacggtctcccggggggtgattgaagcgctgcgccgggatccggataaaacggcattaacacagcgtctggccggtgagctggcgatggcggacacgatggagctggcgctgacgatgcgccggatgctgatcaccggccagggggagccgaatgccggtaattttccgaaagcccaggagatcggtaaccagtcggttgaccagctggatcgcgaaatcgggatgctgcaaacggaaatggaagtgcgtaaatccattgccaataacgcgatgctgacggtgattgagcgtgatcagcaacggacacaggcgaaccctgccacccagaccccagataatacggatgtgcgtgtacagggactggagcaaaacagtgacaccggaggacgttaa

SEQ ID NO: 301656 - DNA, 945 bp, Proteus mirabilis
gtgaataaacctcttttaatttcttctcatgatgctgcattcaaacgcttcatgatgaatattagtaatgctaaggatttcttttttatccatttatcagacgaattaaaaagctattgtgatttttcaactttaaagctacaaaattcctcttttatcgatattaaattacgttctcgtatgtcagatattctctactcagtgaaaaccaaaaaggggaatatctcaatttatttcttaattgagcaccaatctcgaccagataaaatgatcgcttggcgtatgatgcactatgcgttttgcactatgaatcagcatctacagcaaggttacacatctttgccgttggttgttcctatcttgttttatcatggcaaacgcaaaccttatcctttttctgtcaattggttagattgttttccgctttctacattggcaaatcaactctatcttaataattttgcattaattgatttgaattcaattgatgatgaaattttattaacacatagaaaagccgctgtaatggaaattgcaatgaaacatgtgaacagttgcgatgattttgataagttagcgatgcttctctcaaaagcgataaatcagaaaaactgcagtgatgaagatactatctctgttgtacaatatttattctcaattatggatgcggcggattttgaatccatcataaataagatagctgaacaagtagataaccatagagagacgattatgaatattgcatggcggttagaaaataaaggatttaaattaggaaaaatggaggggatagagataggtaaaaatgaaggtatagaaataggtaaaaagatagtacaaatacaattagcaaaaaacttattaaaagaaaacgttgagttagaatttattgaacgaataactggtttaagtatacaagaacttaaaatattgattttaacttaa

SEQ ID NO: 301657 - DNA, 390 bp, Proteus mirabilis
atggcatttgatgctgacggtaatgttttagatatcaaacaagctatttctgctgttcgtcgtattacgattgaatcaacacgctctgctgaacatgaaaatgctgattttagtgctaaacgctcagtgttagaaaatgttgaagcaagaagcaaagacattatgcctgctacattccagtttacttgtgctccttatgacgaattaaaagaacgtagcattaaattacgttatagcgtactcactggtgatgatattcccgttttagttcttcgaatcattcaacttgaaaaacttgaagaacaaatcgctcaagagtttcgagatatgctttgcaatgaattcaatgaaagcaaaatcgaaacattcattggtaaattttcagcgtaa

SEQ ID NO: 301658 - DNA, 597 bp, Proteus mirabilis; identical to SEQ ID NO: 297210

SEQ ID NO: 301659 - DNA, 171 bp, Proteus mirabilis
atgacggtcgttaatcatattacggtgacaggaaatggtgacgccgtacttgcgcaggcaatgaaggaagccgcacaacaagggacagaagccggtgcacagaaagctcacgcgatgatgttacaagactttcaaagtaatggcgcagcacgcagaacattaggagtttaa

SEQ ID NO: 301660 - DNA, 555 bp, Proteus mirabilis
atgaaactgagtaaaattgctttggctgcggctttagtatttggtattaattctgttgctacagctgaaaatgaaacgcctgcaccaaaagtaagttcaactaaaggcgaaattcaattaaaaggtgaaattgttaattcagcatgtggattagcagcatcttcaagccctgtaattgttgatttcagtgaaattccaacttctgcattagcaaatctgcaaaaagcaggaaatatcaaaaaagatattgaattacaagactgtgatacaactgtagcgaaaactgccacagttagctatacaccaagtgttgttaacgctgtaaataaagatttagcctcttttgtttctggtaacgcatctggcgcaggtattggcttaatggatgcgggtagtaaagcagttaaatggaatactgcaactacaccagtacaattaattaacggtgtatctaaaatcccattcgttgcttatgttcaagctgaatcagctgacgctaaagtaacgccaggtgaattccaagccgttatcaacttccaagttgattatcagtaa

SEQ ID NO: 301661 - DNA, 756 bp, Proteus mirabilis
atgctattaaaaaaaatatttttagtgtcttttttattccctacactctcttacgctaataccttaccaacatcaaatatagataattcactaactcccaaccatgataatcttgcccgtttttcactcggtgacaatagtcaagcatccggcagcggtgccactgctataggtatcaatagccaagccaccaatactcgttcggttgctattggttatgctgcattagccaatgaggaaaatacggtttcatttggtaatagtgaagagaaacaaacagcacgactcaccaatgtcagtgaaggtaaaaataatactgatgcagtcaatctggcacaaacaaaagcactacttagtaaaaataaaaggttaactgatagccaaataaatgtttttagaaatcaaactaataataacttaaacaccatcaaaaaaaccattcatgagtttgatgattattatcgaagacgacaagcatcaattaccgatgcaattgaagcactggataaaaaagttatttcattagaaaaaaaagtctatgcaggtattgcttcctcaattgccatgagcaatattccttatcttactcatcatacttttagtggtggcctcggtattagtaattatcgtactggcatagcacttgctggaggtatccaatatcagccaaataatgatatagcatttcgatttaactcatcaattaatagtgaacaagagcttatttttggcggcggattagcttatggctggtga

SEQ ID NO: 301662 - DNA, 816 bp, Proteus mirabilis
atggaaatgattttactgtttctgattgtgggatgtataactggattttttgccggattgttaggaattggtggtggagccattattgttcctattgtgatgtatgttgttagccaacaagctatccctgcagatatggtaatgaaaatcgccctctcaacctctttttctgtcattatattttctaccgcctcttctgcttattcgcataataaacataaagcgattttatggtcacaatttccgctcctcgctgtaggcactcttctcggtatgctagttgggacattcttagtacaaaaactctcaaataccctattgcaaattatcttttgtatttttatggcctataccatatatggattactgaccaagaaaaaagaagctgaacgtgttgagaatacccaagatccggttgtttcaaaaccagcactgacaaccggtggtagcttagtgggttttatttcgagttttattggtatagcaggtggcaccataacaataccgctattaagccactgggggtttaatacccgtaaatgtattgcaacatcatcaatgctgggtgtgattatcgccactattgggactgttatggggatcgtttatggttggcaacaaactgaattagcagactattatttaggttttgtctatctacctgcttttattggtattagtattaccagtatacttacagcccctatcggcgtaaaagttgcctataaactacctattgccagagtacgccaaatatttgccctattcttattaatcgtcatggctaaaatgttatataccctgatattgggatag

SEQ ID NO: 301663 - DNA, 714 bp, Proteus mirabilis
atggttatttgcaggattagagttttatggttggcaagaaaaaatacaataactgaaaagaattttaaaaccttcaaagagtataacaatattgaagattatgaaaaagaagcaaagcaagctgtttatgctgcaacaataagcaaaactctttttgaagaatgccaatgtctcataaccttaagaacaatgcttgaatccctacacactgattatgaaaaatatgaaaaagtaaatccgttattaatggagctattacgcaaaaaatttacttttacatactccgctttcattactatctatccagaacccatcgaagaaagcgggctagaacgatttagtttaattaatacaaaaaaatactgtccagaacatgtatggaaacatattctcaaatccgctatttataccaatgaagaattggatgactattttgggtcgcaggaattacccccactggagcggatgtgtacagatatggatttatataacgagtttaaaggcacggttttatttgatgaagtgatcgggtgctatgttgatgaagaaaacgaaggatctcaaatttttgataatgaggtttattctgttaccgaagaacagttacgccagtggctagatgaagagcttgcatttctgagttatgtcactgaaggtcttttgaatatttgtattgaatacataagaaaagagaatggaattataagggtttga

SEQ ID NO: 301664 - DNA, 423 bp, Proteus mirabilis
gtggggcgcatcaacaaaacgctgtatctgcttaattatattgatgatgaagattaccgccggcgcattctgacccagcttaatcggggagaaagtcgccatgccgttgccagagccatctgtcacggtcaaaaaggtgagataagaaaacgatataccgacggtcaggaagatcaactgggcacactggggctggtcactaacgccgtcgtgttatggaacactatttatatgcaggcagccctggatcatctccgggcgcagggtgaaacactgaatgatgaagatatcgcacgcctctccccgctttgccacggacatatcaatatgctcggccattattccttcacgctggcagaactggtgaccaaaggacatctgagaccattaaaagaggcgtcagaggcagaaaacgttgcttaa

SEQ ID NO: 301665 - DNA, 708 bp, Proteus mirabilis
atggtaaaaccaaaatgctacccatgcatctatatgaataagatgatagataagataaataagatgacagataagataaacagtacctatatgccttacaaacattataaaaatagcatagcaatattattcctcgcctctgccttgctacctagattttctgtggctgaatcactcactcatttacctcaaaaagatcgtatttcttattttgctcaagcggagaaaatggccatcactggtgtggcaattaaaaccaaacccgttttagccagacctgcaaaagaaggagaagtgatcaccacttacataaaaggtgaaggggttgaaactatttcggagccagccaaagcgggtgattgggttgtacaaaatatttgtccagcaacaggtaatgaagaaattctggtcagaaaagataaatttgctcagcgctataatctggctgatgcagacaaagcgaaaagcatcacaccgataaggcaaggctatcaagtttttatccctaaagggattgaaatgaattattttattgttccaaaacaaaccgctgagtttgcaatggaagcgccttggggagagctacaacgttttcaagccggtgatgcagttgtgcaatctaccaccgataaacaagatatttatcggatccaacaggccgcttttaaatgcacttatactattttaaaaaccgccaaagagatttga

SEQ ID NO: 301666 - DNA, 780 bp, Proteus mirabilis
gtgctggaaggccttctggaacaggagaccgggctgaatccaaccgaaattatgaccgatacggcaggtgccagcgatcttgtctttggccttttctggctgctgggataccagttttctccacgcctggctgatgccggtgcttcggttttctggcgaatggaccatgatgccgactatggcgtgctgaatgatattgccagagggcaatcagatccccgaaaaatagtccttcagtgggacgaaatgatccggaccgcaggctccctgaagctgggcaaagtacaggcctcagtgctggtccgttcattgctgaaaagtgaacgtccctccggactgactcaggcaatcattgaagtggggcgcatcaacaaaacgctgtatctgcttaattatattgatgatgaagattaccgccggcgcattctgacccagcttaatcggggagaaagccgtcatgcagttgccagagccatctgtcacggtcaaaaaggtgagataagaaaacgatataccgacggtcaggaagatcagttgggagctctggggctggtcactaacgccgtcgtgttatggaacactatttatatgcaggcagctctggatcatctccgggcgcagggtgaaacactgaatgatgaagatatcgcacgcctctccccgctttgccacggacatatcaatatgctcggccattattccttcacgctggcagaactggtgaccaaaggtcatctgagaccattaaaagaggcgtcagaggcagaaaacgttgcttaa

SEQ ID NO: 301667 - DNA, 363 bp, Proteus mirabilis
gtggcgattatttgttctgattataagatcagcaaacatttttattgtcaaatactggggcttaccctattaaatgaaaaataccgtgaagaaatacaatcttggaaagcagagcttgcgttaggtacagtctaccaaattgaattatttagcttcccagatgcgccagcacgcttaagttacccagaagctcgtggtctacgccatgtggcatttgcagtggacgatcttgatgcttcagttgcttatttacaacaaaacaatattcaatgtgagccaatacgtatagatcctagtagccaaaaacgttttaccttttttcaagatcccgatggcttacctttagagctttattcaatatag

SEQ ID NO: 301668 - DNA, 375 bp, Proteus mirabilis
atgaaaattcctactcctttagcactattatttgtgatggttttattcttcataattttattttcaccggctaaatcagtgccgttaaatgttaatgttgcattattattgccacaatctaatagtttaatttcaaaattactacctgtactgcttttggcattggcccaatctttatctaagactatttccgatttattaattgtaggcaaagtgataggagaactagggctatctatattgcaggatgttgatattactgttccactaaaattaataatattgttatttttcttttctgttgttttgctattatctgctaatacattcatgctagaagagataactaataatgcagatagtaatctgatatga

SEQ ID NO: 301669 - DNA, 558 bp, Proteus mirabilis
atgcgaatttttggttatgcgcgggtctcaaccagccagcagtccctcgatattcagatcagagcgctcaaagatgcaggggtaaaagctaaccgcatctttaccgacaaggcatccggcagttcaacagatcgggaagggctggatttgctgaggatgaaggtggaggaaggtgatgtcattctggtgaagaagctcgaccgtcttggccgcgacaccgccgacatgatccaactgataaaagagtttgatgctcagggcgtggcagtccggttcattgatgacgggatcagtaccgacggtgatatggggcaaatggtggtcaccatcctgtcggctgtggcacaggctgaacgccggaggatcctagaacgcacgaatgagggccgacaggaagcaaagctgaaaggaatcaaatttggccgcaggcgtaccgtggacaggaacgtcgtgctgacgcttcatcagaagggcactggtgcaacggaaattgctcatcagctcagtattgcccgctccacggtttataaaattcttgaagacgaaagggcctcgtga

SEQ ID NO: 301670 - DNA, 402 bp, Proteus mirabilis; identical to SEQ ID NO: 223637

SEQ ID NO: 301671 - DNA, 402 bp, Proteus mirabilis; identical to SEQ ID NO: 223637

SEQ ID NO: 301672 - DNA, 321 bp, Proteus mirabilis
atgaacatgaaaattaaaaaaatattaaataacagtgttgtgatctctctggatgaagcagaaaaagaaattatcgtcatgggaaaagggattgcctacgccaaaaaagtaggtgatgagataacatctgaacaaataaccaaaaaatttatcttaagccctaaaaattgtccgcagagagtgctcgatcttttatcgaatattacgttggattacgtagaaattgcggacaatattattcagtatgcaaaagaaaaaatgaccttagatacacctgtctcttatacacatctgacgctgccgacgaatagagaggtgtag

SEQ ID NO: 301673 - DNA, 621 bp, Proteus mirabilis
gtgggctcggagatgtgtataagagacagtaactataccgatacatcacatcaaataaattatggtatgagtggcagtattttagctcactcaggtggtataacacttagtcagcctatatatcaaacagcggtgttagtaaaagtacctgaagttaaaaatataaaattagaaaacaatagtggcattacgacagacagtaatggttatgcggttttaccttatgtttctgaatataaagaaaaccgtattgcattggataccaattcattctctaacaatattgaaatagataatgcggtgaaaagcgtagttcctactcgtggagccattagtgcgatcacatttgagcctagcgttgggataaaagcaattacgacattaacccataaagggaaaccagtacctttcggggctatcgttgattcaggtaataatactgggattgtggcagatgaaggaaaagtttatttaacagggttatcaccttcaggacaattaaaagtgaattggggtagtaagaaagagcaacaatgcttagtaaattacacattaccaccacaagatccagataaactttatgttgaatatagtgcagagtgccaccctattaaggaataa

SEQ ID NO: 301674 - DNA, 567 bp, Proteus mirabilis
atggttatttatttttatagagaatgggtaaaaatattattttttatgcttatttttttacctgttgcaaatgcggctacaacaatgaattttgatggtactttgattgatacgccatgtagaattgatcagccaagtttaaatcaaaatgtggtttttttaaatagcacaccaagggattattggaaatatcctgcggttagacctgcagaaaaatttaccattaaactgatccaatgtgatgcaaaatcgttatggaaatcagtgaaaattaaatttaatgggcagccagagccagagatgggggctgaacaacaaaagtaccttacactttcttctggcgttaataaaagtaagttagccattggattaattgatatagatggaaaccaacgtattactttaggtgaaaaccataacggtggaaatggaactcaacttaacgatggcacgatgttgctaacctttaatgcatttgttgaagcgacaccaaaagcaatacaggaaaaaagtgttgtacctggagtttataatgccacggtagaatttgaggtttcttatgaataa

SEQ ID NO: 301675 - DNA, 252 bp, Proteus mirabilis; identical to SEQ ID NO: 102417

SEQ ID NO: 301676 - DNA, 291 bp, Proteus mirabilis; identical to SEQ ID NO: 297184

SEQ ID NO: 301677 - DNA, 333 bp, Proteus mirabilis
atgatccaactgataaaggaatttgacgctcagggcgtggcagtccggtttattgacgacgggatcagtaccgacggtgatatggggcaaatggtggtcaccatcctgtcggctgtggcacaggctgaacgccggaggatcctagagcgcacgaatgagggccgacaggaagcaaagctgaaaggaatcaaatttggccgcaggcgtaccgtggacaggaacgtcgtgctgacgcttcatcagaagggcactggtgcaacggaaattgctcatcagctcagtattgcccgctccacggtttataaaattcttgaagacgaaagggcctcgtga

SEQ ID NO: 301678 - DNA, 333 bp, Proteus mirabilis
atgatccaactgataaaggaatttgacgctcagggtgtagcggttcggtttattgacgacgggatcagtaccgacggtgatatggggcaaatggtggtcaccatcctgtcggctgtggcacaggctgaacgccggaggatcctagagcgcacgaatgagggccgacaggaagcaaagctgaaaggaatcaaatttggccgcaggcgtaccgtggacaggaacgtcgtgctgacgcttcatcagaagggcactggtgcaacggaaattgctcatcagctcagtattgcccgctccacggtttataaaattcttgaagacgaaagggcctcgtga

SEQ ID NO: 301679 - DNA, 252 bp, Proteus mirabilis
atgacacagtcattacgagaatattgctattcaagtatttttatcattatcatcagtgggttattagtttggttatttgggcgtaacgctattcatgtcggtgcaagtgggtggatctttggattatggtcactgctaattgcccatgcttttactcgccataaaattatcgatatcgtcatcgccttatttgtgctgttttattacggctctatggcttatggattaatcctgtctcttatacacatctga

SEQ ID NO: 301680 - DNA, 333 bp, Proteus mirabilis
atgatccaactgataaaagagtttgatgctcagggtgtagcggttcggttcattgatgacgggatcagtaccgacggtgatatggggcaaatggtggtcaccatcctgtcggctgtggcacaggctgaacgccggaggatcctagaacgcacgaatgagggccgacaggaagcaaagctgaaaggaatcaaatttggccgcaggcgtaccgtggacaggaacgtcgtgctgacgcttcatcagaagggcactggtgcaacggaaattgctcatcagctcagtattgcccgctccacggtttataaaattcttgaagacgaaagggcctcgtga

SEQ ID NO: 301681 - DNA, 423 bp, Proteus mirabilis
gtggggcgcatcaacaaaacgctgtatctgcttaattatattgatgatgaagattaccgccggcgcattctgacccagcttaatcggggagaaagccgtcatgcagttgccagagccatctgtcacggtcaaaaaggtgagataagaaaacgatataccgacggtcaggaagatcagttgggagctctggggctggtcactaacgccgtcgtgttatggaacactatttatatgcaggcagctctggatcatctccgggcgcagggtgaaacactgaatgatgaagatatcgcacgcctctccccgctttgccacggacatatcaatatgctcggccattattccttcacgctggcagaactggtgaccaaaggtcatctgagaccattaaaagaggcgtcagaggcagaaaacgttgcttaa

SEQ ID NO: 301682 - DNA, 153 bp, Proteus mirabilis
atggcacaagtggcacatcttctcgcgatgataaatcgtgatccgaaatctaccccacctcaattaactgactttatgccaatgtggcagaaaaagcccacagaagctgaagagtgggatagtgttactgagagtgtattggctcatcgatag

SEQ ID NO: 301683 - DNA, 252 bp, Proteus mirabilis; identical to SEQ ID NO: 102417

SEQ ID NO: 301684 - DNA, 252 bp, Proteus mirabilis; identical to SEQ ID NO: 30842

SEQ ID NO: 301685 - DNA, 252 bp, Proteus mirabilis; identical to SEQ ID NO: 30842

SEQ ID NO: 301686 - DNA, 213 bp, Proteus mirabilis; identical to SEQ ID NO: 297906

SEQ ID NO: 301687 - DNA, 252 bp, Proteus mirabilis; identical to SEQ ID NO: 30842

SEQ ID NO: 301688 - DNA, 294 bp, Proteus mirabilis; identical to SEQ ID NO: 297475

SEQ ID NO: 301689 - DNA, 246 bp, Proteus mirabilis; identical to SEQ ID NO: 299394

SEQ ID NO: 301690 - DNA, 249 bp, Proteus mirabilis
gtgatttctggatggcagaaaaaggtagaaaattatcttctagaagcacaaaaatataagtttatatctaaaaacattgattgtagacaaatggctatttttttctggatgggttggcaaggagcaataatgcaagcaaaactaacccgctctaatcagccactagatatatttatctctatttttatggcgcaggtgtttgatattcctcaacatgaactagaaattactaaaaatagaataatttaa

SEQ ID NO: 301691 - DNA, 195 bp, Proteus mirabilis
atgaacttatgtaatgtgaatgtgactgatggtattatatctattattccttatgatcacttacgattggatcattggattggtaaaagtatgcctaacaatgcaattattacattaaaaaccaattgtagtgacgaggttttaggtgcttcaataaaaaaagcttttacacgttgtattaactgtaaagtttaa

SEQ ID NO: 301692 - DNA, 339 bp, Proteus mirabilis
atgacgaaaggaaaaaccgggcgccggttatggccggtgctgaaagtaaccgggctgaccctgctcagtatggtggtgttgctggcggtggctcagctggggctgagttattacggtgaggcggacagtctgcgccgggcgttttaccgtgcccgctggttctggctggtctggctgtgtgtgttgtacggagccgtggcggttggattatggaaactgtatcaccacccgaaagtcagtgagacggcccggcgcagtctgaagcgcagcgggctggcgatggccgcctttgtggcggtgagtgaatggtcagtctgggcgggaggtgacggcttatga

SEQ ID NO: 301693 - DNA, 2373 bp, Proteus mirabilis
gtgaaatttaatcatcatgtattatttgtctcttctgtggggttaaaagaagataaccccgcaaaacaggcattaaattcattgaagcaagcaatcatagagcgtggttttattgctcagattgcagataatattgaacacggtattaaatatataaaagagagtcctaagtatagtgccgtaggtattttttgggataaaaataattccaaaatgaatatagagggtgaggcctttctctcattatttagaaaaagaaatcctaacacacctatacttctcctttctgaagagaatattaccgatgatgtttctatcgatattcttaaagaggtaagtgagtatatttacctttattcagaaaccgcaacatttaccgctaatcgtatttataccttaatccatcgttatgcagaaagtcttttacccccctattttaaaacactaaaagatttcactgaagatggtgattattattgggattgccctgggcatatgggcggtatggcttatttaaaacatcctatcggtatcgagttcattaatttttttggtgaaaatatgatgcgggctgatatcggtgtcgcgactgctgaaatgggggattaccttattcatgcagggccttcaaaaacatccgaagaaatggccgcagagttatttggtgctgactggacattttatggcgtatcaggctcatcgggttctaatcgtattgtggcgcaaggggccatagccgctaatgaaattgttgttgtagatagaaattgtcataaatcactgaatcatgggttgactctttcacaaggtcgtcctgtgtatttaaaaccgacacgtaatggttacggcttaattggccctattccaactcgacgactcacacaggcaagcattcgcactctgatccaagaaagtccgttaacagaagaagctgttagctcggaaccgacttatgcggtagtcactaactgtacttatgatggcttctgctacaacgttaatgatgttgtgaaaaatttagccaagagtgtacctcgaattcattttgatgaggcatggtatgcttatgcgcgctttcatcccctctataaaaatcgttttgcgatggacgtgtctgaggatataccggatcgtcctacgctttttgctgtgcaatcaacacataaaatgttgccatcactctctatggcatcaatgatccacgtgaaaaaaagcgcacgcgcccctttgaattttgatgactttaatgacgcttttatgatgcacggtactacgtcaccttattaccccattattgcttctattgatgttgcggtagggatgatgaaaggggaatcgggccaatctctagttcaggagtctatagaggaagcgattgcatttcgcaaagcagtggtagcagtaaaacgtcaattaaaagagcaaaatggtgatcctgattggttctttgatgtactacaaccaactcaagtttgtgatcctaacacgaaagaaaattacagttttgaacaagcaccattatctttattaagccaagagcctgaatgttggacattaaaagtcggagataaatggcatggtttttcagatgaagatattgccgacactgacagtatgttagatcccgttaaagtgacgataacttgtcctggcattaccgctgatgggcagtatcaaaaaatgggtattcccggttatatcatgactaaattcttggatgatcgtcgtattgaaatcgccagaaccggagactatacccttttaatcctcttctctgttggggtgactaaaggtaaatggggaacgttattagaaagtttactgacttttaaaaagctctatgattcggatgcgttagcggtagaagctattccttcactaaaagaaatctcccctcaatatgccaaaataaccttaaaacagctttgccaatctatgcatgaaaagatggatgagcttgatttaatgaaacatattaatgatgccgtaaatagcgttcctgagcccgtgatgtcaccggctgatgcttatcaaaaggttgttcgttataaaacagaacacgtacatttagatgatttttcaggtcgtatttctgccagcatgttagttccttatccaccgggaattccagttttgatgccaggtgaacgcttacctaaaggggatgaaggcgttattggttaccttaaagccctacaaaattttgacaatacattccccggttttgagcatgaaattcaagggatcaatgttgatgcaaacggagatttttgggtaagagccattgttgaagacgaacgagtcgcaaaagaattgcctgcatctgtgaaatttaaacgccgtgtttcagcaattaaaaaaggccgtcagtaa

SEQ ID NO: 301694 - DNA, 1512 bp, Proteus mirabilis
atggcaaacaaatcagaaactgcatcgtcaaagagccccacatcagcgaccggtgatagtggtgcaaaattgggtttatttgctctgatcgcaattgtagttggctctatgttaggtggtggcgtgtttagcttgccacaaaatacagcggcaagttcagccatcgggccggttttaattgcgtgggtgattgcaggtatcggcatttactttattgctaatgcgtttcgcttattatctgatttacgacctgatcttcaagctggtgtgtatatgtacgcacaagaaggttttggatcttttattggatttaatgtggcctggggatattggttaatgactgcatttggtaatgtggcatttgccgttattctaatggatgcttttgatcagtttttccccggtgtctttacagatggcaataatttaaattcaattatctgtggctctattttaatttggggttataactttttagtcttgtcaggaacgaaagttgcaggttttgttaatacacttggtactattgctaaattagtaccattgattttatttgtgattatccttggtgtacttattgattattatcagttatttagtaatttttgggggacatctcctcaaattatgaatacggtggataataaggcggaacctgtatcattaatgtcacaaatattagctccgatgacagtaacattatggtcatttattggtgttgaaggagccgttgttttatctggacgggcaaaaaataaaaaagatgttggtaaggcaaccttattaggatttctattggcattaattatttatattttattatccgtcctaccatttggtgttatgccacaaagtcaattagcgcaattaagtaacccctcgacggcaggtgtattggctaaagttgttggaaattggggtgattggttaatgaatgtagggttgattatttctgtattagcgggatggcttgcttggacaatgctatgcgcagaaattccgatggttgccgggcaaaaaggcgcgtttcctaaagcttttgctcgtactaataaaaatcaagccgccaatacctcactctgggtcagtagtattgtcatgcaagccgcgatgctattagtctatttttctaataatgcatggaataccatgtataacatcagtgcattaatggttgttccagcttacgtcacgacaaccttatatatcacaaaaatttgtcttaatcgtcaatattaccaatatgccaaaacaggtcgtggtttagcattgttcagtggtgtacttggcgttattttttgcttatttattttatatgcgagccaaattcagtatgttgcattaattcctattttattaacatgcggattacccgtttttatttggtcacgtaaagagaaacacgataataaacctatctttcagaaaaaagagacactctatttagtgattttattattacttgatgtgttggtattagctttattgatgaaaggtattattacgctttga

SEQ ID NO: 301695 - DNA, 552 bp, Proteus mirabilis
atgggacgccaaagaacgattgatagagaaaagttacttgaggctatttttgacatcgtgatggagcaaggggctgccgctctgactatcgatacggtggccaaaaaaatggggatttccaaaggtggtgtccaatattgttttaatagtaaagaagcgatgattgatgccatgtttgaacattgggaaggaggatatgaagcgcgatttaatcaggtggttgccaatgataactcagccaataatcgcgttagagcacatattcatgcaactcatgatcacgataagctctcttttgccaaaggagccagcttaatggctgcgttactgcaaacgccagaatatttgcaaagtactaaagcgtggtatcagcaaagattagcgggtgtcgataccacaacagtagagggaaaacgggcgagactggcttttttagccaccgagggggctttcttgctacgttattttggtttaatggatattgatgataatgagtgggaagagatttttagcgatatcgattctgaactcattaatgccgaaactaaatga

SEQ ID NO: 301696 - DNA, 468 bp, Proteus mirabilis
atgaaaaagtatgacttgatattgtgcgatccaccttggtcttacaataacaaagtttcaaatggcgcagcagataatcattacaacaccaccgatttatattccctctctcgattaccaatagaaaaacactcctctaaaaatgccgtactgtttatgtggtactccggaaactttgcactcgaagcaattaaattagccgaagcatgggattttaaagttaaaaacatgttcgggttcgcatgggtgaaattaaataaaaatgcagaagatagaataaataaaaaaccaccagaagatttctttgactttatggaaatattaaacaatgagacgaagattaattgcggtaattacactcgtcaaaatattgaaatgtgtttaatagccacaagaggtaatggattacctcgtcaatctgcaagtgttcgacaagttatttatttgtgcttagatgaacacagctaa

SEQ ID NO: 301697 - DNA, 378 bp, Proteus mirabilis
atgaataaatacaccgaactatctgatttcgagattaataaaagggttgctattttcattggcttttcgtgctattacggtgacggaagctatacaaatggcttgggctctcgcgctacaatcgtgaaaggtaaaaataaccatggtaatttcaggttgggagagttcgacccatgcaacaactcagccgatgcaatgccgattattattggaaatttgatatcgttaatggcagatatgtcagaggatagagggtcagcttggtggtgtgcaagtgatatttcaaatggaatcacatcgagatataaatcgaacccactgcgcgcagctatggaagttttcttgatggtaaaggatgcggagaatgaaaaagtatga

SEQ ID NO: 301698 - DNA, 177 bp, Proteus mirabilis
atgaaagataaatattatgctggcttagaaaattacaaagattgcattgagattgaacctacaacaaaggattgttttattttaaatactccatcttggaatatggacgttacaaaacaagacttaattgatatcaaaaatactattaatgaaatactagaggctgataatgaataa

SEQ ID NO: 301699 - DNA, 651 bp, Proteus mirabilis
atgtctgataaaggtgagaattgtttaactttcgtactaacatggtcatttataattatattatttaccactgtttttcttctaggtttttcttttatttattactcacaaataagcctagatagtaaaatatcatcattttttagctttacatctacatttggtatagttgccacaattactgtttattttttacaaaaaaaacactcaatagagttagaaaataaaaaaaatgaaagaatcgattcatcgatatcaaaaatattattaatggaatgccaaagaattggttatgacgtagagtttatgcaaaaatcatacatgtttttatcacaaaaaaaacccgataatccagaagtgaaaaaggatgggatatactactacataatgactggatttggtgaacaaaaaaggtgtataagatatttttatagaatggatacatcaaaacttatggaagcattaaggctagctgtaaacaataatagcaaatacttcgatactatctaccaatttattgatgatgttgatatggtaaataataacttagataactggttatttgatgttaaatttatatatcaagaaaataatatttataatatgagtttaagcaatctttatagaataataaatgaaatttaccattaa

SEQ ID NO: 301700 - DNA, 285 bp, Proteus mirabilis
atggcagtagttcaattttatacaacaagaagcaaagacgaagacccatcacaaattactaataacctcagatatgaaataccagatgatcataatttcagttctgatgatgacgactttcaattttgtattgaagcatgtgcagaatattatcacgctgattgtgacggattcgaggatcgatggccgttgttattcatgttatggattgatgaccaatatcttggcacgtttgaagttgagcgtgagtttgacccagtattctcagcaaataaggtggaatga

SEQ ID NO: 301701 - DNA, 177 bp, Proteus mirabilis
atgaacgcaaagcagaaacacataaaacatcagatattcgcactattgcgagagtctgaaatgacaaatgagcaaatcgacgacttagtttttcaatggaaaatgaaagtgtctatggaacgcacaaacctcattcagcatgaaatcaacacacgcaaggagcgcgcgtttatctaa

SEQ ID NO: 301702 - DNA, 183 bp, Proteus mirabilis
atgaatattgataaacacaaactttgcatagctcaacagcaagcatggcgcgctctttatctcaaggatgaggatagatggtgcgaagcaaacgaaacattaaaaacagcatacggagtacagcatgaacgcaaagcagaaacacataaaacatcagatattcgcactattgcgagagtctga

SEQ ID NO: 301703 - DNA, 216 bp, Proteus mirabilis
atggaagataaaacaggtggagcggcttttccagttccagcaacagagttacatggcactaccacaggcatgagtttgcgtgattatctagccgctaaggctatgcaaccaatgattgcatatttcggtgagcaggcatttagcgattattctatgaatgaaatttctgaggaagcctaccgcatggcagatgcaatgttaaaggctagggggtga

SEQ ID NO: 301704 - DNA, 273 bp, Proteus mirabilis
atggcaacaataatttttaaagagaactcaaaaattcgcagacgcagaaagcaaggtgagtttttggctcgaaagatagctatgagaagtcgctcagtggaagaaatttgggattcgatatttggcgttgagaagaaagaacgccctgttctctctctcaaaccaacaaagcattatccaagtggagataactgttgcttacctaatgtagcagtattttcaggagttaaaacaaaacagccgaacagtgagttcggtgttacggcgagataa

SEQ ID NO: 301705 - DNA, 306 bp, Proteus mirabilis
atgaaaaatataattttattactaattactgtttcttcaatatctgcccatgctactaataagattgatatcactaatgaagatgacttcaaattgataactacaatcatgaaagcatctgagtgcaacgcttactcttctttatataaatttcagcaagaaaataatgtgccaaatgggaatgagtttatagataagttcatgagcaatgaggcaaaaaagaaaaacagcaccttaattgatatgaccaacgattgccagaaagcactactggatttcgcagaaataacatcaagtaaaaactag

SEQ ID NO: 301706 - DNA, 381 bp, Proteus mirabilis
atggaatacggaaacacatgcaaaacagttcgtgacaaacgagctattgaatttagaacacgccacttagtaagtagcgcacttcaaatattacgtgatggtgatcagcgagaaattgcacaagccacatcacgttcagactcgactatctcaagaagaatccaatctattgatggtgtatgcgaaatgcttgccacacgtcgtgtaattggttttgtgagggaaggcgagaaggttatcagggaatcagattatagattgtatctggaaaatatggctgagctatcgaggttaaaacttcaagttcatgcatatgaaaaagcctcaattgcgggaacaactgaggcctttagagaagaacaattaggtctgttcaactaa

SEQ ID NO: 301707 - DNA, 177 bp, Proteus mirabilis
atgaagaaaaaggttaatcattggtttaatcgtcacgaagtgcataaaaacatcatgcgagataagacgttacgagaagtgacaccattaggaggtaaacgtctaaaggaagcattcgaagatgcaaaattgagaaatgagcatcgtgagaaattactaggaggatcgcatgagtaa

SEQ ID NO: 301708 - DNA, 213 bp, Proteus mirabilis
atgatgaagtgggcgaaatttaaaggtaacgagattacctatttagttagatggacagttttaattgtattcatgctcccaataagcatagtttactttctactttttctaattgatatgccgatccactttgccagaaaacacgtacgacaaattttattttcattaattgactacatcgaaaataaactccctttcagaaaggataagtag

SEQ ID NO: 301709 - DNA, 255 bp, Proteus mirabilis
atgaacgaactcaagaaatgcccattttgtggcagtaaagttaaatggtgtggcgagaacgagcctaacccagaagataaccacctttgtgatcatatcgaatgtactaatgctgattgtggcgctgatttctcttttacccacaataacgatatttaccccgataattctgatgacatgacgccagaagaattaatgcaaattgaccgtgattattcagcgcaaaggtttaacaggagagctaacagtgagtga

SEQ ID NO: 301710 - DNA, 144 bp, Proteus mirabilis
atgactaagagaaataacgcattagagagcatgaagaagtggatggatgccattcctcaatgtttacagctacaaggtaagcaaattgacaacgaagaacccaaagagaagccagcagccaagaagcggagggcgagaaagtga

SEQ ID NO: 301711 - DNA, 453 bp, Proteus mirabilis
atgaatctaggcgaaacaatagtgtccgtgggcgttattctggcaatgatcatcactattgggtggcagagcggcagaattgataagctgaaagattcaaatgctgaactaaccactcaattatcacaacaagtcgaaatcaacaaagactatcaagcccgtatcactcgactaaatcaactcgatattaaatacactcaggagttagccagtgcaaagaatgaaattgtcactcttcgtgatgctgttaactctggtaataagcgggtgtacatcaaagccgagtgtccagaaagcaccaccacttccaccgccagcatggatgatgcaaccaccgcccgacctactgacaccgctatcagaaattattggttactcagagagcgaattgcagagtcagagcaaatgatattaggtctacaagattacattaggcaggagtgtttacgatga

SEQ ID NO: 301712 - DNA, 192 bp, Proteus mirabilis
atgcaaccacatcaacaacgagtagtggatgagaaatcagagttagacggcaaaataacaaagctaacggcatttattggtggagatatctttaaatctttagagcaccgcgatcaggagttattgggtcagcagttaggtcatatgcgtagttattctgaaacactttctctgcgcattgaacgtttttaa

SEQ ID NO: 301713 - DNA, 450 bp, Proteus mirabilis
gtgatatatccatggcccgtattttcggacggcgaaaaattagtatccggacaaaaaattacctctattaaaaatagaatcctgagtaatgatgtttatatcgaattacttaatgtgcctgaattggtttacgtcacatttgaatttcttaagcgcacacaattacaggttggttggttttattttagagatgaatctggtcaagacttcgcaattccagaaagtgaattcttggctaagttcaaacctgttgcgggtggtaatggcgccaaaggagataagggcgataaaggtgattctggtaaagatggtattaatggtaaaaacggagttgatggcgtgggtatcaaaactatcactgcgtcacaggaaggcggtgttgttactttaaccattgaaatgaccgacggaacacaacaaacgcctagcttcacattaccatcagcttag

SEQ ID NO: 301714 - DNA, 492 bp, Proteus mirabilis
atggccgcaccaaaaggaaatagattctgggaggctagaagtagtcacggaagaaaacccatattcgagtctcctgatgatttatggaacgcttgttgtgaatacttcgagtgggtagagcagaacccgctgtatgaaacgaaggcatttgcatttcaaggagtggtgaccaaagagactctacctaaaatgcgagccatgacgttatcagggctttgcttgttcttggatatacatgaggacacatggcgactatatcgcgctaaggaagattttatcgaggtcactacgcgagctgagaaagttatctacgatcagaaattctcaggcgcagccgctgacttgctgaatgcaaatattattgctcgtgatttaggtctcaaagacagacaagaggtcgaggatgtaactccagataagggagaccgtgacaagcgacgctctcgaattaaggagttattcaaccgtggaaaatctggatcagatacttga

SEQ ID NO: 301715 - DNA, 1497 bp, Proteus mirabilis
gtggaaaatctggatcagatacttgataacctgagcgacgacgaacaatacgaattgcttgagttattggaagaagaggaagagtacaggaaaacgcaccgcttatttgaatactctccctatgacaagcaaagagaatttattgaggcaggtggtaattatttcgagcgttgctttatggctggtaaccaattgggtaagtcatatacaggtggtgccgaggttgcatttcacttaaccggaagatatccaggcactaaaggttaccctgaagatggtgcttggaaaggagagtggaaaggtaagcggtttcttgagcctaatgtgtggtgggttggcggtgaaaccaacgaaacagtaaccaaaacaactcagcgtatcttgtgtgggcgtgtggaggaaactggggagataggttacggttcaattccaaaagaggatgttattagctggaagaaatcaccgttttacccaaatcttgtagatcacatacttatccgacaccgcaatgctgaaggcgtggaagatgggatgtcaatctgctacttcaaaccttactcgcaagggcgcgctagatggcagggtgacacaatacatggcgtgtggttcgatgaggagccaccatattccatttacgctgaaggactcacccgcaccaacaaatacggtcagttttcaattctaacattcacccccttaatggggatgtctacggtagtagaaaagtttctcaagaacccatctaaagctcagaaagtagtcaacatgactatctatgatgctgatcactacaccgaggaagagaaagaacggattgttgcttcatatcctgaacatgaaagagaggctcgtgctcgtggtattccaacaatgggtagtggtcgaatttaccaaatacctgaagagtctattaagtgccatcctttcgaatgtcctgaacatttttacgttatcgatggtcaggatttcggctggaatcacccacaggctcatatccagttgtggtgggataaagatgaggatgttttttatcttgctagagtgtggaaaaagtcggaaaacacagcagttcaagcgtggggtgctgttaagtcatgggctaataaagttcctgtagcatggcctcatgatggtcatcagcacgagaaaggcggtggtgagcaactaaaaactcagtatgcggatgctggcttcttaatgctgaaggagcacgcaacatttgcagagggtggcaactcagtagagtccggtattaatgaattacgtgatctgatgcttgataacagatttagagtatttaatacctgtgagccattctttgaagagttcagactatatcaccgtgacgaaaacgggaagatagtcaaaacaaacgatgatgtgcttgatgctgttcgctatgcctacatgatgaggcgcttcgctaagcagttgcgtgatatcaaaaagcctaaagaaaagagaattcccgccccaattagacctattaggagatag

SEQ ID NO: 301716 - DNA, 201 bp, Proteus mirabilis
atgctcgttaaaaagcaattgccatcctttccggccacttatattcaggcgggtagtttccgtatcgataaggataaagaaggatacgccagtcaaatctttattgatggtgaagcatttaacttggctgatggcgagttggtgcatttactgactgataatggggtaattattgattcaacaatgggggtaaaaaaatga

SEQ ID NO: 301717 - DNA, 312 bp, Proteus mirabilis
atgaacgcaataagaagacaaaacacttactatctgatagtagttattttatcactggtggcatattttgtatttgatgttagtttttgggattattcttggcctataaaaattggcattttatcattttttttctcagcatattcaatctttgttgtgcaaccaactttctttgaaatgtttaaaagcaaagatgatgaaattgaaaagcttagattggagttgcttgatactagagatgagattagacaattgaagtgggaaattgaaagtataaatatggatataaatgtgaataaagaaggatattaa

SEQ ID NO: 301718 - DNA, 1731 bp, Proteus mirabilis
atgtcagatattatccctaatgtcgtcgtgtcaatgccatcacaaatattcactctcgcaaggaaattccaagcggcgagtaatggtaggatttttattggtaaaattgataccgatccaacattaccagaaaaccaaattcaggtttatttagaaaatgaagatggttctcatattccagtttcacaacctttaattatcaatcaagctggatttcctgtttataacggtcagattgctaagtttgtgactgtggaaggtcatagtatggctgtgtatgacagctatggggcgcaacatcattattatcctaatgtgttgaagtatgaccctgatcagtttgctctatgggcaaaagataattttacaaataaaaacgaaagaatatttttaaataaaaacaataaattatcactttctgattatccttcagtattggattatgatttcatttaccctaatgacgagacgaaagatagcactcagggttttttaaacgcattaaatgatgattccatcactgatatttgggtacctaaaggtctttatagagttgacgaaaaaattgtcacacaagctggtaaaagaataagattcgcaaagggtgcaaggttaatacgtttatctaaatatagcgataatactgatcctgtttttattttaagaggcagttattctgagagctatggaggtgaatttataactgaaaacgatcatccacatggtgttgttagacttggtcaccaggatagtaatgataataaaaatgctctatggtggcgatttgagaacccttttattaaaggggtacaaagagaaggtaatattggtatagatattactaatgcgcaagttaacataggtactagctcagcaaattattttggttacgttagtaatccaattattcacggttctgatgaggggatagttcttaatgagattgctaatgctcacacaattatttcacctcaactgtatcgctgtgtaacatccggcatatcttattatggcgcttacgctaaccatgttataggtggatttttacatcaaagtcaaaatggtgttattggcataaatctgagaaacaagcgtatagaatcagcacatcactcatcaaacaatcaagttgatgggtttggtattgagccaggaggtagtttatcaaaagcaatatatatagacagtgagtgtactagaaatagaattaatgtgatggggaatgttgctggtggtgtagtaattttaaataaaaaaaacgactacaatacattatttgcaaactcaacgaacgaacaaaatgtaaataatttacacataaaagataaagttagatctataaatactcagactgaatttaacaaaaagaataatattacagagaataccagcattgatttttttaaaataacattaccttccaatggctcagggtatttaattaactgcaatttaacagcaaggaatccatcaatagataacgtatatccagcaatggctgttatatcagcaatgaatagaagtcaactgaaagctgcttatgtaagagaagaaaaaccaacaggaagatgtggtgaagtttattatcgcgttgatggcaatgtgctaattataggaggtaaaagctacaataatggtacgtctactgtatttattaactttagtatgtctataactattgagtccagcgaagatggaatgtctggagtcactatcgataaagtattgtaa

SEQ ID NO: 301719 - DNA, 891 bp, Proteus mirabilis
atggagccaatcacccgcttaatcgatcgcatgttatcttttgcattacttgatcctcgaattgaggctgtggtattaacaggctcagtgggtcgtaataagaagatagacagctattctgatattgatatagagcttattggtcacggtgcgactgagctagcaaaaaaccaacattggctatcacaatttggtaaacacctcgtctctttagcaacagaatgtgaagatccgaacggcattcgctggccaatctatttgcacgtattagctcaaggccgaaaaatggatattttgatggcagagcctgaaagaattatcaatatgaaacaaaatggtctaagtccagtttatcaacgaggctatcgtgttttacttgataaaacaggtttatgtgaccaacttccagaaattagcactgtaactcccccagccctttccatagagcaagctgatgccttggctcaagagttttggtttgaagccacacaaatcgctatagctatcttacgtaatgaattttggttcgctgaatatcgtatgagtgatataagggaatggttgatccgtttactagagcaagttgctctgcaaacatcaatacaagatgtctggtaccaaggcaaaaacttacgggagtggttacctaagttttattcattacgttcattagaaagcacactggccatgagtaccccttatgaagcagcggctgcattaagtattatcatggctttttttattgatgcatcaaagcgttttggtttgtcgatagaaaaggcaacacaagcacaaatactcattagcgattggtttattgataatgaactattaactgaaaatgaatattaccaaataaccacttccattatttgtcattatccaacttaa

SEQ ID NO: 301720 - DNA, 219 bp, Proteus mirabilis
atgatgatttgtcctgtttgtggtcatgccgcccatacccgtagtagtcaacaaatatcttccgataccaaagaacgttataaccagtgccagaatatcaattgtggcgcgacgttcgtcagccatgaaaccgtaacgcggtttatttcaaagcctcagttgattgaacgagtagagccacatcttgataagtgttgccaacaggcattagcgatttga

SEQ ID NO: 301721 - DNA, 525 bp, Proteus mirabilis
atgagttatagtgaaatattttcaggggcaagccttatagtatcaattatttcattttttctagcattgtgtagttattgtattgctaagaagtcattaaatataaataaacaacaacatgatgaacgatacttagaagttgatctatattatatagaagcatataaatgggaaaaagatgaaaaaaaatatgtttctttcgcattacgttttacaaataacagtactttatctactacaatacccaaaatagaattacatatcgaatatcatgatgaaaataatttagtaggtaaaataaaacttaaacctgaaggacagatcgcaccaattaatttgaaagactactcagaagttataaccatccctgtaaatttgccagataaaacagctaaaataggatggattacatttaaattacccacattacaagaaaaacaaattatagatatatatcaagtagttgcggaaactattgataataaaaatatttcaatagatacacatattattaatgaggtataa

SEQ ID NO: 301722 - DNA, 558 bp, Proteus mirabilis
gtgaagaataaagcttatatttatcaggaagattatttagatatagttggagatggtgtaataggcacctcaaaaacagcagatggaagactaattcctgttttaattttagatacaagagaaaaaaaagatttagaaaatcttgttaaaattcacgagcaaattagcgttggtgaggttacttctgtgtggggatataagcgatttaaccataaatttgtaactttagtgttacaattcaaagcccctgtagaattaaaaatagcaatattattcaatgtaattaagcattcatctttaattgatggaataatgatttcaagagctgtttatatacagcctggaagccctggagatactgttagtgataatatatatgcacctaaaatagttgtcgaaattccagcgagaactacatttgaaaaatgggactctattttaaaaaaagcggtaacaaaaaaattaaaaaaagaaggtgttggtaaaaaagcattaaaatcagcaactgaagaatatatctcaataagaagagatatttggggtaaaagattaaagtga

SEQ ID NO: 301723 - DNA, 165 bp, Proteus mirabilis
atgagtaattttaatataggtgatgtcgttgttttgaaatctggtggtccaaaaatgactgtttctgaggttcgtaacgacaattatgttacatgtgtttggtttgaagataagcaaacacatacacaagcatttgtttctgaaactctagaaaaagaggattaa

SEQ ID NO: 301724 - DNA, 450 bp, Proteus mirabilis
ttgctgttatgtggcttgcagtggggtattaatatgtatttttttagtgaaaagacaaactcattttattatgaagatatgaaggatgcttatattgcagcgggtacattgcctgatgatattgttttagttagtgatgatatttttgaaaaatacacacaatcaccacctcaaggtaaggttaggggtataaagaaaggcatgccagcgtggattgattctccaccgttaactcaatatgaattattcaatattgcagaacaacaaaaaattaagttaattagtgaggcatctattatcattgagccaatggtggatgctaaaaatggtggttatatcgaaaaagaagatataaaaagattggatctgtggcagcgttatcgatatgcgttaacaaaagtcgacatatcattaacccctaatatcgaatggccccaaaaaccagaataa

SEQ ID NO: 301725 - DNA, 1587 bp, Proteus mirabilis
atgagcgctaaatttttcgccttattaacggtgattggtgccaataaactggcaaaagccacggcattaggtaccaccttaaaaattacccaaatggctgtgggtgacggtggcggaacgttgccgacacccgatacacaacaaactaaactcgtcggcgaaaaacgtcgcgcgggattaaataccttatttgttgatccaaaaaacgacagccagattattgctgaacaagtgatccctgaaaatgagggcggttactggatacgtgagattggtttatttgatgatgagggcagtttaattgccgtgggtaattgccctgaaacctataagccacaattgcaagagggaagcggacgaacgcagactatccgcatgattttaaccgttagccataccgagtccgttgagttaaaggttgacccctcggtgatattggcgacccgtgaatttgtcaatgatgccattgagagtgcatcaaaacagacattggaggaagtcgctaagctttatgccaccaaagccgaattaagcacgggattaagtaaggtacaaaaatcagcggatgccgctaacacgaacgccaatagtcgcgtacctaacactcgcaaagtaaacaataaaccattgagtaccgatattaccttaacggcgagtgatgtaggcgctgcaacaccggcacaggtgaatgaagccaagacagccgcatctaatgcacaggccacagcaaacagtggtgtgaacaaagcggatgccgcacagaaaaccgctaacgatgcagtaagcaaagctaacgccgcgcaaactgccgcaaataatgccaatactaatgctaatggtcgtgtacctagcacccgtaaaattaacaacaaaccattaagcgctgatattagtttaactgccggtgatgtaggtgctgcaacaccggcgcaagtgaatgaagccaagaccgccgcatctaatgcacaggccacagcaaacagtggtgtgagcaaagcggatgccgcacagaaaaccgctaatgatgctgtaagtaaagccagcgcagcacaaacctccgcaaataatgccaacactaatgctaatgggcgagtgcctaacacgcgtaaagtgaatggcaagccattgagcggagatattagtttaaatgcgagtgatgtaggggctgcaacaccggcacaagtgaatgaggccaagactgccgcaaacaatgctaacaataatgccaatgggcgggtgcctaacacgcgtaaagtaaatggtaagccactaagtgctgatattcgtttaacggcgagtgatgtaggggcgggggctaaaaatactgcaagtaaagctgaaaatggttggtggaaatgtggtgatacaggaattatttatcaatgggggaaaaagacaattacctataatgattattttattaatttcccgattgcgtttcctaataaattgttatcatttcatgccattgattatgatggagcaaataatccagggcttaaattaagcaaatcaaatttatctaaagcagcaatggaaatgccatcagggataattgctgttatgtggcttgcagtggggtattaa

SEQ ID NO: 301726 - DNA, 909 bp, Proteus mirabilis
atgccaacgattaatttaagccaattaacaccgcccgatgtgattgagtcgttagatgcagaacaattattacgcgaacgcaaaacggcattgattgccgcaatgccagtgcatttgcttgatgcggttgctaatacgttatcgttagagtcggaaccgctgaccaagttgttagaagaaaatgtctatcgtgagttgttattgcgccagcgtatcaatgagtctgcccgtgcggtgatggtggcgtatgcaaaaggggcggatttagatcagttagcggcgaattataatttatcgcgtttagtgttacgccctgccaataacaacactattccgcccacaccggcgattttagagtctgacgatgatttgcgtttacgcattcctgccgcgtttgaggggctaagtgttgcggggccggtgggcagttatgaatttcatgcccgtagtgccgatggtcgggtgtccgatgtgtccgcgatcagcccagcgccggcaaatgtcactatctcggtgttatctcgtgagggtgacggcaccgcatcggaagaattactgcgcattgttgagcgcgcgttaaacgatgaagatgtgcgaccggttgccgaccgtatcaaagtgcaatctgccaagattatcccttaccaaattgatgccacgttatttcttttcccggggccagagtcggagccgatacgcaaagaagcgagtcaacgtctgacgcaatacatcacagagcaacaccgcttagggcgtgatattcgtctgtcagcgatttatgccgcattgcatgtggaaggtgtgcaacgtgtggagttaaaacaacccactaaagatgtagtgcttgataaaacacaagcctcgtattgcacacaaagcaccttaaccattggtggctcggatgaatag

SEQ ID NO: 301727 - DNA, 432 bp, Proteus mirabilis; identical to SEQ ID NO: 300086

SEQ ID NO: 301728 - DNA, 1347 bp, Proteus mirabilis
atgagattatcacccaaaaaacctgatttttctcaaggatttacaagcgaaaatgatatttttaataggaaagctttatatgaaaaaattattaatgttataaactacgctgaagatagtaacttagttcttgcattaaatgataaatggggaaatggtaaaacctcttttgtaacaatgctaaaagcagagttagaactatcagaaaataatattaatgttatttactttgactcttttaaaaatgattatcaaaaagacccattattaccaatgatatcatgtgtatataatagtatagaacatgatgaaaaatctataaaagagaaagtattccaaacaggtaaaagtgttgccttaagcatttcaaaacaagtccctaaaagtataatcaatatattaacttctaaattaatcaataatgatgatttagataaaattaaagagtcaattgttgatgccacaaatgccccttgggaaagttacattgaagataagataaaaaactcacaagaagaagataaaattgagagctttagaactatattaaaatccatatacgaaaaaacaaataataaaacattatttattattgatgaattagatagagcaagacctgatttttcattaaatctcttagagttaataaaacatatatttaatgttgacggtttttactttttattagttatgaataagcaacaatttgaagaatcaataaaaataagatatggaaatataaactcatcattatatttaaataaatttatagattattggtttactttacctaaagatatatttacaacggaaaaatacataaataaggaaggtcgccgcatacctaattacttaactttaggtgcttaccttcaacatatagataaaaataatattcttatgagagggagtgatgcatttaacatgcttatttacctatttaattttaacaatgtatcgcttagagaaatagaaaagtgttattctttaatttctattattaagaattccaataaaataatgatgcttgataagccagagcaagttatcgttgctttagtttgttttatgaaaattaacaatgaaccattattagaaaaactaaaaagaaggaatacaactccagaagaagtacttaccatgctgaatataccattggatcagaatttatttgatacatcaattcactatttgtatatggtactacgctatgaattgcttactggtatagagtttaaaaaacttaaagatgaaaattatttcagagatatagaaggttataacggtagtaaagtaaaatatttagaaacgataaccgattactttgaaaacatgtcgattgattaa

SEQ ID NO: 301729 - DNA, 1167 bp, Proteus mirabilis
atgatgcagatgtatttccaaacatttaagcgtgttttattaggcatgttagaaaaaccgatgtggatgttattattggtttctctttgcattatgagtttagtctacgctaaacctgtattgtgggatctgcctgtggcggtgatcaatcaagatcatagccccgccagttatgcccttatccgctcattagatgccacacctaaattaagcttaaagggatatgataatttagatgaagctcgtcatgacatgatcatgcgtgaactgtttgccattattatcattccaacagattttgaaaaaaaactgcttaatggcaaaaatgttaccgttcctgtgtatggggatgcgaccaaccgccttgctagtggacaaattcagcaagaattaatgcaggcgtatcagcaattattagataactataacggccgtatcttacaaaatgcgggttttagtgcgacacagtcaaaaatattattaaaaccgatccaaagtgaaactatcgccatgtataaccctggggtcagttttgccgccattattttcccaggcttgttagtgatgttattgcaacactcattattaattgcttgtgtacgagtgagtatcgccgtcagaggaacgccaaaagggaagcctccgttagcggtatatttaggcgcgctatctgcacttataccgatttggctctttttatcttcggtgttctttgcactatggccgtgggtattaggctatcgtcaagaagcacccctctatcaaatttggatgttgaccttcccattcttattagcagtattaggattaggtaagttgatcaccgaatgcttgcgcagtgttgagatgatttacttaacattagcatttgtgacgacaccggtattctatatttcgggaactatttggccattacaagctatgccagattgggtattggcaatatcctctgcattaccttctacatgggctgtaaatgctatggccggaattaaccagatgggattatcattccaaagcatcctaggggatatcgtgatgatgctggttttaggcgtgatatataccattttgggggtgttagtggggatgttgcgcaatggtgagttaaggaaaattactcatcaatttaagcattgggtgagacattaccaccgttcaaagtaa

SEQ ID NO: 301730 - DNA, 972 bp, Proteus mirabilis; identical to SEQ ID NO: 294577

SEQ ID NO: 301731 - DNA, 1431 bp, Proteus mirabilis
atgcactcagcgcctgttcatttagtttggttccgtcatgatctaagagtgaccgataataaagcgctcttttatgcttgccaaaatacacaggcgcaggtgcatgccatttttaccgtcacgcctgcacagtggaaagcccatcatatggctttatcacagcaggcgtttattcatgatgcattgcttaatctttcccatgcgctagctaaattaaatattccactgacacttatcatcagtgatacatatgctgatgcggcacaaagtattgtggattattgtcagcaacatcaggtcactgcgctattttttaatcatcaatatgcgcttaatgagcaaaaccgtgataaaaaagtaatggaattactcgcccataacaccacggtttattgttaccacgataacgtttttgtgccaccggggaatgtcgtgacccaacaaggagagatgtacaaagtctttactccttttagaaccgcatttttacggctatttctgtcgcaagataatgcttcattaccagcccccgaaataagagcacaccaaaaagccgtttcaccgttaagtgcaccactttttgcactaccaatatcatcaaccaagatgttcccagcaagcgaacaagcagcgttacagcgtttaaaacagttctgctatgaaagggtgatacattatgcaaaatggcgagatattcctgctattgatggaaccagtcaattatccccttatcttgccataggcctagtgtctgtgcgccaatgttttaatcgcctttaccaaacagagcctgatttcttagaaaataaccattccagtgcatttgtttggtttaatgagttagtttggcgcgagttttatcaacatctaatagttgctaacccgagtttatccaaacagatagcttttcaactatggacagaaaatattcgctggcgtaatgaccaaactgaatttaccgcttggacacagggcttaacaggctttcctattattgatgccgcgatgcgacaactgaatcaaaccggctggatgcacaatcgcttacgtatgctgacggcaagttttttagtcaaagatctattaattgattggcgctggggggaaaattattttatgtcacaattaattgatggtgatttcgcatcaaataatggtggctggcaatgggcagcatcaacaggcactgatgctgtgccttattttcgtatttttaatccgaccacccaaggacgtaagtttgatcctgatggtgagtttatccgccactggctaccagagcttgctgatgtcccagatcgcgatatccatactccttctgaatgggcaatcaaaacaggtcactacctcgattatccacagccaattgttgatcacgccaaagcacgagtaactgcaattgcgtcttatgaagaggccaaaaaaaggtaa

SEQ ID NO: 301732 - DNA, 870 bp, Proteus mirabilis
  misc_feature (854)..(863): n is a, c, g, or t
ttgtctttttctgaaagtagatttcaaataaatttattttacatacaaaaaaaatttgaagaagcttttaaccaaattcgtttatcaattcagtatgatgattatctagaatgtatcaaaggcttagctcacgccgtctgggaaattaataatgattttttcccaaatataaagggcggaaaaggtcgaatgaaggctgttctcttaatcagaccagatatttttgagtctataggattacaaaatcaaaatgcaaaaatccgagataattcagtttttctcgactggagaactgaatatactaaccaccgtaactctcaattatttgaggtggttgaccacatgcttggaactcagcaagaaatagaatgtgaaaaggggctatcttgggatcattatttcccttgggattcaccaaatgttcataatagctataaccatcccacatcatttattaatttccttcgttggtcttattaccgtccaagagatatattacgaatgcttgaaattctaaaatcacacagtaacggtaatagtagaaaaaataattttactctaagtgactttgaaaatcctagagtacaaagagattactctaactatttacttggagaaataaaagaccatttgtctttttattatggtaatgatgattatgagatgtttttaaagttctttggatttctctcaggtaaagatactttcgattactccgaatatctcttagcatatggagaacttgaagctcatattagttctacttcgacgataaagccaaaatttatgacgacggctaacgactttcttcaatttctttttgatctcaatgtaatatgctatatagaaacaannnnnnnnnnaagataa

SEQ ID NO: 301733 - DNA, 549 bp, Proteus mirabilis
atgatttatccagagacaagtggcaagagtggtgagtatttaagattgcgcacattagaaagtacatggatccgggggcgattaaaaatgtggggttgttgggctgcatttagtaaatcaccgcaagcctctggtatttttcagcgattattatcagacccaaaaatcacaaagaaagccctcaaagatgctatgcgaagaatgaaaaaatcagggctatcagaagaaaccttacagcttttcttggaggagtaccaaaataagaaaacacttagcaatatgtggttctgtagtgatattgaaggtggaaaaatggacaaggtcatttgtgctgttttcgaaaaagatcaaggattattagaaatactgaaacagtattatgtatataaaaaatcatatttcggcatagcgttagagctacatgaaaagcacccttcaatgtcactatcgacttataggagacgagttaaaacatggttatctattgctgaatttatgctctattggcctatgtgtgatgagtttgacagaaagcatcattattcatga

SEQ ID NO: 301734 - DNA, 321 bp, Proteus mirabilis
atggatttaatagggttgcaggaattatttgaaagacagataaaaagaaaagtgaagtctattgacctgagcagggagcgtgactctactttcagattccttgtagagcgtgaaactatctctaaatattcagatccgggcactcaattactttgggagatttattatgcaggcgctaacgatgctaagaaaaaaatgaaaataaatcttcctaaccttaaagaaaagccagaaaatttttatgatgccggttacaacgagggcattaaagattgcaaaaagcatttaattgcactgcaattcactgttgtagataagtaa

SEQ ID NO: 301735 - DNA, 369 bp, Proteus mirabilis
atgaacaatgaggatttacgtattaattttgagtctggtttgcaaatagtcaaaatgttgtttttagccaatggaggtgcagttatagcaatgcttacgttatttggaaccatttggaataaaggaattccaaataatatattaacagtgttagctcaatcgactttttgtttttgtatgggattgttctttgcaatcatttgtaccatttcagcttatggtagcaacgtactgcaaacactacaaaaatgtaataagttaaaaggtttattgatattatctatgctgtccgctggagcaatatctcctattgcttttttaattggtgtatataaagcttatagtgcattcctaactttattttcttga

SEQ ID NO: 301736 - DNA, 471 bp, Proteus mirabilis
atgaacctaaaacaaaaagtgacagctgttgcgagtgctggcgctgtaagtattgcactaacagtgattggctattttgagggcgtgcgttatgaaccttaccgtgatgttgctggagttctgacggtttgttatggccatactggaaacgacatcattcaaggtaagacctatacacaacaagagtgtgatgaattactgcagaaagactttatcaggacgcaacagcaagttgatatcctggttaaagtaccagtcgatgataaaacaaaagcttctctatattcctttgcttttaatgtcggtaccacggcttttgcacgttctacattgcttaagaaattaaatgctggtgatcagaatggcgcttgtgaagaaatgaaaagctgggtttatgctggtggaaaggtgtggcgagggttggtcagtcgtagagaggcggagtcagcgttatgcaatggaagtctttaa

SEQ ID NO: 301737 - DNA, 642 bp, Proteus mirabilis
ttggaaataaaattaaaaaaggataaaataagaaatggaagtttaatttcatttaataacatcattcttactaacccaattgtttatggtgaagcactagtatttagtcctaacattaataacacgcacttaccagccaatgatacctttgaaaatcctataattaaatcccctaataactcgacgattattcgttctataatgctatacaataaaatgattgatagaatatatcaagatgataactttgatttttttcaacctaaggctcaatcagtgtatggtttattagataatcttgaagaagcattaaaaaaaataaacatagtactacataatgcaaataaaaaattaacaaaggaggaattagcttatatcattatcaatgataatattttaactaagcatgaaataaatggtaatttgataggaattttagaaggagccaacttatataattgtatgggctgtctcgattacttatgtaaacacttaaggtcctatggcgaagatctatctaatatcatttctttcgtatctatatcggtagaagggattgaaaaactagaattagtgcgtggtgcattactaattgcaaaagaaaaactcgcagaaaaagatcatccaaaaaaagataagtaa

SEQ ID NO: 301738 - DNA, 450 bp, Proteus mirabilis
atgaataaaatcaatttattggttgttgttggtgtttttgctctgagcacatcagtaatggcggaagaacaacgctatgcgagtattacgcataccagctcaaactttattaatcgaggctattgtggttactcatttacccttgataatggcggtaaccatatggtgttagaccatgctggatttggtgcccttgaactcacgctgcgaatgaaagataggcaaggaaaagtactaggtgatgaggtgttagaagttgatccgtttggtgataccggtgcatctcgagccacatttactgggttagaaatcccttgtgaggatatcgctgaattcgaagtggttaaagctgtagaagatcagaatggacgtaaggttgagttaccactatcgatctttgaggccaataatccagagctggctaagatgagtgtggcagggaaaaaataa

SEQ ID NO: 301739 - DNA, 369 bp, Proteus mirabilis
atgcttagtagatttttaaagtcgcaacaccaacctgagtcaactgaatcagaaattccgcgctatccgccatttctaaaggggttgccagctgcgtcacccgaggattttcagtccacacaagacgagctaatttccaaactgcgccaagtacttggctttaaccagcgtgactttcaaaagctgctccagccctgcattgaccatctggcgtcctatgttcacttgttgcaagcttctgagcatcatcatcacagtggtgctggtggtttattacgtcattcgttggaagttgctttctggggggcacaagtaaccgaaggaattgtctctgtagttgataagatcaatgatagattggtagtttaa

SEQ ID NO: 301740 - DNA, 303 bp, Proteus mirabilis
atgaaccaactcaacacatacgaaacaaaagaagaaggtgaagcagctcttgctaaaatcgatgaacccaagcgtcttgctagcgagcgcgatgccactgaaacgatttataacttatttggagttcctagctgggaaaatttttataagcttggaatgttcaacctgaacgagctaaaagacatcatccagaaaaagcaagatgggttaccctatgatgaaaaaaagcatcgtgagatcatcacgatgcttcagtatgttgctaaaaatttcgagttagagataccaacacattggatgtaa

SEQ ID NO: 301741 - DNA, 3390 bp, Proteus mirabilis
atggcccgttctccacaaaaagctgcgtctactgggaaagcagtaaaaaaacaaagcaatagtaaattaagcttccataaacaactggtgcttaaccgttttatgtttcgctttttcaaagatgggactttgcaaggtttaaaactacgtttaggcgaagaccgttttgaaggcattcatgaggatggacaaagcttgttcttccatgaattgagtaactatctttttgaagtcgatttaatcgaccttgatgagctgcgtcgctacgacttgaacattgttaagcattggcaacagatcaccaaacaccgtaaccgtaaagaggatacggtactgaatatgaagtatttccagtacttatctctcttatttacagagatttatctcgactggcacttcaaccgaaaacaagagctgcttaatgggctgaatcgtgagcttgaagcttacaatgtagaaaacagtaaaacagcgaaagacagagctaatcagtttagacagtatattttggatgatttgaacaagctggcattttggaatgctacgggttcaggtaagacgttgttattacacgttaatattttgcagtatttgcactattttcaaaatggtaataccagccattaccctgacaagatcattctgttgacaccggatgagcgcttgtcacagcagcacatgaatgaattgtatgactcaggtttttctcatattcagttgtttgataagtctaagccaacaccgtttagaggcacgattgaagttattgacatcaataaacttgcagatgaaatgggcgacaaaacggtagcggttgaagcttttgaaggtaaaaaccttgtgctaattgacgaaggccataaaggtacaggtactgctgctggtgcttggatgcgtcgtcgtgacaagttgacccgcgatggttttgcctttgagtattctgccacctttggtcaggctgtttccgacggtaaaacggttgattcagttgaagcggatatcaaaaagaagaaagctaaaatgctgttcgaaacgacagctttaggtaagttaactgaagaacagttagcacaattggaattagatacagaggagcagcgtgacgctcgcattcaagcaacacgcgaagtgtatggcaaatcagtactatttgattactcgtataaatttttctacgaggacggttatggaaaagagtcactaatccttaacctgaacccagcgcaagataaacaagatgagcgacgttatgaatacttcactgcgtgtttgctcagcttctaccaacagcaatatttgttcactaaaaacaaagaccagttagctgagttcaacattgaaaaaccactttgggtgtttgtgggaaacactgttggcggtgaagattctgatattcatgctgtcttacgctttctagcttggttcttgaataatgaagcacaagctaaagcttggataaaagatctggtggataacaaagcgcggattctggataccaaagatcggaatatttttgagaagcgttttatagctttgatgaatggtcctgaagatatttatgccgatattctggccaagctattcaacacaacacattcaggtcagcgtcttcgagtattaaatctgataggtagtaaaggtgagttggcgcttcaggttggcgaagctatgccatttggtttgattaacattggcgattcaccatcgctttacaagatgtgtgaagaggacgccacctttgattatcaaagggatgattttgctagatcactctttcataccttgaacgataaagactctaaactgcatatcttgattggttctcgtaagtttaccgaaggctggagtagttggcgtgtatctactatgggtcttttaaatatggggcgaggtgaaggttcgcagatcattcagctgtttggccgtggtgtacgcttaaaaggtcgcgactactcgctaaaacgtagcacgccggggcaacggccaaaagggattcatttagataagcttgaaactttgaatatttttggtgttcgtgccgattacatggcgacgttcaagcagtatctcgaagacgaggggattactcctagtgatgaaatattagagctgaattttgaaacgcgtcctaacttaccggcaaccaagttgaaaacgctaaaattaaaagatgggtataaagataatcagaagtacggttttaagcgtgttcattttcctgaactatatcaagttcctgctgagttcgaagggaaaattaaacttcctcatgtgaagttagacctgtatccaaagcttgaatccattgatacaaatagaaaaggtgacaacacgcccgtcaatgttcgatttgaaggtaaactcgattataaagtggtttctgcattcgactttgagcgcttataccttgcagttcaggattataaattgcaacgaggttggtcgaatcttcgtcttgataagcaacggttaatggatttttgtttaggcaatggtgttttttcaaacaagtggtatacactgcttattccgaaatcagaactagatatcaagcaattttctgatgttaagaagcaagaagatattatgttgcgcctgttgcttgactatacagagcgattttataacgcgttgaaaaatgcttacgaaggtcagttctatcaggtaacgcaagtgcaggaagacgatcctggcatgatcaaaatgtatcattttgaaattgaggaatcggatgacggcttggattatgctcagcgattggagcaattgcagaatatcgttgctaaaggggatattggtaaagctaaagaatggaatgccccgggaatggtggcagtgacttttgacaagcatttgtactatccacttctctcgattgaaaaaaatgctgacttgcccttaaaaatgcgacctatggcatttgatgcgccaagtgaaattactttcattcaagatttagaggcgtttattgaaacaccaagaggccaggatatcatcggtgataagagcttatatcttctacgtaacgctgatacaaaatcaaaaggattaggttttgcgactgcggggaatttttatcctgattttctattatggctagtggatgataaaacgggtaagcaatggcttagccttattgatcccaaaggtattcgaaacctgaatttagatgacgctaagtttgggctgtattctgaaattaaagcattagagccgaaactcgctgataaagacttaagcttaagtgctttcatcgtatctgaaacgttgcattcggatttgatcaacgtatctgagttaaaagataaacttgaagagcgtaatgttttatttatggaagatactggaccggtttatttagagaagctgtttagaaaaatggttgcttag

SEQ ID NO: 301742 - DNA, 3153 bp, Proteus mirabilis
atgagcaagtacaacgagctagttaaaaagctaaaagagatttttcagattgaccgtccagagttggactttggcatttaccgtatcctcaattcgcgtgctgacgagataaatgactacctagacaataagcttaaatcaaaaatacaaactgcattggctgatgccggaaatgcgaataaagctgatcttgagcagcaactccaagctgtaataaaagcgacaacggaagccgggtttgagccagatcaaagtccaaaagttcaggcgttgaaaaagcaaatagctgaaactgcaaccggtgctagcgagcatgaaaatgccgtattctcacatctgctcacattcttttctcgatattacgataacggtgactttatcagcaagcgccgctataaaggtgatacttatgctattccctatgcaggtgaagaagtcatgctgcattgggccaataaggaccagtattacattaaaagcggagagaactttgccaactatgctttcaaactcgatgatggtcgtaaggtaagcttcaaactgctgtcggcagataccgccaaggataatcgcaaagataacgatgctgaccgtcgttttgtcctcattgaaccccatactcgcaccaaattggacgaggatggagaagagtttgaactgacttatcaaccagttgaagttgtaaaagcgacagaaattattaacggtgaatcagttgaaaccgaagaactggtcattcatttcgaatacaaagcgatgaaaaaaggcaccaagcaagatgccttagtgcaaacagcgatcgctactattttatcagatagccaagtccagcagtattgggcggatctttccaaacgagcgccaaccgagagtaacccaagccgcacagagcttgaacgccatcttaccacctacactcagcgtaataccgcagattactttattcacaaagatctcggcggattcttgagtaatgagctggacttttacatcaagaatgaagtgatgaatttggacaatgttcaaaatgcggaagtgtttgcgaacatcgaaaagcagttgcgaatgatccagtgtttacgctctgtcgcacaagagctaattaccttcttggcacaactagagaattttcaaaagaaactttggactaaaaaaaagtttgtttcttcttgtgactatttagttacattagataggattccgaaaaacttttatagtttgatctgtgaaaatgataaacagtggcaacaatggcaagcacttggtctacttaaagctaatgtttctgacagattagagtggttagaaaaccatattggtttaatgattgatacatcagtattcgaagaacagttcaaagctgatttgttatcctcatttgaggatatggataactcaattactgggttaatgttgaatagtgacaattatcaggcgcttaatgtcattaaaagtcggtttagaggtaaagtctcaagcgtttatattgaccctccgtataacactagtgcatctgaaatactttataaaaatagttacaaacattcatcttggttaagcatgatgcaggaccgattgatcgttggaaaagatttgatgtcggatgatgcaactcaatgtacaacgatagatgatgtagagtttaataagttaaatcttctgatctcagaagtctttggcgaggacaatgttacaggcgttgtccctattaagatcaacccatcaggcagacctacagagcgcggttttgctttgactcatgaatatgcaattttttcgggaaaaaccgagaaagcatctatttcaaaaatccctcgttcagatgagcaattaaaacgctttaaagaaaaggataatacaggaatttttgagtataggaacttacgcagggaaggttcgaactcggacagagctgatggtcaacgccaatattatccaatatttgccaatctagaaactggccagatacgcgttccgaatatggagtggagtgaggcagatcgtgaatggataacaattgaaacaccatttgaaaatgaggttattatatatcctaatacagactctggccgtgaaaaaaactggcgctggagtgaagcaaatgtaagagcagactatagtcagtttttggcgagaattccaaaaggaagcgataagcctcaggtatactacaaataccgcccaaatttggaaggtgtgaccccactcactttctggtctgaatcaaagttttcagctacagagcatggtacaaaagtacttaaagacctatttggtgatacaagtttttcttatccaaaatctattcatgctgtagaagaaagtttgcgggtgatgggtgtacataagtcagatggtgtggtattggattatttttctggctcgggaactactgggcatgcagtgataaatatgaacagaagtatggggcttaataataagtttatcttagtggagcaaggaacgtacttcgatacagtaaccaaaccaagaatccaaaaagttgcttattcaaatgactggaaaaatggtaaggcagaatcaatggattatgtttcgcaatgtattaaagtcgtcagacttgagggttacgaagatacattaaacaacatttcgttgtctaaaaagaattcgagcctattcgatttgatgtcttccgaagcgtcagcagactatttattaaaatatatgctggaagaggaaagcaagggttcattgttaaatacagataacttccgaaagccatttgattatcaaatgaatatttccgttgactccgctggtgcgacagagcgtaaaactgttgacttggtagaaacctttaatttcttaattggcttacatgttaagtcgattgaatcgaatatcgagcgtggctttgttcgtgttgaagggactttaccaagtggtgagcgtacccttattttgtggcgagattgcgacaaaattggttatgaaaaacttaatgagtatgcaaaccgttttgacctgtatgccaaagagcagacctttgatgtgatttacattaacggcgaccacaacttaccaacagcatttacggttgatggtaatgaaggcgatgtgatgcgtagcttaaaactccgtcaaattgagccggaattcctaagcctgatgtttgctgaggagatttaa

SEQ ID NO: 301743 - DNA, 2889 bp, Proteus mirabilis
atgaacaatattacggaatatcatgctaagtattttgcgcacgaattatcaatcctgcattcaaataatggggttgataggctatcccagtcgctatttgacgccagcgttgatctgaacccacaccagattgaagccgcactttttgccattgaaaatccgcttagcaaaggtgttgtacttgctgatgaggtcggtttgggtaaaacaattgaagctggattggtcctttgtcaatactgggctgaacgtaaacggaagttgttaatcatctgccccgcgtcattgagacgtcagtgggcctgtgaattgttagaaaaattcaatctgccatctcaagttattgatgcaaaaacatttaaccagttgcaaagggaaggtatttataatcctctcaataacaagcaaattgtcatcatgtcttaccattatgcggcaagattagaagataaacttgttgctgaaatgtgggatttggtcgtaattgatgaagcccacaagcttaggaatgcacatcgtgaaagtaacaaaatggggcaagctctaaaacgagctttagatggccgaaagaaactgttactgactgccacgccattacaaaattctttaatggaactttatggcatgtctacattaattgacgagtatgcttttggcgatcaaaaagcattccgaaaacaatttatgcaggcggatagcgaccctttggagttgaaagaacgtttgtctgggtttgtaaagcgaacgcttcgtaaaaacgtgcttgaatacattaagtacactgagcgaaaggctataacaatacctttttaccctagtgaacaagagcaagatttgtacgaacgcgtgcaattattgcttgaacgagaagacagttatgcactaccgaagagacatcgacatctgacaggattgatcctgagaaaacttttgtcttcaagtacaaaggcagtgcttaacaacttgcagatccttaagtatcgattggaaaagttagcgagtgacggggaagatgacagtgcaatcgacatcgtccaacaaatcattacagacgacgatttggaggatgattttgttgatgaacttgatagtacatctgaagcacaagagaaaaaaccaatagatttttctgctcttcatgctgaaatctcagaactggaaatcttgatcaagaaagcagagcaaatcggggttgatacaaaatcaaaagagctgcttgttggtttagaaaaagggtttgtgcaactcgctgaaatgggcgctgccaaaaaagtcatcatcttcactgagtcaatgcgtacccagcagtacttagcagaatttctcgaaaacaatggttatgccgataaagtcgttacttttagtggcactaacaacacgcctcaagcgaacaagatttatcaacagtggaaagagcaatatcaagggtcatcacgtgttacagggtcagcacaaattgataagcgctctgcgctgatagaccattttaaagaacatgctgaaattatgattgcgacagaggctgccgctgaaggtgttaatcttcaattctgctcactgttaatcaattacgatttaccttggaaccctcagcgtatcgagcagcgtattggtcgatgtcaccgctatggccaaaaatttgatgttgttgtcgttaatttcttaaatcaaagaaatcaagcagaccagcgagtgctagagctgctaacagaaaagttcaatctattcgatggtgtcttcggagcatcagatagtgtacttggtagtatagaaagtggcgtagactttgaaaaaagaatccaatctatctatgattcttgccgttcgcctgatgaaattgaagctgctttctcgttacttcaaaaagagctagaagatgaaattagcattaaaatgcaaaagacccaagaaaagttacttgagcattttgatgaagacatccacgatattctaaagatcaaactcgacgaagcaagagagcgcctagacaaagtgggacggtggttttgggctgtaacgcatcaacaattaaaagattgcgctagttttgaccacgaaaattatcgatttacgctacagaaatcagtcaagcagctaccggtaggtcaatatcaattgctgagaaaagcaggtagtgaaaacagtgagttgcaagttcaagatcaacatagccatgcttaccgcattaatcatccacttggtgaatatgtaattgataatgctaaatcgatagaaactaaacgagcactgctgtcgttcgactacaccaatcacgcaacgaagatatctgttgctgaaaagttaaagggccagtcagggtggttaacgttgagtgttcttggagttgatgcattcaacaggcaagagtttttgatttttacagctaaaacagacagtggccaacttattgataatgatgcttgtaaaaggctgtttaatttagcggcgagtgtaggccgaagtgagaatggcaacgagcaaagtaccctaccttctgagcttattgaactgaaaaaacgccaaattgacgccaagctggctgaagttatggacgaaaataatgcattgtttgaagttgagagagacaaattagagaagtgggctgaagacaaagtgttcgcagcagaggaagcgctgcgagatacgaaggcacaaattaagtcagtaaagagagagtctaggcacgctctaacagttgaagagcaaaagctaaatcaagagaaactcaagcaactggaacgactacaaaaacgccagcgaatggagatatttgatattgaagacgaaattgctgataagcgggatgaactaatcgctactttagaagagcgcatgaagcaaagaactgaagtgacagagttgttcacaattcgttggcaagtaatttaa

SEQ ID NO: 301744 - DNA, 930 bp, Proteus mirabilis
atgataaatgatggtctgaaacaaacggtaggggcgaagtcacatagggcttcgaagatagcgcagttgccacaagcaatccgggatcgcattgctcacatcgatttcaccttattgtttaagggggaagcggtacgggcagatttagtcgatcgcttcagcatagcggctacacaagcaacgaaagacttctctctatacagagtgcttgcaccaggtaacattgagtatgaccaaaagctcaagctgcataagcgaggtgaagcatttgaacccttgttcgactacgacgtcgttcgaacattggcgacgattagccaagggttcggagatggttttactggcaagataaaaccgcctgttgcgtgtgaagcgccttatcaccttaacaagccgagtttatcgatagtggcgaaagtcaccgaagccatccataaaggtaaagccttgcgtatcacctatgtgtcgttatcgagtggtgaaacaatacgtgaaattgtgccgcatacgctggtggacaatggtttacgttggcacgttcgtggttttgaccgcgagcatagtgagttccgtgactttgtattgactcgaattaaagctgcggttgtgcttgaagactccactttgtctgaaatggagctcgaaccccaagaccggcaatggaatcgctttgtagagctagagttagtgccgcatcctcgtattgagcacagcgaagcgattgagctagactatggcatgacgggtggcgtgatgaaagttgagattagagcggcaactgcggggtacttgcttaggctttggaatgttgactgttcatataatcactcattaaaacaacttgaatatcaactatggctgaaaaacaaacaagcgttatatggagtagcaaacttagctttagcgccaagttatgaggaagatgaatga

SEQ ID NO: 301745 - DNA, 873 bp, Proteus mirabilis
atgcatcacaacgctcactttaaaaccctcctatcgacgctaccgacttcattccaaacctcttttttcaaccaactcagtcagctcatcaactactctcccatcatcggtttgatgggtaaaacgggagcgggaaaatccagtctgatcaatgcactgtttcaatcgtcattatcacctgtgagtgatgtttcaggctgcacacgccaagcccaacgcttcagcatgacgatgaacaaccatactctcacttttgtagatttacccggcgtgggggaaagccttgagcgggataaagagtaccaccagctctatcgcaacttattaccagaattcgatttaatcatttgggtactcaaggccgatgaccgagcatggtcttctgatgaacagtgttatcgctttctcacgaagaaatgcggttaccaacctaatcaatttctatttgtcttgaaccaagccgataaaatagagccttgtcgccagtgggatgaatacaagcatcaaccatcctcagagcaggcctataacttaaaattaaagcaacaagccgtcataaccgcctttaagccgcatcatgctgtgataacagtttctgcggtcgaaaactatcaactcactgaattagcagagcaactcatacaggcgttaccggcgcaagccagtagcggagtagctaggcaactgaacacctcttaccggacgcaatcggtggagaacgccgcacgtaacgattttgggcaatgtgtcagtgatattgtggataccttaatcaatatcattcccttgccgccattgataagaagtacggttagcaccgttaaaaacagtatcgtctccgtcgctaaatccctgtggagaatgttcttttaa

SEQ ID NO: 301746 - DNA, 426 bp, Proteus mirabilis
atgaataattcaactgaatgtgcaattacaatgacactcgttcccgatgagcaacgcctggatttttggatcaaccacttcggaaacgtgaaaggctggagcacctttgaagtggtcatctttaccactatggggcagttttgtgattactatcagggtggatattgggaatattgcactttatctaatggcggcgcttttatttatcccgatttacctcaagagacactgacgctgttcaacccacataacggtaacgaagccaacgtcagttgcgaagcggcaggtattgccgtgtgtttgatgatgtacagtttatggtcatttcaaacggaaagtgacatcctcgtcgatcgcttttatcaattgcgtgattatgcggcgcaacacccagaacgttccgccattttccatctaatcgattaa

SEQ ID NO: 301747 - DNA, 435 bp, Proteus mirabilis
atgtttaccttacaagagcaagaatcaacggttatcaaaaccaacctcgtcaattcccgtggtcgtagtaccttctggcgtttttactttggtactgtgccagactggcaacgtattgaaggcgatatctttaatctgatggataagatgtgtgaggtctatcaaggtgctttctgggagttcagtatgctgtctaatggcggcgcatttatctggcctgatatgctcgaaacctccctgcatatgtttaacccacataacggaaatgaagctgagttaagccctgaagcagccggtatcgcagtttgtctaatggtgtatagcatctggtcatttaaaaccgagagttctgtgctggtggaatatttttacctgttgcgtgattacgctatacagcatccggagcaagctcaaatctttcgccttatagactga

SEQ ID NO: 301748 - DNA, 822 bp, Proteus mirabilis
atgtctcgtttagcttcccgttttggcaatgcttgctctattcgtcgtgaccgcccgctaactaccgaagagttatttcgcacagtacccagtgtgttttcagaagaaaaacacgaatccagaagtgaacgttatacttacatccctacgattaccttattggatagtcttcaaaaagaaggcttctatccattctttgcatgccaaacgcgtgtacgagatgacagccgtcgtgatcatactaagcatctgttacggctgagacgccatgaccaaattacgggcagcctagtgcctgaaatcatcttactcaatagtcatgatggctcatcgagttatcagatgttaccggggatgttccgattcgtttgtcagaatggcttaatttgcggacaaacctttggtgaggtgcgtgtaccgcataaaggtgatgtggtggaaaaagtgattgaaggagcttatgaagtgttagggctatttgaacgcatggatgagcaacgtgatgccatgcagtccctattattaccgccaccagcccaacacatctttgctcaatctgctctcacatatcgttatggtgaagctcatcagccgatcactgaagcgcaagtattacagccacgccgtgtagaagataagaaggacgatctttggacggtgtaccaacgtttgcaagaaaatttaattaaagggggattatcaggcagaaatgcgaaaggtaaacgcgctcgcacgcgttcagtgaatgggattgatggtgatgtgaagcttaaccgagccttgtgggtgatggctgaaaatatgcttcaactagcctcgtaa

SEQ ID NO: 301749 - DNA, 483 bp, Proteus mirabilis
atggagagtatcaatacttatacgaataccttaacactgcttcctaatgaacaacgtactatcaaacgtgcgttgaccatactggataagtatctgcgtgaaccgggtattgcttttacatcaacgcaaaatgtgagggattggttacggctaaaaatgtcagcattagagcgtgaagcgtttattgtgctctacttgaatcaacaaaatcagttgataagcagtgaaaccctgtttgctggctcgattagcagcacacaagtttatcctcgtgaagtcgtcaaacgagcactgcattttaatgctgctgccgttatctttgcacacaaccatccgtcaggcgatatcacgccaagccaagcggataaatctatcacgcaacaattaataaaagcattgcagctaattgaagtacgagtacttgaccatctgatcatcggtggtcagcaaatcttctctttcgctgagcatggcttagtatga

SEQ ID NO: 301750 - DNA, 222 bp, Proteus mirabilis; identical to SEQ ID NO: 283472

SEQ ID NO: 301751 - DNA, 735 bp, Proteus mirabilis
atgaaaaaagcgtttattgttcccgccctgatggggtgcatttcattaccggcattcgcgaatacggatgacagtaaaacggggctttatgtcacgggtaaaatgggcgcatccattgtgcaaatgtctggccagcagtttgtctacagcggctatgctgatgccggtgataatggtacaaaaaatggagatagccatcgtactggcgtatttggcggtggacttgcgttaggttatgacttttccaatcagtttgatatccctgttcgcgctgaattggaatttatggcgcgtgataaagcgaattcaacctacaacatccgcgaccgtgtgcgtaatggcgtacatcaaactcgtgatattaaaaaccaaatcaaactcaatacgttaatggtcaatgggtactacgatattaaaaatagctcagatttcacgccgtatatctctgtcgggctaggctatgcggccgtggattttaaaaccacccgcgctgatgcttatactccaggactctctctgcatgatactcacacgcataccgccaataactttgcctggagtgtcggtgcgggggtgaactatgccatcaatgacgattgggatatgggtctaagttatcgctatttagatgctggaaaagccgacatcacgacagcggtaggcgatggggaaaacacctcaaaaatcaaagtgaaggccaatgacatcatgcttggtttgacttaccgattctaa

SEQ ID NO: 301752 - DNA, 864 bp, Proteus mirabilis
atgaattcaattaatcatattcgtttaggtgttgaacgaatttttttcatcattagcttagtgctagtattcggttttacagtcatcatcgccaatcactataaggtcgacttatttattggtaagcccttaatgtatctactgtattaccttatcgcaatgttagctccactcttgatttctcaaatattgttgtgggtcatttatgggtttaagggtatccctttccgtttaatgctaacgcgaaaaattatggcatttgtcttcgctttcatcgcctctttatgtgttatctacttattgctcatcggaattattccttttatggtttttgaccatgctttaatttttatactttatgaatacttttttattttcctccttttcgcctgccttatcggactgagtgctggcgttattgtctatatccataccgttaaaaatgtatcccatctatttcaatacccgcatcctattttccgtttaatgacgttcttagcgctataccttgtcattatgaatgccttagcgataggcattgtcaaccaaatcaatctcaatatcatggtgattctggcgggtactatcgcaggttatgtcgggtattgggggtatggcttcctacaacaatacacggcaacgcgttctcggaaactcaggataaccctgtcaacaatcatttcccttgttatcttcgcgctactggtactccttaacgttctattgcctagccgattaaatatgttcggattattcctgctattttttatcgaactggctattgcaatcacattgggtctacgcacctatcggaaaaacaaccataagaacgatgatccaacaatgaggataaatcatgactaa

SEQ ID NO: 301753 - DNA, 393 bp, Proteus mirabilis
atgactaaatacatcttcattttcatggcgtttggcctcagttttaccgcgagcgcctttaacacgaacgtatttgataccgccatcgataaagatggctttacaccgatgtgcaacaaccaagcgattacagataaagattgtcgtgttgatgattatcttgaggggcgttatgtcgtcacgagcacagtgaatctgggcgctaaatgcgcctttgtgattgccgaggtgattgatagtcaaaccaaccaactgttcagtacctcgactggcgattgtgaagacggccctctcgatacctattaccgcttatcccgtattaacaaaaaagtgtggctggatgcttacagtcaaggaaaacacattgaccatgtagaggttatctttcaatga

SEQ ID NO: 301754 - DNA, 372 bp, Proteus mirabilis
atgaaaaatcgcacattaaacagccttccttttgtgggaattatcgcaatcgtcacattggggatttatttcggcaaacaacctaagccaacctatcgagattgtgttgagttcagctcatctcctgccaatacgcttcagatttatgatcaacccgatagaggttccaagtctatcaactatcagtccacatcaggaaaagaacaattctgggtcgcaaaacgaacagctgatgaacaatgggtacaactctaccatgccataacactttttgatgatttacctgaatcggctaaactcggatgggtcagtgccaagaacataaacacattggggatatttgaatgcatgactaagaatcaaaacttatga

SEQ ID NO: 301755 - DNA, 1341 bp, Proteus mirabilis
atgagaaggctgaggctttcaccccacaataagctcactcgctctctatttctggttatctcattacttttttttagcttgatagccagttatgttgttgtacagcaacttattgtcgggccaagcctccagcaatttaataaggtattagcgtatgaaattcgtacgctagtaccggaagaactgatcttagtcgatggcaccccacttaaaatttctcccgctctacgtaataaaatttacaacgagttaggtatctcattctttgataaagacgccgctttaaaagctggtttagaatgggcaagagaagatttagaacttagccagcagatgacggattatctcaatagtgatacgacgatttggctagaaaacaccctagagtatcctattttatggattaatacccaactctcacccacgctatggatacgcgtaccacttaccgaattagggcaaaatttcttattacccgtttatcggcaagccattatttttatcatcatcgtagtggcatttttctggttatataaccgttttcaaaatcgtccattgcatgaagttgaatatgcagcacgacgcattggtaaaggggtgatccctccaccaatacctgaatcaggcactgctgaaatgcgttcaattattcgagcatttaatcaaatgtcatcagatattcgttcattagataatgatagaacactggtgatggccggggtaagccatgatttacgcactccgttaacgcgtattcgtcttgctacagaaatgatgagtcctgaagatagttatcttgctgattctatcaataaagatattgaagattgcgatgccattatcggtcaatttttagactatatgcgcacaggcaaagagatgtctttagaattatgtgatatgaatggtctattgcgagaagtgatctgcgctgaatctaactcaggtaaagtcagcgaagagcatttatacccttatcctatcaatatcacagcaaacccaattgccgtcaaacgggcgcttaccaatatgattgttaatgccacacgctacggacatggttggataagcatcacaagtaatcaaaatgaagaatatgcttggtttcaagttgaagacgatggtccaggcattgccaaagaagatagacaacgtttattccaaccctttgttcaaggggaacaagcacgaagttcaaccggtgcgggtttaggtctatctattattcgtcggatcatggatgcccatggtggctttgtcgaactcggcgatagcacgaaaggcgggttactgatccgtgccaactttccgttaaaagtgcaagaagacgaagatgattaa

SEQ ID NO: 301756 - DNA, 1266 bp, Proteus mirabilis
atgaatatatgcaaatgttttaaatgtgatacctgtgaaacgttaattgattgcagaattgggatgtcgaacagggacattcagccttttcagtttgcctgcccagagtgtgaagaacgcatcacttttacaatcggctctgagaaagacgatctcacgggcgcatcagatataattgattttgaagcaccattcacaggtgagaatcatttcgttgagttacaccttgatttcccagtttatttttgtaagtacacgcagggaatgacgactttttttcgtgcaatgagtgaaattggtagaaatgaatttggtcatttagctcaacgccttgatatgttgaatcgcctctatccattgcaaagggagttagagagagttattactcaatacaaaaaaggtaatataaataactttgaaaaagtgtgtgcgaagttacctatggaaaagctgagaagtcataaaaaagaagacgttttagcatccttgtacacagcaacatcgattatgtcatcgccttttacaatccatgagcaaaacgaagaattgtccaaaggttttacccttttatatcaacatcttcacgggaagcataaaaagaacgtcatcagctttgttgaggaaattattaataataaatttctaaaaaacctacattttgattgtcttggcttatacccacgccttattgaacttgaattaccattacgaccagccctcttttatgattacattgaggtagagaaataccgaccagttcccgctcgcgtatcaacggcttactttgacacatgcaataattactacaaagacttggcagaggttttcgcccgtcagttaacgcttcttgcaggcctgaataatttactaaaacgaggtgatcacaatgaatttgaagcgacattaaagttgaacaagaagaacgaatttcgtaaagaattatcctctctgaataaatttgctgatgtggatttaggccagaaaattcagtatatcgacgattgcttttatacaattaatataacagccatcgataataggctcaggaacggtattgcacactataaatacgaatataaagaatcaacgcaagtcattacctattaccctgctaaagaaggtatggaacgtactaagtcggaagatattacttttatggagtttctgcgcaaaactctgctgctattccgtgaagttcacagcctgaatcatctcatcaaggctacactctactacattgtcctgatcctgaaaaaagacgtgtag

SEQ ID NO: 301757 - DNA, 603 bp, Proteus mirabilis
atgtctaagtcaccgtggaataaaaatcgtatcattgggcaaaaacgaccgcttaaaatatctcatatctggggaatccgtattatactggaattagaagggaaaattcgcgacttagctttgtttaatttagccttggatagtaaacttcgaggctgtgatctcgttaaattgaaggtatcagatgttgcatatggcagttcagtctccagcagagcaacagtgttacaacaaaagactggtagtcctgtccaatttgagctgactaaaggaactagagattcagttgctgcatggataagaatagctcacttgcatagtgcagactatattttccaatcccgagtcggttctgctcaacatatctctaccagacaatacaaccgtatttttcatggttggattgaaaagctaggccttgataattcgttgtacagtacgcattctatgcgcagaactaagccatacctgatctaccagaaaacaaagaatcttcgtgtaattcagttattactaggacataaaaaactggaaagcacggttcgttaccttggcattgaagtcgatgatgcattggagatttctgagtcaattgaagtataa

SEQ ID NO: 301758 - DNA, 1116 bp, Proteus mirabilis
atgggagtttatgtttatgcggatgaatcaggccattctggaaaaaatatctttgacaaaagtgcaaaaaaatattatcagggggcaattatttcccttggtgatattgactctattattgcgggcgtaataaatcatcattgtgaacaattaaatgttcctcgaattcactctaaccaacaccaagaacatgttattactgttatctgtgaagacttaattgacgccatggaaaatatatcgtggcaattttctatatgcatgattgataaaccctatctggctccaactaagtttgtagaccttttttttgatagttttgataatcccggagtgcccgttctttggtacaacagtgatttattcagacattctctgtgtttggcagtaactaaccttttgactaaagaagatagcattgaattttgggatgcgtatctgagtgactcaatgcctgtaatgctgcaagtggcggagaggctgcttactcgtattgatagtatatccgacccaagaatgaatgaagttatgcggagtggattacaatatgctatcaaccaccctgatgaatttacgatgatttgtactcaaggtaaaagtgcttacaagggccagaccccaaatatggttgcgttttccagccttatgtctgcaacccatacattctgtaaggcacactcatcttctgtagaagaactaatacatgacagaagtgatgaatttcgtggaacaatgcgtgaatatcatcgaatatttcataaattaactcatgtcgaagatgacttaggtggcccggttttgtttgaagaggctcaatttaatttagggacgtttaatcttagaagttctgaatcacaccctgctttgcaggcagttgacgtattcttgtggatggttcaaagaaatttaaaaactgatcgtggccgggcggcactggaaagacttaaacaacatattagcgatttcgaaatttcccctagaatgtcacaacttattgtttatgcgagaatttatcagcttaatagtagtccaatcccacctaaaaatatgaaagaaggtaaaaaactaaggaggttattagagagggagcgccaaaaaagattaaaaataaaatga

SEQ ID NO: 301759 - DNA, 1362 bp, Proteus mirabilis
atgactcggagtgaaataaacgtctgggatgtgagacgaggcaccaatagccctcgagttgaagagattcgatctgaagctcagcgcgacctttctcgattgattcactcgtctcctttcagacgattgcaatccaagacacaggttcttggtctgggtgaaagtgatttctaccgcacacgactgactcattctatggaagtcgcccaaatcggttcaggtcttcttgctaagctgaaaataaaatataaaggtaaagaggaagagcaatttttaccagataacgatctgatgcaagcagtatgtctcgcacatgatattggacatcctccatttggtcacggcggtgaggtagctcttaactactgtatgctggattacggtggttttgaaggaaacggccagacgcttcgcattctctcgaaactagataagtataccttaggatacggactcgatccaacacgcagacttctgctaggcatactgaaatatccggttaaatactcggatctagtggttaaaaaagacagtatcccggccactatcggatcgccgaactggctctttaagtcatctgattttaaacctccaaaatgctatctagattcagaatgcgatattgtagaatttgctctctcaccatttactgaacaggatcggaggctttttacttccgttgaagatggtcaaaccaaatccgatcataaaaaagcttcttataaagctctcgatacaaccatcatggatcttgccgatgaaatttcgtattcgctgcatgatttggaggatgctatttctctcggaatggtgacacgagcaatgtggatggagcatttcagtggacatgaaaccctatttactgactgccatggaaaaacatttgacggaacatgcgaatctgttgcggatagcctttttggtaaaagttacaagagaaaagagtgcatcgggatgctagttcacctgatgattacaagtgttgagcttaatacaaagaatgcagcattcgaatgtggcatgctcaaatataatgcggtccttccggatgcggttgaagcactaaggttgaaaattttcaaactggtcaaaaacaaagtaattaagcatgaaaatgtacagcagcttgaattcaagggacaaaagttgattgttgagcttttcggtgtactggctaacgatccgtgtcggtttctacctgcctcaacgagggaaatttacgagcatcagattagcttaggcgagaaggctggtatgcgtgtcatttgcgactatgtttcagggatgactgatgactatgcaacaaagctttatgagaaaatccttattccacgtaaagggtctatttttgaccatctctga

SEQ ID NO: 301760 - DNA, 672 bp, Proteus mirabilis
atgtcagattatgcattaactgaaacagaattggatcaactgataactatcgcgagtgatcgctatgattcctcgatatcgtattatatccttcgtcgattactggcagtggttgagaatacactagaacaccataaccgagtatttgcaatccgagttgatttacgattcgctcaggatagttgtcctgatgccccggatatgccggtatgttttcaacgcacggatgagcgagccattacccgttttatcgagtcactaaaaagccaactgagagccgcacatcatcgtacggggcgttcaggtacaccagcactcccttattatgcttgggtaagagaacgtaatgaaagtgaatatcctcactaccatttagttttgttatttaatcgagatatatacggctatttaggcaactatttacaagatgatgccaataatatggcgactagaatacaacgagcatggtgtagcgccattggcttagagtacccggactatgcaccattagttaactttccagagaaccccgtatttcgatttgatagacgagatgctctggcccgtcattctaattattttgatttcctattacgcatgacgtatctggctaaaatgaataccaaggagttcattactgactttagaaactttggaaccagtcaggtttaa

SEQ ID NO: 301761 - DNA, 1500 bp, Proteus mirabilis
atgtcacaaaaaaatgaagaactatgtttaaacatcgagaacttaccgaattattttcaacgtatgattgagcaagttcatataaaaacgggggcggcggctgaaattattttgcctaccctactgagtgtgatgtccatgtcgtgtcaggatcgctttgatattgaaccgataaatgggcgaaaatatccgctgtcactttatcatctcgttatggcgaggtcggggtgtcgaaaatctactgtttataaactgctcacaaaagcaatttcagaatttgagcaacagctagaacaggatttttatattgaaagagacgcttatgagcgaagtctggtgctatggaatgtaaaatttagcgcattgaataaaggttataaaaaagcgttgaatcagggaataaatgcggataaagcgctttttgatttagagaagtgcctcagccaaaaaccggtagagccagttaagaagcggctaataatcaatgattcaacaagtgaaggattggctaaggagttgggggatggatatccagtattgtcgctgatgtcagatgaggcgggtgagttgtttgaaagcagtttattacgaaaaacaccattactcaattcgctttggtgtgctgagggaaaatcggtgagtcgagcatccagagataactatgtcatcaaagattgccgttttagtttgttactcatggtgcagccagcgttatttgacagctttatgggtaaaaaaggaaagaaagcaaagagttcaggttttttagctcgcagcttattagtggatctagatcaaattcagcaattatgtgagataaaaaatgtttcacattcaactgaattaagtttagcagatttatcggctacgttgataaaccatttacaaaaaggaataaaacgtcgtgagaatgatgaagaacgccattgtattactttagcacatgatgcccaaggggcgtggaatggctattatcaagctgttaaaaagatgatggagcccggcggggaattacatgcctatgatgattatgcatcacgttttatggagcatgcttctcgaattgctggggtgatgcaaatgtttatgacacccgattccactgttgttacgttggaaacgctggagtcggcagtctatattactcagtggcatcttaatcactttatcaaaaaaatagatgattttaaggaagtcagtgatgctgaaaaactcctgttatggttggaggagcatcttgtcagtaataaatcttatgattttaggcgaaatgacatcattaaaaatggtccctattcactgagacgctctgaccgtttgcggcctgcattagaaaaactacagcaggaagctaaagttcaattattcgaaaaaaatgggattaactatgtcaagtttacgggggcaagaatgacacctgaagagctagccgaacgattgaatattccgttgagtagcagaggagtattcatactcaataactcaccaaaatcaggataa

SEQ ID NO: 301762 - DNA, 231 bp, Proteus mirabilis
atgtacatccaaaatgaaaatgtgaatcaatcaaatttaccattgcgaattttgcgtatgaccgaattgacagtgatgcttgggatatcaagatctagtatttatgaaaaacttaatcctcgttctaagtactacgatccagattttcctaaaccgatcaaacttggtgcatcatcagttggctggcaatacgcttcagttgaaaaatggttaacttcaagaatggtttaa

SEQ ID NO: 301763 - DNA, 927 bp, Proteus mirabilis
atgagtaatccatttacgatatctaactttcctgaacaactagagacctcccctttaatagatgaaagccatcactatgatgaccctttaccgccaaaagatctcgtatttttacaaagtatcaacaaccaagaatgtaagattaaatcatcacaagtcaatggtcgattcacgaatactgtcccgatgtttttggtattaatagtaatgatgttttataccctatttaattttattgaaggacatattattacaaaatatactttagaagataatattaaagaaattgaaaattatagtacctattatacagggaacgatcgcgttgtacttagggatataaataaatataaacctttctttggaaaggaaaagataagttggtgggaatatatcaaagcatataattcaggtaaattttttgtaggtagtgaagatgacaaatattttgtcctcgcatggttagttttatttcccagtggattatatatcttaagctcccttgctttctttgtgccaatgacctatttggtggctgatagaaaacgacagatcttatattcttatgtagatggcattgtgatggcaacccgttatgaagatgctcaattcggttatgccggtaaaatgttagcatttaaattattctatatacatcctgaaactggtgagctaggaatacatatatatcgtcccaatgtctctcattacacaggttttttattaagtagtgatactgaagatcaccgctttattacttttcttaatgcctatatgcaacaagggcgtgatgcagtctgcacaagtgactattatgcacgagcaccactattctgctttgcgaaaaaccctcttcctgctgattttgagcaacaggtcgaacagattctggcaaagcttgatcaggagaaaaaacggcatgcgtaa

SEQ ID NO: 301764 - DNA, 219 bp, Proteus mirabilis
gtgaaaagtaagcatactcgtacatgttcgtataagtcggatgaagttcgtaacactgcgaagaattatctacgtgaaaatgagctgaaagaattaaaccgtatcgtcaatatgtggctggattttgctgaagaccaagcgctgcgctgtaagcaagtttttttacaagattgggatactaagctagatcagtttttaagtttctcagaaaaaagataa

SEQ ID NO: 301765 - DNA, 1275 bp, Proteus mirabilis
atgaagcaaagactttatgtctggatggatgatcaagatctggtcggacagttggatttcaatgtagacggaatgcgacagagctccgtgttcacctatgcgcagaattggatcgataatcctgagggctatgacctctctcccttcatgccgcgcagccagatagtcgcgtcggccagcctacaaggaaattcatctccccttgtgatgccgatcgccgatagcactcctgattcctgggggcgcgctattatgcgtgcagcgaatggcggtcgtgtaatgaatgatttcgagtacctaattggggtcgatgatttcttacgttcgggggcacttcgcttttatgagagcgatacgccagatgcgcttcctctagctcaacctcggattggagaaagagcctattccataccacggctcattgaacttgagactatgattcatgaagctcgcgctttagaagcagatccgactcattatcgtgaaaaccgtgcaaagttgcttgccggacaaatactgcttgatgctgcaggttcgttaggtggagcgcgaccaaaagtaaatgttcgtgaagatgaccagactatctggatagcgaagttacctaagatgggcgatgaatacgatatagctcgtgcagaagtacttacgcttcgtctcgcaggggaaataggaatgacggtttctgaagccaagctacttgtcgtagctggccaatttcctgtggccttaattaagcgttttgatcggtcttatgaagatcctaaaaaccctcgtcgtattcattttattacggctcagacttttatgggcttagcggggactgagccatcaaactatgtctctctagcagagcagatgcttatacatggtgcaggtgatgatttggtcgaactttggacacgaatggcttattctgtgctgattcagaatacagacgaccatctgcgtaatcacggtttcatacgaacggccaatcgctgggctctttctcccgcctatgatattaatcccgacccgtcaattggtggcaccctaaagaccgcgataagcgagatccatggaaacgaactcaaaattttggaagtgttggacgcggcgcagctcttcaacatcaacacagatgaagctcgcgaggctctcagggtaatggcggaaattattatagataaatggcgccctcttgcctacgagttgggaatgacgtcgaaagacatcaaggcgcttgcaccagcctttgaaagcccgcaggtgaaggaagcattgagtctataa

SEQ ID NO: 301766 - DNA, 552 bp, Proteus mirabilis
atgcctgaagaaaaaaacatgagtaagcttcgtcggacaaaaggctcggttgtacgcccttcaaccgaagcagctttggtcaaattgggcaaagacatcgaattcgcacgtagagtaagaggaatccctgctgatacgtttgcaaaatccgcaggaatttcgcgctctactttgcatagacttgagagtggtgccggtgccggtatttcactcaacacgcttgcgatggtgctcaccattcttggaaaacttgacctcttgagtaatttgatcgacatgcgtaatgatgacatcggactgtctatgctacgtaaaaatgttatgcaaggtgcaaagccgccccgtaaagatactaagacgaatgttgtgatccggtccggggccaagacgatgcaacgagcggtaggtacagcgaccgttaacaaatcgacaaaatctggtgttgaagcaaaggcacagggcaatcaggggatgttagtagtcagcccgtcaggacatacatcatcgctgctctctcgcttaaaagctacgcgagactcttcgggctcgtaa

SEQ ID NO: 301767 - DNA, 1173 bp, Proteus mirabilis
gtgagaattcgttatttcgtcccattcaaacgcaaaatcatcattgacgatcattgggaaatcccaatgcaaggcgggaagctccgcatcattgaagaaaatggttacgccaaagctattgaacttactttcgaaaaacagcctctggaatatgcaccgagctttcagaaacgcgccacttatgaggctatgacaacgataaccgggcacgatgaacttatagtattcgtgaaacgtcaactcgataacgcagccatatttctcgaatgttttcatgatattgaactcatgacagaggaaattgaggccaaatatgaaggagaaaccccggaagaagaaacgcgactacccataaagagtatatcaatgggcagacatgattctgcattgcctctcagtttcgatatgtttacgcgggcgcttatggctgctgagaaatatgatgggccgagatttgaagttgcctttgtaaaaagcgctcgcaacatgcttaaaaatcaggaattcataaattccttccgctattcattcctgttgatcgagtcactgtatgggaatggtcaatttaaaacaccaagcttgcaagctgcgctaaaatcaaaccaagaatttcgtaatattgttgagcttgccatcaaagatatgattccagcaaagaatgatcggaattcggatacggcaaagctcatttcaacgaaaccaaatgcagatgacattattaatcatctagtcgaaaagcgaggtttctattttcacggaaacatcaaacggaaagacgcctggaaccccgatgaacaagactcggcagaatctctggcgcttcttgcaataggtattatcacaaaaattactatgaaggccgcagagccaatgttcgttgcagaactagagaaacgccactttgaagacgcaatgcaagtaggagccaaaatcgtgtttgaaataaaattcagatttcgtgaacccgaagaaaatttcgatagacaacatcaagtcaacataactatgccaggaaccaaagtcacccctcgtacagctttcgctgtcgctcagcattttctgcatgtattccagcataatcagcctatatcggctttatgtgaagctgaatgcaaaatacaggaaaccggggaaaaggtatttaacctcacatttcattccaaagaagagtga

SEQ ID NO: 301768 - DNA, 3327 bp, Proteus mirabilis
atggctactacactagatgatctattaggcgatgggcgactggtacgccttttttctaacgaaaatcgcgcttgtgcacttcagctatgggtcttgcagattaaatctgaacagcagactgaattgcgcttagtctacggtcgcttactcccatacagtcattcaaacaattgttggtccttcagcgataacgataactatcttgtgttaggaaacttcaaggcaaagcttactcgtcttaacctatatatagatagtatcaattgtgtagaacttttaagacaattgtgtacaggtcggtcaatctcagaaataaatgagctcctgagaattgaatgtcctagaaaagtaacggaacagttcggtgctactgctctggtacctaataacctgacttatcgcccagcctcgtatctactcaaccgagatgcacatgacaaccgatctctttctagtccgcatggtgcagctggtgccattagtgcttcgattacccaactcagtaaggacgcattatttttgttgaatggagaatacagtgcagccctaattatagcgttagttgaacagctcaatgccgaaactggtttagattttggcgcagtagatacaacacgatttggagatatcgagttattggtctttcctacattgaatgacctcgagcaaaatttgttaagtatagaatggattgattcaccgcgtgctttgtctgttagatttgatccggtacaagtgtcgttttttaacaaatttcagttccacttgagcattgaaaacgatgaccaaattatctcctcgacaattgcttcagcaaattgtgaagagggcggagtgtataaatatgtgtttcaagtgagcaaggaattatgggaaaggacggataatacagagctggagatttttggcttttcaaatgattaccctaatgaaggggtactctgctgtcggtggcgggtaggatatgtacgagagattaatgttctaggccacatggttaaacaagaggatagtcccatcagatttgactggcttgaaaaagcaaccagaccagctatgtcagagcgtgtaaaggctgctcttacggttaaccggagcaatttgggatttggtagccgcttcggtgggcggcaggcagacccttgggttccgccgaatcatgaacttctttctcttttcacacgatttcatcctcctaaatcggaagggcagtttttccaaagatggagtatgggggatggcgaaggacgactgcagttcgttgagtggtttaaatctctactgtctaagtatcagcagaatcaagtcgtgattttcgatccttacttcgagaccgctggattgggactaatgctgatttgtgcagcaaggaattcagattatataatctttacatcactaccaaagccattaaaagcggatgaacatggacagtttacctcggggagagtcaataatctgatagcaagctgtaatcataatcgtaacttactaaatcgtattaaatttcgtatctatggactaaaagaagggcgactgcatgatcgttacattttgattatggggcgagatgagctcccgattgcaggatttcatttatctaattcgtttcaaaaggcggctgaaaattatcctttgctgataactccaatccctgcggatgttctgcttcaagtagagcaatataaatctgcgatggtgaaagatgcgatggctacgaagtttgattctaaggtcgagaattccgttatgcggcttattttcgactctacagtatcatcttcaacacaggaatgttacgaacctctaagctttttagaaaagtgtgatgctggctatgtgctcggcttgtggtctggagaaaactcactaaagggcctgagtggtgaccagctaagaactcagatgaaggcgttaggattacttagaaataattcccttatattgaaagatggattgaaaaactgcatcaatatgcaagaggtaaatattaggaattttatttcagtatgggaaatattaggggaaatactcgcaaattcttctataggagatactaaattaagatatcttgaattagagcaaggttttctcgagtttttgaggcaataccttaatagttcgttcgagcgcgtacataataacatggacaaggaattaaccacgttggacgtacaattatttcataagccaattgaaatattattgcattgtccttatcgcacagaacaactatgccatgcgataaaatataacgctcttacttggtcagaatattttgccataaagtttctatggctgtatgccccgaactatttgctgaatattactgaagcacaaatcttaactctaccaattgaacccaatgaaaccgaagccctaaggttatcattattaagtcagattattagcgaaatttcattatcgatagaatttggcatcaataaaactcaacttgataaccttattcatagtgaacaagggttacttcgctggatgggacttaatgctcttgaacgacaattagactcaccagatgcatacgtatcaacgttatcgttgctcgaagctttttcctatgaggaacgaatacgagcactagggtggatggttcaccatgcagcaatgaattcgaataaaaaggaaacctttaaaaatttagtagcagtgctacataaaatattgccagatgttgtgatagctgaagacctacgagttttggtcgactctatgcggggacatatgaaacaattatcatgggctgagccatggttatttcaagacgtggtgtttccgttgctacagagtgagcgtgttttgactgaagatgcctgtgatatatggatgcaagagttggcaagtatgttggaactgtactcaaacaatcagtctcatttgtttgagcgatcccgtgaagggcaaacgactaatattgcatcatacctttttgcctcctgttcccctgagcaaagaaaggtcagcctgaaaataatagatgatattttgagaaggaaaaggtggattattcaacagccactcgccagtacatcaggctggagccgatgggacaatgcacttcgagtgtccttgtggatactttcttttgctaaatggagtgagttttatctaagtgcgctaggtacgttcgatcaaaacttagaaaggttatcaggtgatgcacaaaggcttgtcatggttagaacgaaagaagaatggcaaaccgaaggtgttggtatacagagcgaactcattgagttcctagaacagggtgagaggcttttaagtgaaggcggtaggctgaaaaacgattctcataagctaaattaa

SEQ ID NO: 301769 - DNA, 894 bp, Proteus mirabilis
atgttttctgatttttggagttggatattaagtgttgctatatctactggtttggttggtgttattgggtattttttacgtgacactttaagtgttttttttgcaaaatctgttgaacataaatttgatagaaagttggaaaatttcaaggctgaatctcgtaataatgagaaagagctagagcaaattagaacgttccttgtatcagcccatagagagcgtgattcaatgattcaaactaaaaaattggaagcagcagaaatactgctgcgtgcacgtcacgaactttctcagctatcgatgcttgttgaatatatgaaaatcctcaatactgagagaatactcgataataaaggggatcctaaaattactgagtttattaatctactcataaaaccttttgatttagatgagaagattaaacaacttggttgttttgataaaacgtatcctcggttatatcttactgataaatcattgaagttatatgatgcatatgagggtattatcctcaatgcggctattatgatgaaacttttttctttgaacctacccaatagaagtgattttataaaagaaagtcagttaagtgaaaaaataattgaattagtacccctttcaaaggatggttttaagcaatttggagaggcttattcatatcactgggcaactcatttttataatgaaatattacgttcacttcggcacgaaatatctggtgcagatgatctgaatagagatgccgagtctgcggaacgtttagggataaattctcgtcgtgcacagatgagtatttttgcctctctggaacaagtaggtctacctgatactttaataaagcctgatgaaaaagcaatgcaacgtgctgtcgttgctgaaaaaacattagaatga

SEQ ID NO: 301770 - DNA, 231 bp, Proteus mirabilis
atgacagctccacataatacagaagttcaaagaacaattcatcacgcagcgagtgaattggcagctttagagtttataaatcaagatgttgcacgcgagatctcacaagttgccgaagcggtcgccaatatgtttacggtgctttattaccaggcagaaactggagatgcaacaaaacaggattttcaggaagcacaggctaagcttcaggaagtgttgttaacattatga

SEQ ID NO: 301771 - DNA, 210 bp, Proteus mirabilis
atgtgggtacttgcatattatgacactgccgttatagatggtgttcatgtaattagagcatcaggtgttattcaattcttcgaatctaaagatgatgccattaaagcccaagaaataacagatattatcaatgatgacgatgatatacgcacaatggtgtttccagcaaaagaatatataggtatctggcatcctttagaagggtattaa

SEQ ID NO: 301772 - DNA, 357 bp, Proteus mirabilis
atgaagccaatacttgatatgtgttgtggctctcgtatgttttattttgataaacaagacgaccgagttttatttaatgacattagagctgaagaatatgttttatgtgatggaagaattttaaatataatacctgatgttatttctgattttaaaaatattccattaccagataatactttttatcaagtactatttgacccacctcatttaattatagttggtaaaaatagctggatgtttaaaaacaacatgcccttttctccccttcattcgccctttagggatcacccattgtctatttttaaagtctatttcatcccatgtagcgtgaataaactcagattttctaactaa

SEQ ID NO: 301773 - DNA, 369 bp, Proteus mirabilis
ttgcaagagcgtgagatagttggttctgtttttacttatgccatagatagaggttatgaaattagtaacccagcagatgcaataaaggcatcttcgatagggacttttcaggcacgagaaagggcaatgtcaccgaaagaaatcggtatcttatttcttgaactggaaaactatagttgttatccaaccttaaaattggctgttaaatttgtcttgttaacattagttagaaaatctgagtttattcacgctacatgggatgaaatagactttaaaaatagacaatgggtgatccctaaagggcgaatgaaggggagaaaagggcatgttgtttttaaacatccagctatttttaccaactataattaa

SEQ ID NO: 301774 - DNA, 1770 bp, Proteus mirabilis
atggataaaactaaacaaaatgaattggttcgatggctgaaacagcaaagtgctccagcccgccgttggttacggctatcaatgattttaggggtagtcagtggtttattaattattgcgcaagcatggttattagccattctactacaagcgttcattatggatgggctaagtcgtgatacacatacgactactttccttatccttatcagcatctttattttacgcgctgtcgtgatggcgatacgcgaacgtgtaggctatcgctgtggtatggcggtcagacagcaaattcgcaaaatagtacttgatagacttgaagcgctaggccctgtatgggtcaaaggcaagcccgcaggaagttgggcaacgattattctagaacaaatagaagatatgcaagattactatgcgcgttatctaccgcaaatgtatctcgcctctattgtacctttgcttattcttattaccatttttcctattaattgggccgcaggattaattctttttgtcacagcccctcttattcctttatttatggcgttagttggcttaggcgcagcagatgctaaccggcgtaattttcttgccttaggtcgcttaagtggcaacttccttgatagattacgtggtttggatacattgcgcctattcaaccgtggtgatgcagaagtaaaacagataacggatgcaacggaagactttcgtaagcgaaccatggaagtgctacgtatggcatttctctcttctggcgtattagaattctttaccgccgtatccattgcggtcgtcgcggtctattttggtttttcctatcttggagaattgagctttggtgattatgggttaggcgtgacgttattttctggttttttagccctgatccttgcccctgagtttttccaaccattacgcgacttaggcacctattatcatgctaaagcacaggcggtaggtgcagctggctccttggttgagtttttagaagccgaaggtgaacagccccaacctacgggtaatcaaactattaataccgaccaaggtattgaaatagttgcccaacaattagaaattttgtcacatcaaggagccaaactggcaggccctcttaactttaccattcatcccaaacagcgtattgcactggtcgggcaaagtggcgcaggcaagagctcattacttaatgtattgttaggttttttaccttatcgtggctcgttaaccgtcaatggtgttgagttaactcaactctctccacaggcatggcgacaatgtatcagctgggtgggacaaaaccctaacttaccagagcaaaccctgctggataatattcgtttaagtgatccgaacgccagtgaagcgaagataaatcaagctattgaaaaagcttatgtaagtgattttattaacgaattaccggatggtttaaacaccattattggtgataatgctgcccgtctttctgttggtcaagcccaacgtattgcggtagctcgcgccctgttatcaccttgtcactttttattattagatgagccagcagcaagtttagactctcacagtgaacagcgcgttatgcaagcgcttaatgaagcttcattacatcaaacgacgctgttaattacccacttattagaagaaacgatggaatatgatcagatttgggtaatggaaaaagggcaagtcattgaaactgggacttatcagtcactcagtcaacaacatggtgcctttgctcgtcttcttgctcatcgtaaagaggaactttga

SEQ ID NO: 301775 - DNA, 162 bp, Proteus mirabilis
atgatccaaggggggattgataatttgccttattttttatttatgctttataccttatacctttctctcaaaaataaaatgtatcaaaataagtatctagcgacttatttgatgtttatctcttaccagagagatttgacagagaaaataatcctgatttaa

SEQ ID NO: 301776 - DNA, 2859 bp, Proteus mirabilis
atgtctcgtaaaattaaaaatatacttatctccatttttttagtatttattgccttggggctttatctcaataaaaatcaaatccaaccagagttaaagccaaatggttatagttattatcaaaaaggtgactataaagaggcgtttaattatttttcacaacatgcgcaaagtgatccgcaagcggcatttagtttagcaatgatgtattgggatggcataggggttgataaaaatgccttagcttcacaaaaatggttaataaaatcagcaaacttacaaaatagaaatgcactttataatttaggatatttacgtaacaaaggattaatccaaagtcctactgatgatgctcaaggattaacgtcattaactaaagctgctgatttaggctcttcaatagcgaaagattttttacatgaccttaattttcctgtgatttattatgatcaaaaagaatatacgctactccctatttatggtgagcaatcttggtctgaaaaaaaaagaacacttgaagaattagaaaaattagcagaagaaggtaataaagaagctgtatatcaatatttagagaataaggattcagtaaaacaatcaaaaaagactaaaaatatgatacgtccttttattgaagaaaaagatcctaaaatgatgtatttaaaatataagttaataagtcaagatattaacttactttttgattcagcatatttgaactatcctgaggcaacatatcttctgtatcaaatctacaagggtgataagaaaaactatccccttcaagaaaattcttttttagctaatatatatttaaaaaaatctgctgatttagcgcatcatgatggattaattaaaataatagagaaattaaataatagtgatacattatcatcaaattattttagaaacttgcttgaaaaatatattaatacattattattgaaatatccaaactctccacaagccatgctagcgctcgctaatgtctatttaaaaccaaatagtagtttttataattttgaaaaagcacttaagctggtagagagagcatataacatacagccatctcctgaaagcaaattattattggctaaattatattctaatagtgagggggttcatcagaatattagaaaagcagttagttttctgaaagaaaacataactaatgataaattgacaggtaaaagccaaagagaattagtaaaaatatattttgattttggtgcttctgattatcttaaaaaagaagagattgtgaatattttaagagagagtgtaattaaaaataaatcagctggtacatttaatcaaaactatagcttagctcatttttatgcagatcttcttttagaagaagatgtcgccaataatgaagaatatgctttttcattatatcaaaaagcacgaggttatgcctatgaagctacttttcatcaagcaattgcgactattaaatataaaaatataatagatgatcaagctcttattaatattgtttcagaattgaaagatgatttagaaagcagaaggttgacagaaaaaaaacgacaggaaggatatagtattcttttccgatatggaatggattcacagtatgtaattgattttattgtggaacgttcgctatatgatgataaaataagaaaggctattcaaccattattaagtcaaaatacaaatcttgcatttcaatatacaataaagaatataatacatgagaactcagctaacaatattaatgaagataatttaaaaaaatattataaggatatatttaaattagctgaaataggttctattgatgcaattaaatttattattacaaaagagtataaagataagaatgctcgcgatgaaatttatcaagactattcttttgataagttaactaatatcactattaaggagcgtttggcttggcgaagaaaatgtgcagatttaggtgattttatttgcttaaaagaattagctataatttatcgagacggtaaagagggggttagaaagaacattgcgaaagcatctgaatatgaacgacgtattagcatcaattcgtctcactttgagctggaatcagaaaaatatgaaatagatagaagatggaaggaaaaaagagataatacacttgattatttactaaaccaaaaagagagtagtaaacaacaactagaattagcaagattttatagtattgaagatagtggaagaagtttaatttatgccaaaaaagcatatgatttaggaaataaagaagcggctgagttaatttattggtactatatgcaaaatatctgtgaagataaagataatatcaataaagcagactactatcttaaagaatggctaacaacaggagaagaacctagtaaatacagctcttctaatgaatacaaatattctagtattagtatcattgctgattattatttagagtcaccgtgtttagttgaacgaaaccttgataaggctattgagtggtatcaattatcgttagattatccatatgaaataaatgattttttgtattctgaattaaataatatgtatactaatgcaccaaaatacataagtaaggatcctttcgtgaatgtgtatttatctacactaaaaaatcataacgattatattttagatatgaatattcgattaggaaaaatgaattttgcaatatcttcttttgacaaactttatgaagcacttctactcaaaggtgatgtgaaagaagcatattattatggtttactattaaattatgatgtgaataatgtcgctatgttttattctttatctgacattgagcgtaaaaatattgaatatcgtgttgctgattatttaaaagaaatacaaaaataa

SEQ ID NO: 301777 - DNA, 762 bp, Proteus mirabilis
atgtttacggtcattatcccaggtcgatatgcgtcgactcggttacccggtaagccacttgctgatattcatggcaaaccgatgattgttcgtgttatggaacaagcaaagcgttcaggtgctaaacgtgtcattgttgcaactgataacttagatgtggttcgtgctgttgaacaagcgggtggagaagcgtgtatgacccgtgaagaccaccactcaggtacagagcgtttagctgaggttatcgaaaaatatcaattcgcagatgatgagataatcgttaatgtacaaggcgatgaaccacttattccacccgcaattattacgcaagtggcagaaaatttagctaattgtggtgcaggtatggcaactcttgctgtgcctatcgtcgactcaaaagaagcctttaatcctaacgctgtaaaagtggttatggatgcgaaaggttttgcactgtacttttctcgagccactattccttgggaaagagatcgttttaatctctctcatgatgaaataggcgagcattacttacgtcatatcggtatttacgcttatcgtgcaggctttattcgtcgttatattacttgggagccaagcccattggagtctatcgaaatgttagagcagctgcgtgtattgtggtatggcgagaaaatccatgtagcaaaagcgcttgaagtaccgggtgtcggggttgatactcaagatgacttaattgccgcgagagccgcttttcgggcactaaaccaagagttctaa

SEQ ID NO: 301778 - DNA, 831 bp, Proteus mirabilis
atgctgtttttgctcaaaaaatatcttggtagcctaatcatgccactaccgctgttattaataattgctttttttgcgcttattttactgtggtttactcgttggcaaaaaacaggaaaaagcgtactcactatcgtgattgtgttacttacgctgttaggcatgcaacctgtcgcagatactctattgatgccgagtgaaaaagcgtatcaagcacgttatgaattacgcgaaaactcaccacaagatgttaactacattgtcgttttagggggcggttttacttataaccctgaatgggcacctagtgctaacctgctaaataatagcttatttcgtgttgctgaaggcgtaaggctttattatcgttatcctaatgccagcttaatttttaccggtggtgccggcgtcaataaaataagtagcgccgaagtggctgcacaagttgcacaatcattaggtgttccagcagaaaaaacgatcgccctttctcaacctaaagataccgaagaagaagcgtatgaagtggataaacttatcggtaaacaaccttttttattggtgacctcagcaaaccatttagcgcgagcagaacgtttctttttagctagaggtatgcaccctattgttgcacctgctaatcagctagccattactacccctctgcatccttgggaaaaatataccccttccgcgtattattttcagcatagtgagcgagcatggtatgaatttatcggctcgatttggcaaaccataaaacctagcgaaccatctagtgtagaggcggttgttgagaataaaaatgaagctgacaatggcataaaatag

SEQ ID NO: 301779 - DNA, 774 bp, Proteus mirabilis
atgtcagaccgtaattttgacgatattgctgataaattctctcgcaatatctatggcacaacaaaaggaaaaatccgccaagcggtgatttgggatgatttacaacaattattaactcaactccctgatcgtccgttgcgtattttagatgcggggggtggtgaaggttatttttccagacaactggcaaaattagggcaccagataattttatgtgatctatcacaagagatgcttaaccgcgcacaagaagcggctattgatgaaggtgttgtcaatcaaatgacgtttatttgttgtgcagcacaagagataaaccagcatctagatgatggtgttgacttaattctattccatgccgtattagagtggatcacagatcagaaaaacgccataaatgtacttaccgatatgctacttcctaatggtatcctatcgttaatgttttacaatgcgaatggcattgtcatgagaaatgctattttgggaaatttccatttggcaaatccggaaataccacgcagaagaaaacgctcattatccccacaaaatccgctacaacctgaggatgtttatcaatggttagcgtcattttcaatgacgattttaggaaaaacgggagtgcgtgtttttcatgactatttgcaaagtcgtcagttgcaaaataaagattttccagcgttgcttgccttagagcaacgctattgtcggcaagagccctatatcagtctggggcgttacattcatgtcatggcacaaaagtgtgtaaattaa

SEQ ID NO: 301780 - DNA, 1323 bp, Proteus mirabilis
atgagtgattttacccagaccgttcctgagttagtgtcttgggcgagaaaaaatgatttctctatttcactgccaccggaaagattagcttttttgatggcagttgctgtattaaacagcgaacgccttgatggcgagatgagtgaaggggagttgattgatgcctttcgagaggtgtgtaaaggctttgatcaacccgcagaatcaatacaagttcgtgctaataatgccattaatgatatggtcaagcagcggctttttaaccgttttaccagtgaactggtagaaggtaatgcgatatatcgtttaacgccattaggtattggcatcagtgattactacattcgtcaacgtgagttttcatcactacgcttgtcgatgcaattgtcaattgtggcaagtgagttagattcagcggcaagtgctgcagaagaaggtggtgatgcataccattggcatcgtaatgtttttgcaccattaaaatattcggtggctgagatattcgatagcatcgatttatctcaacgcattatggatgaacagcaaaatatcgttaaagaagatattgctgcactattaaaccaagattggcaagctgccatttcaaactgtgaacaattactatctgaaacctctgggacattaagagagttacaagacacactggaagcggcaggggacaaattacaagcgaatctattacgtattcaagaagcgaatatgagttcaggccatgtcgaccaaatagatactttagtttttgagttacaaagcaaacttgaccgtattattagttggggacagcaatctatcgatttatggataggttacgataggcatgtgcataaatttattcgcacggcgatagatatggataaaaaccgtattttttcacgtcgcctacgccaatccgtacaaaactatttcgacagcccatgggcattaacttatgctaatgcggataggctatttgatatgcgtgatgaagagcttgtgttgcgagatgaagaagtgaccggggaattgcctgaagagctggaatatcagatgttcagtgaagtaaatgaacaaattgctcaatgggttgaacaagagctggctgcttataaattagaacaacgagcgttagatctcagttcagtattagttgagtatcttaatcgttatccacaacagaagcattttgatgtggcacggattgtcattgatcaagcggtacgattaggtgtcgcgcaagctgaacttgcaggattgccagcaaaatgggcagaaattaacgaatatggagctaaggtacaagcgcatgtcatcgatacatactga

SEQ ID NO: 301781 - DNA, 732 bp, Proteus mirabilis
atgtcatcgatacatactgaacaatttataccagctaaattagcacaggcattagcgaattcacttttccctgaactggatagtcagctacgtgcaggtcgacatattggtatagactcactagataaccatgcttttttgatggactttcaagatgagttaacagatttttatgcgcgttataatgtcgaattaattcgggcacctgaaggctttttttacttacgcccccgttcaacgacgcttattcctcgttcagtgctttctgaaatggatatgttggtcggcaaaattctttgttatctctaccttagccctgagcgattagctaatcaggggatcttcactgtacaagaattatttgatgaattacgcacactggccgatgaaagcaaattgttacgcttagttaatcaacgctcaacaggatcggatttagacctacaaaaactgcaagagaaaatgagaacgtcacttaaccgactacgtcgtttagggatgatttcgtttttacccaatgatacgcaacgtttttcaattactgaatcggtgtttcgctttggtgctgatgtgcgtagtggtgactctcctcttgaagcgcaaatgcgtatgatccgcgatggtgaagctatgccactagagcaagatagcgagccaagtgatgacgatgaacaggaagatgagcaattagagtccagtgaagatgatgatgcagaggaagaaaataaatga

SEQ ID NO: 301782 - DNA, 4458 bp, Proteus mirabilis
atgattgaacgaggaaaatttcgctcattaacattgatcaactggaatgggttttttgctcgtacttttgatttagatgaattagtcacgactttatccggtggtaacggagcgggtaaatccaccaccatggcggcttttattaccgcgatgatccccgatctgactttacttcattttagaaataccactgaagccggttcaaccagtggctctcgtgataaaggattatatgggaaattacgcccgggagtttgttacgctgttttagatgtgattaattcccgccatttacgcgctgtcgttggcgtacgcttacaacaagttgccggacgagataaaaaggttgatatcaaaccttttatgatccaagggctacctattgctgaaaatccaacagaaattttgacgcaagctgtcgatggacgccaagcacgtgttctaccacttaatgaattaaaagaaaaagtagaagcgatagaaggcgttgtttttagacaatttaactcgattactgatttccactctgtactctttgatttaggggttattccgaaacgtttacgctcagcaagcgatcgggcaaaattctatcgtcttattgaagcttcattatatggtggtatttcaagtgccatcactcgctctttacgcgactatttattacctgaaaatagcggagtaagaaaagccttccaagatatggaaggggcattacgtgaaaaccgcatgaccttagaagctattcgggtcactcaatccgatcgtgatctgtttaaacatttagtcaccgaagcgacctcgtatgttgcagcggactatatgcgtcatgctaatgaaagacgagtacaccttgatcaggctctatctttacgtaaagagttgtgggatcagcgtaaagcgattaacaatgaagcttatcgctttattgaaatgggcaaagagttagaagagcaacaagcgttatcggctgatttggaaacagattatcaagccgccagtgatagacttaatctcgtacaaaatgcggtacgccaacaagaaaaaatcgatcgctatgttgcggatgttgaagaaatcacattccgtttagaagagcaaagtgaagttgttgaagaagcaacatcaaaaaaagaagagttggaagcgcgagttggatctgcggaagaagaagttgatgaactgaaaagtcaattggcagattatcaacaagcgttagatgttcaacaaacccgagctattcaatatcgtcaggcggtacaagcattagagcgtgcgaaagcacaatgtggcattgatgatttagatgaaaccaatgccgagctatgggctgaacgtattcaagcaaaaattcaatccatcacgcattcattactttctatggagcagaaactcggtgtttctgatgcggccaaaacgcaatttgatcaagcctataaattgatcacctcgattgttggggaagttgagcgtcaaaatgcgtggagtgcggctaaaagcgcattacgtgaatggtcatcacatcgccatcaagccgatcgtgttcaccctattcggatgcaattagctgaattagagcaacgcttacagcaaagaaataatgctgaacgtcaacttgcagagtttaataaacagtatggcaaaaatgttgagcctgatgatctatttactctacaagaagagctagaagcaaagattgaagagctgagcgattatgttagtgattctggcgaacagcgtatgcaaatgcgccaagagcttgatcaactaaaacaacaaattgaaaaattaagaaaacaagcgccagtttggtttgctgcacaagatgctttaacgcaactgtgtgaacaaacgcatcaatcttttgaaacaagcaatcaagttactgaatatatgcaacagttacttgagaaagagcgtgaagccacggttttgcgtgatgaaaccgctgctcgcaaacagcaaattgaagctcaaattgaacgattaagtcagcctagtggggctgaagatagtcgattaattactttagcagaacgctttaacggggttttattatcggagatttacgatgatatcaccttagatgatgcgccttatttctcagcattatatgggcctgcgcgccatgcgattgtggtacaagatctcagtgcgatcgaagagcagttagcttctttagaagattgcccggaagatctctattttattgaaggtgatccgcaatcctttgatgatagcgtgtttaatgcccaagaaatggaaaaagcggtacttattaaaagttcagataggcagtggcgctattcacgttatccagaaattccattatttggccgtgcagcacgagaaaaccagctagaaatattatcccgtcaacgagatgagctgtcagagctgtatgccacacaggcctttgatgtgcagaaaattcaacgtgcacaccatgcatttagccaatttgttgggcaacatatttcagtggcatttgatgccgatcctgaagaagatattcgccaattaaatcaacgtcgtaatgaattagagcgcgagttatcacaatatgaagaaggcacccagcaacaacgtcagcattatgcgcaagccaaagagtcgctcaatttattaaataaactcattcctcaagtcaatttattattggacgaaacattaattgatcgtgttgaggagctacgtgaagagctttataacgcagaagagtcaatgcgttatttacagcgtcatgagaaagcattaactgcgttagagcctatagcctcgattttacaaagcgatccacaagagcatgatcaattaacacaagattatcaatacgcaaaagaagagcagcaacgttatcaacaacaagcatttttgctggtggaagtggttcagcgtcgtccacattttagttatagcgatgcggttgaaattgtcagtgaaaataacgatcttaatgaaaaattgcgtcgtcgtttagaaatggctgaaacagagcgagcgacagcgagagagttatatcgtcaacagcaggcacaatgtgatcagtttaatcaagtactagcctcactaaaaagttcttttgataccaaatcagaactattaagagagcttgagcaagagatgaaagagactggcttgcaaattgatgcgggtgcagaagcgcgagccaaagagttacgtgatcaacgttatgctgcggtaagtgctaaccgtacgcgtattagccaacttgagcgtgatattgcgcttagtgaagctgaacgtgaaaatatggcgaagaaaattcgcaaattagaacgtgattatggccaaatgcgtgaacacgtcgtcagcgctaaagccagttggtgtgctgttatgcgcttagtgaaagaaaatggtatggagcgccgtttacatcgtcgtgactttgcctatctttcagcggatgagttacgttcaatgtcggataaggcgctaggtgcgttacgtcaggctgtggcggataatgaatatttacgggatgcattacgtcgctctgaagatgcaaaataccctgatcgcaaagtccaattctttattgcggtttaccagcatttaagagaacgtattcgacaagatattatcaaaaccgatgatccggttgatgctatcgaacagatggaaattgaattagcacgcttaaccgaagagctaaccagtcgtgaacaaaaactggcgatcagctctcgcagtgtggcaaatattattcgtaaaactatccaacgtgaacaaaatcgcattcgcatgctaaatcagggcttacaagcggtttcctttggtcaggttcgtggtgtacggttaaacgttaatattcgtgaaagccatcaaatcttactggatgtattatcggaagaagaagatagccaatatcaagatctgtttaaaaaccaaaacctaaccttctctgaagcgatggcaaaactgtatcaacgcttaaatccacaggctgattttggtcagcgtatgccacaaacggtgggtgaagagctacttgattaccgtaactatcttgagatggaagttgaagttaatcgtgggccagaaggttggttaaaagcagaaagtggtgcgctatcaacgggtgaagccattggtacaggtatgtctatcttagtgatggtggttcaaagttgggaagaagaatcacgacgcttaagagggaaagatatttcgccttgtcgtttgctcttccttgatgaagccgctcgtttagatgcgaaatctatcgcaaccctatttgaactgtgtgaacgacttgatatgcaacttatcattgctgcaccagaaaatattagcccagaaaaaggcacaacttataaattagtgcgtaaagtctttaatggaagcgagcatgttcatgtggtcggattaaaaggctttgggcaacaaagtgaaaaagataacattttatccgaaaatgttgcagatagttga

SEQ ID NO: 301783 - DNA, 654 bp, Proteus mirabilis
atggacacaaagcgcgtgggatatactgttgttgatctatcccaatggggacgaaaagaacactttgaagcatttcagtcttttgctcaatgcacctttagccagaccgttcaactggatattacttcattattaaaaaccgtaaagcaaaatgggtacaaattctatccgacatttatatacatcattagccgattggtaaataaacatgcagaattccgcatggcaatgaaagacggggaattggtgatatgggatagtgttaatcctgggtacactatatttcatgaacagaccgaaacattttcatctttatggagttactaccacaaagatatcaatcaatttttgaaaacttattcagaagatatagcgcaatacggtgacaatctagcctattttccaaaagaatttatcgaaaatatgttttttgtgtcagcaaatccttgggtaagtttcaccagttttaacttgaatgtggcgaatataaacaatttctttgcccctgtatttacaataggtaaatattatacgcagggagataaggttctgatgccactagcaattcaagtgcatcatgccgtatgtgatggcttccatgtaggcagattactcaatgaaatacagcaatactgcgatgagggatgtaaataa

SEQ ID NO: 301784 - DNA, 285 bp, Proteus mirabilis
atgatggcaataattcaattttatacaacaagaagcaaagacgaaaacccatcaaaaattactaacaacctccgatatgaatttccagatgatcataacttcagtgctgataatgacctcgattcatgcattgaagcatgtgcagaatattatcacgctgattgtgacggatgggaagataaatggccgttgttattcatgttatggattgacgaccaatatcttggcacgtttgaagttgagcgtgagtttgacccagtgttttcagcaaataaggtgggatga

SEQ ID NO: 301785 - DNA, 465 bp, Proteus mirabilis
gtgcagttaattattggttatcgaggaatgattgatctagcccgtcgctcaaatcaaataatcagcatttcagccagaacggtaaggcaaggcgatagtttccactttgagtatggactgaatgaaaacttaacgcacgtgccgggtgaaaatgaggactcaccaattacacacgtttacgctgtcgcaaggctgaaagatggcggtgtccagtttgaagttatgacgcataaccaaattgagaaagtcagagcatcaagcaaggctggtcaaaatgggccttgggtttctcactgggaagaaatggcgaagaaaaccgttatccgtcgtctttttaaatacctgcctgtttctatcgaaatgcagaaggcggtaattcttgatgaaaaagcagaggctaatgtcgatcaggaaaacgcctcagtatttgaaggcgagttcgaagaagttagccaaagagcctaa

SEQ ID NO: 301786 - DNA, 540 bp, Proteus mirabilis
atgcttttatctaaaaaaaatgaactagaagcaagtgtttactacaatggtgattactatattttagtcaccttttctggatgctcaatttatataatggatttaaaaaaaggctataaggttttacctaatgatattattgatgacgaattaggttattatgctaaactcgctctgattaaaagtgaacaaataaaaggaaattcagataagtttcatcaaatgtataatgataaaaaaatctatcaagactggataaaaaaaattgttaaagagtatggttataaaaataaaacagctctatttgaaaatatgaatttgtgtagtttaagtgttgtaggtaatgaaattatcattagacctcaaaaccatttacgtatggatcattgggtaggtgagggaatatctgatagtgcaattattacattaaaaaccaattgtagtgacgaggttttaggtgcttcaataaaaaagcttttacacgttgtattagtcgaaaaaccatcacttaatataatttttaaaatatcaattaagtga

SEQ ID NO: 301787 - DNA, 876 bp, Proteus mirabilis
atgaatttggaagataaactgtccggatggacaggtccttcgagtaatacggagcaggaaaaacaagaaagaacggagcggatgattcgccaagcgattgactcacacgaaccattcgacaattgctcactaaaggtttatgcgaagggatcattcgctaataatactaatgtgcgttcagatagtgatgtggatattgctgttgaatgtatagaggttcaatattgggatgaatcggagaaaggggtgcatactccagggaaactatatgagggtatttggactccagaaaagttaagaaccgaacttctttctgccatgaaagcaaaatttcctgggcagatagattcatcgggtaccactgcaatacaaataaattctaattcagcgagagtagatgctgatgttgttccatgttttagctatcgttactacatgaaaaatagatcgataaatggaacgaaaatatttaaaactgatgggagtcatattgttaactacccagcccaacagatgaaaaatggaacagaaaagaataatcgaactggttatgcctataaaaaaggtgttcgtctgttaaagcgtattgaaaattcaatggtcgaaaatgggacatatcacgaattgccatctttttttatggaatgcttagcttataattgcccagaaactgtatttgctcattcaacatggacagaacggctcaaagctatgcttatacatatttgggatagactacaaggtgatgagccaaccactgatcgctggttggaagtgaatgaatgcttttttcttttccactcaaatcaaaaatggactcgtgaagatgggcgtgagtttgctaaagcagcttggaactacttggaattcaagtaa

SEQ ID NO: 301788 - DNA, 972 bp, Proteus mirabilis
atgaataaattagcgcttcctacttaccaagatgtggttgaagcacatcaacgtattttgccatatcttaataaaacacctatcttaacctctcgcactatcaatgagttaacgggtgctcaattctattttaaatgcgaaaactttcagcgcataggcgcttttaaatttcgcggagcaatgaatgcattatcacaatttacggacgaacagcgcaaaaatggtgtgataactttttcatcaggtaatcatgctcaagctattgcactatcggcaaaattattaggtattccagctacaattatcatgcctgaagatgcccccaccgctaaaatgcaagcaacaaaaggctatggtggtagagtcattctatataaccgttatacacaagatcgcgaagagataggacaaaagcttgctcaagaagaaggattaactttaataccaccttacgatcatcctcacgttattgccggtcaaggtactgcagctaaagagttattcgaggaagttggtgagttagatatgctgtttgttcccttagggggaggtggtttactttcaggttcattattatcaaccaaagccctttcgccacattgtagaatttttggtgttgagcctttagcgggaaatgacggacaacaatcattacgcaaaggtgagataatttatattgatacgccaaaaactattacagatggcgcacaaactcagcatttaggcgattatacttttgagatcattcgcaacaacgtagacgatattttaacagcaacagatgaagaactaatttctgctatgcaattttatgctcagagaatgaaaatcattgtagagcctacaggctgtttaagtttagctgcagctcgtcaatttggtgataagttaaaaggcaaaaaaattggcattattatcagtggtggcaatgtcgatattatgcaatatggtcactttttatcacaaaaataa

SEQ ID NO: 301789 - DNA, 483 bp, Proteus mirabilis
atgtggcataccgtacaaaatatttttaatttaggaataaaagagttacgaagtttatcccgtgataaggcgatgctggcattaattgtgtttgcctttaccgtatcaatatactcatcggctactgtaacaccaggctcattacaccatgcgccgatagcggtggctgatcaggataaatctcaactttcggcccgtattgtcaatagcttttatatgccttactttttaccccctgcagatattacacccgagcagattgatggtttattagatagaggaacttatacttttgcgttagatattccgcctaattttcaacgcgatctactcgcaggacgtaagccagaaattcaagtcaatattgatgcaacacggatgagccaagctttcttaggaaatagctatattcaaaatatctttattatattaagcagtataaaaaacaagctatactgcttttttataataaataacatctag

SEQ ID NO: 301790 - DNA, 267 bp, Proteus mirabilis
atgacaacgtattggcatatgcaaattcatcctgatgatacttcgttcgctgatgaacatctttattccatacttgaaaataaaaaaataatcggtttaggtgactggcctgaaggtgaatcatccatttctaccttccgtaatgaagtggaagtgaatgacattgtagcaattaaaaatggtgcaaggctgatcgcgttagtccagattattggtggtacgtataccgttctagatgataagctagaagaggaatcacttaactag

SEQ ID NO: 301791 - DNA, 1422 bp, Proteus mirabilis
atgtcgatacctcaagacaaccaagccattgaagagttaattactcttgttggaggttcagataatgttattagcgtttcacactgtctaaccagattacgttttgttttgaatgatcccaatctcgctgatatagataaaattaaaaaaatatcttttgttaaaggctgttttaataatgcgggtcaatttcaagttattgttggtatggatgttgatatctactataaattattaattgataagctttcattaaaagctaaatctaaagatgatataaaatctgacgcgaaaaagaatatgggattctggcaaaagctgattgccaatttagccgaaatttttgttccattattacctatcttaatttgcggcggtttattgttaggattaagaaatgttattggcgaaatgcctatatcagataataaacccctcacttatttttatccttggttaacaccaatatatgattttctctggttaccttgtgaagccatcttccattttctgcctgtaagtatttgctggtcgagtgtaaaaaagatgggcggtacacctgcactaggtatcgtactaggtataaccttagtttctccacagctaatgaatgcttacaatttaggttcacaaattcctgaagtttggaattttggtttatttactattgagaaagtaggttatcaagcccaagtgatcccttcgattttagcgggactatttctgggatggtttgagactaaattacgtcgttttatccctgattacctaaaattagttattgtgccgattgtaactcttattgtcgccgtttttgttgcccatgttattttaggccctatcggtagaagcataggtgatggtctcgcccaactgatcaagtttttaatgttaggtgattttgcccctattggttcaactatttttgcctttttctattctcccatggtgatcaccggcttacatcacacaacgttagcgatagatttacaaatgactcaaagttatggcggtacacctatttggccgattatcgctctgtctaatattgctcaagcatccgccgttgtaggcattattatcgttagccgcaaattaaatgaacaagaaattactattccggcagctatctctgcttatttaggtgtgacagagccggccatgtatggcgtcaacttaaaatatggctttcctatgctgtgcgcaatgattggcgctgcgctagcgggtttgatttgtggattaaataatgtgctatctaatggtattggtgtcggcggattacccggtattttatctatccaacctacttattggttagtttatttattagcaatgattgtggctattgtcgtccctattggattaaccattctggtctatcgctataaagaaaaagcaggcaccttgcaagtcgattaa

SEQ ID NO: 301792 - DNA, 258 bp, Proteus mirabilis
atggtgttatgtgaagcatcttcttatggtattttttgtattagctctaattgcccaaccggtcctgaagatattataacgcctgaatcgaatggattactgtacccagtaaaggatgtagctagtttagctaatcacttacaaagtattattgatgggcgtttattgcctaagcataatgaaataaaaaatgctattactaaatttaatgatgaaaactttgcaaatcgtttattatctgcattaaagttgagttga

SEQ ID NO: 301793 - DNA, 924 bp, Proteus mirabilis
atgccaaatagcgccctattgaaaggtgatcatattgtcatcttgctattgatatcactatgctctttttctgtttctgcaaaaaaaatcattcaaggcattactcaagatagtgaaaatattgttgttgctaaaggggatattcccactcctgaaaaatttacaaccaatattcttaactaccggcagaaagctgttgatcagttgaccttagttgaaactgcattaaaaaatgtcattgttaacagtgaaaaaaatcaactgactgatgcccaactcgcctatcaacaagcgcattatcactatgaggtgatccgcccgattattgcattgtttggcgctactgaacgcctattaaataatcgggctgatttctttcttgaaagagaaaactcgccccgttttagtggatttcatttggttgaatatcaactctttaaattagaggatatgcaatcgtcagccgagtcagccaaagcactgttaagaggcattagtgatctaaaaaaacgcttagcgattgaagatattcccattgctaaattagtgcaatctgcaggtgatagtttagagctgattttaaccgacaaattagccggcattgaaaatcaatatgcaaaaagtgatctgggtgatgggtatgccaatttatacggttcacgcctaatcattgagtcgctatctaaccatattccacttcaggaatatcaatcactacgcaaacagtatgacactattagcaaactatttttaaaatatcagcgagatgaagaactattccagcctttagatacgctttctgatagtgagaaagcagtgctctttgcacaaataacacaattagcggagcaagttgcacaattacgtaacgtgctcaatattgatgtctattattactataaagaagcatatggtgaaaaataa

SEQ ID NO: 301794 - DNA, 231 bp, Proteus mirabilis
atgaaaaaacatttaactcctattatcatgttattaatattactacctgtgttttctgtaaatgcttattatatctatgaaactagctgtgaatacataatggatgataataaatcaaaagagaaccaagaagttatattgaagatatcaaattttatcttagacagtaataaagtggttttagctgacaatattaatgatcaatttaccatttcagtacattatcaataa

SEQ ID NO: 301795 - DNA, 180 bp, Proteus mirabilis
atgaaagataaatatagtgtgaatttacaagactacgaggaagaaggttttgaaattgagccgacaataaaggattgctttgttttaaatactccatcttggaatatggatgtgacaaaacaagacttaattgacatcagaaatactattaccgaaatactagaggctgataatgaataa

SEQ ID NO: 301796 - DNA, 156 bp, Proteus mirabilis
atgcaaataaccggatatgtattactagtgctaatacagggctctgctgtacctgtaacggaatatatatacacacaatcggaatgcaataaacgtgctgaatatttaatgtcagtgaggaatgttgaagttgtttgtggggaggtgctgaggtga

SEQ ID NO: 301797 - DNA, 1590 bp, Proteus mirabilis
atgtctaatcctatttttcagcaagaagttgctcgccgtagaacttttgccattatttcccaccccgatgcgggtaaaacaaccatcactgaaaaagtgttgttattcggacaagctatccaacgtgcaggaacagtaaaagggcgtggctcaaatcagcatgctaaatcagactggatggaaatggaaaaacaacgtggtatctccattaccacttctgttatgcagtttccttacgctgattgtctagttaacttacttgataccccagggcacgaagacttctctgaagatacttatcgtactttaactgccgttgactgttgtttaatggtcattgactcttcaaaaggggtcgaagatcgtacccgtaaattaatggaagtgactcgattacgtgatacgccaattttgacctttatgaataaattggatcgtgatattcgtgatccgatggaattaatggacgaagttgaaactgagctaaaaattgcctgtagtcctgttacttggccgattggctgtggaaaactgtttaaaggggtttaccatatcttaagagatgaaacctatctttatcaaacaggccaaggtcatactatccaaaactcacgagtaatcaaagggttggataatcctgagttagatgaagcgattggtgatgatttagccgttcaattacgtgatgagctagagttggtgttaggtgcatcacatgagtttgatcatgaagctttcttagcgggtgaattgactccggttttctttggtaccgcattaggtaactttggtgttaatcacatgcttgatggtttggtgaagtgggcgccagcgccaatgcctcgtcaaactgatatgcgagaagtgacagcggctgaagagacattcacgggttttgtctttaaaattcaagctaatatggatcccaaacaccgcgaccgtgttgcttttttacgggtggtgtcaggcatgtatgataaagggatgaaactgcaccaagtacgcacgaaaaaagatgtggtgatttcagatgcattgacctttatggcaggggatcgttctcatgttgagcatgcttatcctggtgatattattggcctgcataatcacggtaccattcaaattggtgatacttttactcaaggtgaaatgttaaaattcaccggtattcctaacttcgctccggaattattccgccgtattcgtctgcgtgatccgctaaaacaaaaacaattgttaaaaggtctggtgcaattatctgaagaaggtgcggtacaggtgtttagacccctagctaataatgatttaattgttggcgcagttggggtgctacagtttgatgtcgtggttgcacgcttaaaaggtgagtataacgttgaagccatttatgaatcagtgaatgtatcgacggctcgttgggttgaatgtagtaacgaaaagaaactcgaagaatttaagcgtaaaaatgagcaacatctggcattagatggtggtgataacttaacttatattgcaccaacgatggttaacttaaatttaacccgtgaacgctatcctgatattgagttccatcaaacgcgtgaacactaa

SEQ ID NO: 301798 - DNA, 1173 bp, Proteus mirabilis
atgaaagcattttttcctttatttaccctcgctacaggagcatttgccataggagccaccgaatttacacctatgggattgctacctaatattgctaatggactgagtatttccatagcaaccgcaggtggattaattactggttatgctgttggggtgatgattggtgcacctattatgacattaagtcttggcaaattaaccaaacgtcatgcattgggattattgttattattatttattgcaggaaatctattagccgcacaagcagatagttattggagcttaatgatagctcggttgatcactagcctaaatcatggtgctttttttggtatcggctctgtcgttgctgccagtttagttgaaaaacataaacaagcctctgccgtcgctgctatgtttatgggattgactatcgctaatttagtcggtgtacccttagtcacttggattggacaacaatatggctggagattagcctttatattaatttcaggtctgggttttattaccctaatcggattattaatgtttttacctgttatgcctaaaggaaataagcctaatattaaatatgaactgggtgttcttactcgcttacccgttgtattagcactattaacaaccgtatttggtgcctctgcactttttgccttgtatacctacattgctccttttttaaccaataccgttcatatatctgaaagccatgtcgctgtggtattagttattattggtctaggatttactatcgggaattacttaggaggaaaactatcttcttacggtatcgaaaaaacattaatccttttcttcatccaacttatcggctctatgtcagttttgccgttagtttccaataatgtgtatctggcagtggcgactatttttatttggagtatctcaagctttgcacttgttcccgcgttacaaattaaaacaatgcaaatcgcccatgatgcacccgccttagtttcatcggtaaatataggtgcgtttaatttaggtaatgctatcggagccatcatcggcggtatcgcattaaaatacagttataacattgtgcctttaaccgcggcactggtaggcgttattggcctgcttctcgtctattcacaaatcaaaataaaaaaatcgttctcctcagaatgttgcgttaattctttataa

SEQ ID NO: 301799 - DNA, 1038 bp, Proteus mirabilis
ttggttgatctggctgaagtggaaattaaatatggttttcctcttttctcaaaaccttcctctgtagttaatctagggaaaaatgaaaagattgtaatatcagatatttgggcgttctgggactatgttataaaaaaaacgagtaatgatcgtaaaggagaggattttttaaggtcacttctcgaacaggcaaaacacttttatataacagcggaaactagcccagtaaaaagccagcctctcctttattattattcatttctaaatttatcaaaaataataataaatcttactggtcaacatggttccaagaaaatgtatatgcacggaatgaatgaaaatcataataataaattttcacagtcaacaataacaaaacaaaaacaaaaacaaaaaattgttcaagttgcacatgaaatcgtttccatatttgaccctaatatagctaaaacagatgttcttttaaacgtgaaagagctcctaaaccactgtgtgggagtccatagagcctactctgaaatttataatcaaactgaagtcttttataagatagcgaattataaactattcaagaaaggaaaagagctaattttcaaggcagaacttcaatgttcggatattgacatggcaagtctcacagcttgtggatactcgataacacaagatgataatggaatattttattacactaccaaaataactatgtctacatataagccaacacgaaaagattatgctgaactaagccagaaaatacaaaataaaggaatttggtactttataggcaacactggttatacaatgtatctttcaaactcatctataggtcgttatagtcaagagtctattatttacatggtgatgttttaccttggttctataacacgttaccatccatacatgtttgatgaaatattttctgacaaagagcaatggttaatgagtgagtttctaaacacacaacctaaacaattcttatatttggcgactgccagaattcttggtcaaagtgttctgaaagcttacgctagtttttag

SEQ ID NO: 301800 - DNA, 591 bp, Proteus mirabilis
atgaagaaagtactgataatgtatcattttaactttgcctctaagggaaaatttgagcgcaaacttactcgaatattttccaagtcaaatgaccataaaatattttactttgaagatcatcataatctaatcaaacagtttttcactgcagatactttgacggagcttgcacctgaattacttgccgatccgtcttctattggtttaactcacgcagttatttttgattcagccactaagccagcatttcttcatcaccgagatgttttgtccaataaaattactgtgcgatatattatggacaaaatcacattcgtttcgaataaagatcgaggtgaacacttcgatacttattgtggaagaggaaccctgtggggaaacccttatgcaataggtgtagatggtgatcgagatgaagtaataagaaagttcaagtacgattttgatcgtgattatctgaagggtgggaatgatttcaaagaaaaactcaagaaattaagaggacacacattgggatgccattgtaaaccctatgcgtgccatggcgatgtcctcgctcaatatcttaatgaattagatgatggtgagtaa

SEQ ID NO: 301801 - DNA, 441 bp, Proteus mirabilis
atgaaagtgttttcaattggctttactgaaaaaactgcagagaagtttttttcacttataaaatcacaaccaactattaaaaacttagtagatgtccgtttaaacaatatttctcaactttctggatttgccaaaaagaacgaccttaagtactttcttaaggaattgtgcaatgtaaactatatacatcttccagatctcgccccaacaaaagaaatattaaatttatataagaaagggaatatttcatgggtagcctatgaagataattttttgaatttaatggcaaaaagaaatatcgagcgtatagataaatccttgatcgaagatagctgtttactttgtagtgaacataaaccacattactgtcatcgccggcttgtgatagagtacttaaataaccattggaatactgattttgaggttaagcacctgatatga

SEQ ID NO: 301802 - DNA, 681 bp, Proteus mirabilis
atgatcaaacgtttagtacttttagcttgctcttaccgtcctggtggacgttgtgtcgcaggcattgaattggttgataatgtatgtaacggctgggtacgacctgtatgctccacaggtgaaggccaagtacacgatattgatcgtatctgtgataatggaaactcagctaccaaactttctgttgttgaaattgatgtcggtgaaaaccaaagtcacccaatgcaacgtgaaaatatttattttaatcatggtgttaaatggaggtatatttcagcatatcctaaatcacatgaattcttagctcctttcctagaaacacctccgtctttgtgggaaaacggtacacatagtacgaacggtttaaacgataaagttcctgttggtatggttggaagaccaagacaatcattattcttcataagaccaacaaggctttttattcatattgctactgaaggggaagatttcggtactcctcgccgaaaagtaagagcgagattcttctataacagtgtggaatatattttttcattaatggatgctggagttcttgacgagtttagaacacatgaaaatggcgagtatgaaatttttaattcatatatgactgtaagtttagctggggaacatttgcaacattattggaaaattgcagcgtctattataagggttgaataa

SEQ ID NO: 301803 - DNA, 843 bp, Proteus mirabilis
atggcattagcagtaatatatacgcgagcctcattagggatctctgcaccacttattactattgaggctcatattagccagggattaccaggactcactttagttggtttacctgaaactgtcgtaaaagaagcgaaagatagggtaagaagcgcattaataaatagtggatatagttatccagcaaaaagaattacgattaatctttcacccgctgatttacctaaagaaggagcccgctatgatttacccattgcgttagctatcttaattgcctcagagcaattaatctctgataaattaaatagttatgaatttatcggtgagcttgcactttccggtaaattacaaaaagtgaatgcggttattccctcaattttaagcgccaacaaagataatagaatatctatcatttctattgaacatcaatcagaagtttcgctcttacctaataaatccgcgttattagctagccatcttttggatatttgtcatcatttagaaaataacactccattaattgaagctaaaaacaatattaatcacaaaacaattgaaaaccaaaataataaagatattagtgatattattggacaaaataacgcaaaaagagctgcagaaatcacagcagcaggaaatcacaacattttatttcttggccctcccggcacaggaaaaacaatgttggcgcaacgcattaatactctcttacctccacttacagctaaagaagcccttgatgtattaattatcagtagcctatcaatacgatacatcatgatggtaaatggcctttacgtccttttagagcacctcatcatacggcatctgccgttgctttaa

SEQ ID NO: 301804 - DNA, 1227 bp, Proteus mirabilis
atgtctttgaaacgtaaaattgcgctggggaaaaatgtattagaagctgctcaagagagagtccagtggatatttgatacttttgaacaaatcactctctccttttcgggagggaaagattctactgcgctttttcatcttgttgccgcacaagcgcgaaaacaacatagaaaatttaatgtgatgtttcttgattgggaagttcaatattctgcgactatagaacatattataaaaatgaaatctatctaccaagattgtattgaacagttttactggatagcactccctatcaccactgaaagtggcatttctcaatatgaacctacatggacagcatgggagcctggtaaaaaatgggtaagacaaccgccagaagatgcgataactgaccctcactttttccctttttatcacccaaatatgctttttgaagattttacccctgcatttaaccagtggatcacaggtaatcatcgcagttcgattatcctgctaggcataagagcggatgaatctttaaaccgatttattgccattagtaataatcgaaagttacgttatgccgatgatattccttggacaacggcatcagcagaaggcttttattatatggcctaccctatttatgattggcatgttaaagatatctggacttatatagcgcgtttcaatttaccctataaccctatttatgatctgatgcaccaagcgggcgttagtttaagtcaaatgcgtatttgtgaaccttttgggccagagcaacgcaagggactatggttatatcatgtgctagagcctgaaacatggagtcttgcttgtgaacgagtgagtggagctgatgccggaatgttatatacgaatcctcgtaataaatcaggtttctatgggcggcatcaaattagcaaaccttcccatcatacgtggaaatcttatgctcactttttattagccagtttaccagagaaaacagcagaacattatcgtaataaaatagcggtctatcttcgctggtatgccgaacgagattacccaaatggcatacctgatgcacaagaaggtgatactagcactaaacaaataccttcttggcgacgaatttgtaagaccatcttgcgtaacgatttttggtgtagaacattagcatttagtcctactaaatcacactgttatgatcgatatttcaaacggatacaaggaaaacgaaaagactggcaacttatttag

SEQ ID NO: 301805 - DNA, 756 bp, Proteus mirabilis
atgctattaaaaaaaatatttttagtgtcttttttattccctactctctcttacgctaataccttaccaacatcaaatatagataattcactaactcccaaccatgataatcttgcccgtttttcactcggtgacaatagtcaagcatccggtagcggtgccacagctataggtatcaatagccaagccaccaatactcgtgcggttgctattggttatgctgcattagccaatgaggaaaatacggtttcatttggtaatagtgaagagaaacaaacagcacgactcaccaatgtcagtgaaggtaaaaataatactgatgcagtcaatctggcacaaacaaaagcactacttagtaaaaataaaaggttaactgatagccaaataaatgtttttagaaatcaaactaataataacttaaacaccatcaaaaaaaccatccatgaatttgatgattattatcgaagacgccaagcatcaattaccgatgcaattgaagcactggataaaaaagttatttcattagaaaaaaaagtctatgcaggtattgcttcctcaattgccatgaccaatattccttatcttactcatcatacctttagtggtggcctcggtattagtaattatcgtactggcatagcacttgctggaggtgtccaatatcagccaaataacgatatagcatttcgatttaactcatcaattaatagtgaacaagagcttatttttggtggcggattagcttatggctggtga

SEQ ID NO: 301806 - DNA, 396 bp, Proteus mirabilis
atgaataatcttaaaaccctattaagaggtgtattccttacatctggggcactagtaacaacaggaggagttcgtgtttacatagccacagccgcatctgaacttatatataatacggtactaagaaatgccattgcccacaagttaattagaggtggtggaaatatagcaatggcttttgtgggagggtatggcatcatagagatggcttctcaagcaaaggaaagattacgctatagcaatcctactctgtattatgaccttgttttaatgaatttagaaatggggtattttatagtagaaccaaatatatcaaaatggttatatatgataggatctgaaaagaaaagtgttgatgaagtttatcgagcaataaatggattaatttataattaa

SEQ ID NO: 301807 - DNA, 324 bp, Proteus mirabilis
atgaaaggtgaaccacatccttttgccgcgactacaacagataaatttaaccctctccaacaacttgcttacttaggtgttatgtttgggttagttccactacttcttatcacaggagtactatgcttataccctgaagtcctaggttatggctattggatgttaaaagtacactttatattaggcatcgttgcactcatgtttatttgtgcgcacttctacttatgtactttaggcgatacctttacacaaacattccacagcatgattgatgggcatcatcgacatcaaaaacatggtgaaagcacaacaacaaaaaattga

SEQ ID NO: 301808 - DNA, 909 bp, Proteus mirabilis
atgtccagaagagcaaaagccctgtcccgtgaaatgcatatccttgcacgtcaggccggagggagctttaaaaccattgcagaccgggtcaaaattgcagaacgggttgcggcagagctggccgggttgaatattcagatacgatctgttgagcaactgaaatcccgccatattgaaatgtatatccatgcccgcagagaacagaatatcagtttacgcagctgtcaaaacgaaatgtcggctatccgggcgatatttcgtgttgccggacgtcataaactggctgaccctaaacatgagcgcctcagtaatgaggcgctggggctttcaggtgccagcagggttggcacccgtaccacgatatcggacgagcgctttcacgaagcgctcgctcggattgagccttatgatcagggggtggcattaactatgcagttatcccgtagtctgggattgagaaatgaagaagccgtgcagtcagtaaaatcattacggacctggcaacaggcgcttaaaaacggtaaagatcgcgttcatgtggtttttgggacaaaaggaggcagaccccgtgaagcattagtgccggataaagcccgtgtattaacattaattaataaagccattgaatatgcggataaacataacggttatttaattaatcgtccgtcattacattctgccaaagatcgttatattaatgtgatgcgacggataggcggatttattcacgaagaatcaaatcatggtttacggtatgcctatgctcaggatgttgaaaaatattatctcagtcagggattcagtcaaaaggaagcctatgcattaacctccatggatttagggcatggtgacggtcgtggcgattatattaaacgggtttatagtcagaaaggagatattgaggaataa

SEQ ID NO: 301809 - DNA, 612 bp, Proteus mirabilis; identical to SEQ ID NO: 14549

SEQ ID NO: 301810 - DNA, 897 bp, Proteus mirabilis
atgaatgaacaagaatttatagatgcggcaaacaacataattggaagtaattatcaaatagaaatttatgactggaaactcataaagcaaataataaatcatattgttgttaataactttcatggcgaggggagaaatattgtagattttattgatagaggaagttgggactcaatttcgcaattaagatttgatgatgtgaataggcaaatagaaatgatttggcatgacggctggatttatcatgcgacaatagagtcaatatttgtaataaatgctaatggtagcttttatgttctaataaaagcatattatcaggaaaaaaaaacattaaatagaaaatattccgctggttgccgaaatcatcaaatttctcattttggtgactatatggttgaagttagaagagaattcagagatagagaagactttatacaaataccaaatataaactgttatacaacttgcataatgacacgaccatcaactggagctgtgactagtaatggaacatcagaaaaggttatgcattttgttaatttactgctagcaaataataaattcttatcattaataaatgagataaatgcaatagatgaaaatgatagagactcattgcaagaaaaaggaaatacagctagaagatattttgaatatatattaatgcttataaacataaaaaaacaaatatctctaaatggtccttatcaaaagcaaatgttaggaagcttaaccccagtaataaatactttaaatccctctacaacattgcaaagagaactaaatactgcgcaaaacgtattaaatgcatgtagtcatcacggaggagttagaatacaaaaaacatctttaatatctgcaattaactcaataataaatttgataaagctcatgtaa

SEQ ID NO: 301811 - DNA, 462 bp, Proteus mirabilis
atgtcgattagtattgatatagctaatacctctgaagcaaaagaacttacaacaatcgctctggaatctaagcaatactggggatacagttctgactttattgagatgtgccgtgatgaactcacattgaaagaagccgattttgttaactctttaattttggtcgcaaaaaataatgaaaaatattgtggttttgttcaactcaagtttaatgataacgcaggacaaggggagctagaaaagctatttgtcgccccctcttttattggccaagggattggtaaaaccttgtatgaacgagctgtggaacatgcacgaaagatgaatgtaaaagagctagtacttgatgcagatcctaatgctgaaaatttttataaaaaaatgggcgcaataacgatgtacaatacaccttcagagtcaatccctggacgatttataccaaaaatgaaaataacattataa

SEQ ID NO: 301812 - DNA, 702 bp, Proteus mirabilis
atgaataattacaaaacaaaaacggaatatgagcatactttggagtcagcaatagccgcggttggagccgctattgcggatatttccagagtaaaaatactctgtgctttgatggatggaagggcgtggacagccaccgagttgagcattgctgcggatatctccgcatctaccacaagtagccatttatcaaaattactcagtagcggccttatttctgtgatctctcgtggtaaatatcgctattttcgattagctagtgatgatatagcaaaagttattgaaaatttgatgagcttctcaacagttcatgtatcacaagcaaaaattaccaccccagaacatttaagaaaagcacgtacatgctataaccatttagccggtgaaattgccgttaaaatttatcaggtactttgccaagaagaatggataacaaaagatggaacagaaataactgaattcggagataaacgctttaaattgatgggacttaatttccaagcaaaacattcgcgcaatatttgttgtccttgtttagattggagtgaaaggcgttttcatctaggtggacaaattggcagtgcattacttaatcatgcacagacacaaggttggataaaacgccaccaaggatatagagaagtgacgattaatgaaaagggcaataaagcttttgcccaatattttaatataacaatatga

SEQ ID NO: 301813 - DNA, 291 bp, Proteus mirabilis; identical to SEQ ID NO: 297184

SEQ ID NO: 301814 - DNA, 1167 bp, Proteus mirabilis
atgaaaatcaccatctcaggaaccggctatgtcggtctatctaacggaatactcctttcccagcacaacaaagttgttgcattagatatcaataaagaaaaagtcgaattattaaacaaaaaaatctctcctatctctgataaagaaatcgaagagtttttagccactaaagagctcgactttacagcaactttagataaagaattcgcttataaagatgctgaattcgttatcattgccactcctaccgattatgatcctaaaactaactactttaacacctcttctgtagagtcggttattcgtgatgttttagaatataatccaaacactactatgattataaaatcaaccattccggttggttttactaaacagatgagagaaaaatatcataccgataatattatcttctctcctgagttcttacgtgaaggtcgcgccctttacgataacctctatccatctcgtattgtgattggtgagcaatctgcaagagcagagaaatttgctgaccttttacaacaaggggcattaaaaaaagatattgatgttctttttactgattccacagaagcagaagcaatcaaactatttgccaatacttatctcgcactgcgtgtggcttattttaatgaactcgatagctacgcccaagcttacggtctaaacgcaagacaaattattgaaggtgtttgtttagatccgcgtattggtaatcactataataacccctcatttggttatggcggttactgcttaccaaaagatacgaaacaactgttagccaactacgaatcagtacctaataatattattggtgccattgtggaagctaaccgcacccgtaaagactttattgctgattctattatcgctaaatcaccaaagattgttggtgtttatcgtttaattatgaaatcaggctctgataatttccgctcatcttcaatccaaggcattatgaagcgtataaaagcaaaagggattgaagtagtgatttatgagccagaaatgaaagaagagactttctttaactcgaaattaattcatgatttagataagtttaaagccatgtctgatgtcattattaccaatagaatggcttcagcactaaacgatgttgaagaaaaagtttatactcgagacctctttggtaacgattaa

SEQ ID NO: 301815 - DNA, 402 bp, Proteus mirabilis
atgagatatattgataatttatcgttagcgaatttatataaagaagcagaaaaatcagaacgattacgtgcgcacttactattacatcaatctcataaagataaagtacaacgactccttattgctttagtgaaaggcagttatgttgaaccccattatcatgaactacctcatcaatgggaaatgtttgttattttagaaggaacaatagaagttgctttgtatgaccatatgggtgagataatagaaagcttcttagctggagaaaatactgatacttccattgttaatttagaaccaaacgaagtacatagtataaaatgtctctctgaaaaggcattaatgctggaagtaaaagaaggtccttttgacgcaaattatgctaaaaaattcttaaattaa

SEQ ID NO: 301816 - DNA, 495 bp, Proteus mirabilis
atgcgcttagtgaagaaaatgagcatttatcctgatgctcattttctttttatcggtcaaggcgatgaagttgatttaattaattcattagctaacaaatggaatttgagcaactttagttacttaccttctgtgaatcaaaacgaatttaaactcattttaaaagaaatcgatattggtttattttcacttgccgcacaccattcagctcacaattttccaggaaaattactgggatatatggctaaccatattcctattttaggtagtgttaatgtaggaaatgatttattagacctaataaatcatgaaaatgcaggttttgttcatataaatggtgaagacgatgatttatttgaatctgctaaaaagctctatcttgatataacattacgcaaaaaatgtggccatgatgcttataaactattgtgtaaagagtttgcagtgacctctatagcatcaacactcatagatagattaaggttattaaaatga

SEQ ID NO: 301817 - DNA, 1473 bp, Proteus mirabilis
atgaataaattaactccattacgacctatacctaccttaattgcggttgctattacccttatcatttggtttgttatccctgttccccaaggggtagatcccaatgcttggcacttgttagcgctgtttgttggtactattgcggctattatcggcaaagccttacctataggggcagtatctattattgctattgcgcttgttgccgcaacaggcgtcactaacccagactcaactaaaggcgcgattaatgatgcattaagtggcttttccaacaatcttatctggttaatcggtatttctattatggtttcaatgagtcttaataaaaccggattaggtgctagaattggttactattttatttcgttatttggtaaaaaaaccattggtatcgcttattccctagctattgcagaaacgatcctcgcccctgttacgccaagtaatacagctcgaggtggcgggattattcacccaataatgcgatctattgccgatagctttaattcaaaacccgaagagggtactagtggtaagattggtcgttatttatcgctagtcaattataatatcaatcctatcacctcagcgatgtttattactgcaaccgcgcctaatcctcttattgtaagcttaattatcggtgaaacagggcctgaaaatgagttaacttggtcaatgtgggcaatagcggcttttgttcccgccattgtttcattatttttaatgccgattgtgatctactttttatataaaccagagataacccatacgccgaatgctccccactttgccaaagagcgtttagctcaattaggccctatttcattgccagaaaaaatcactttgggagtatttgcactgttattaattatgtgggcaggaatacccgcactattatttggtgatgcttttagtattaatgcgactactgcggcttttattggtttatcaatcttattatgtactggcgtattaaattgggatgatattttaaaaaacaaaggcgcatgggataccgtggtttggttttccgcattagtaatgatggcctcttttttaggaaaattaggtctaattaaatggctttcattaagtgttggtgccggtattgatagtatggggataagctgggtaagtggtatgatattgctcgtgctgatttatgtctattctcactatttctttgctagcaccacggctcatattaccgccatgtttgctgcattctatgccgcaggtttagcccttggcgcgccaccaatgttattaggacttattttagctttctcttcttcattaatgatgtctttaactcattacggtacaggtactgcaccgattattttcggctcaggctacgcgaccttaggtgagtggtggaaagcaggttttgttatgagcattgttaacctcattatctggataacccttggtagtttatggtggaaggtgctggggtattggtaa

SEQ ID NO: 301818 - DNA, 264 bp, Proteus mirabilis
gtgacatatccacaaagtgctacaccagcaaaaactcagcatgtcgtttttgtaaaaacaacaaagtcgggagaagtatatcatttagattataatccagcaggtaaaactcatgggagtgattattggaaagtgataaaacctaatgatcctatagaaaaagtatatggtcgtataggccatggaaatttttctcattatgataaaataaaaaattcacctgtttatattgatggtgttttgatgaatccttggagtaagtaa

SEQ ID NO: 301819 - DNA, 147 bp, Proteus mirabilis
atgatttattctatggcggtgatggcaatgatttattttatggtggctctggaaacgatgttatatacggagaaatgggaaatgatgtgctctatggtgatgatggggatgatatgcttattgattattatggtgctaatatgttga

SEQ ID NO: 301820 - DNA, 282 bp, Proteus mirabilis
atgccaatcgatgaagccgtgtttgctacatcacgattaagcggtgtctatgtcaccaataatcaagggcaagaaggttttactgagcttacattacgtactttagaaacacgcaccccgctggtacgttgccatcgtcaatatttagtgaatatggattatgtcaatgaaattgtatttggtgataatggacaagcagaacttattttacataataataaacaaattccggtcagtcgacgttaccttaaacccttaaaagaggcgattggcttaatttaa

SEQ ID NO: 301821 - DNA, 720 bp, Proteus mirabilis
atgctaatgacaatgattaaattatttgttcttattccttatctattgttaggtggttgtagtgggcttatcaatatatatcttgataataaattccccgtcaatatgaataatgatggcaataaaatcacggtttattcaactatttcccctgaaacagtagtgcaagtccgaggtacttatacgtcaaataaatgccaacgttctcattttaattctgattataccgaagtctcttactcctctttaacacaaaaagtagaggtagaacgtaaaatagcagaggataataaaactgcgacctacactgtgcctattgatggagggggatggtgtaattggaagttgaaagaaatagatatagcaccaatatcggtgaaatacaaacaagatagaattagtactcttgtttttcctattgttaatagtgaatattcgagagtagaattatttacaacaatagctcctataatgattgaaagtgaaaatggccaatcaatctattattcactatcaagaatagaaggtgaaaagagtttatccaataaattaaatggaaaaatttattttaattataaagttgaacctaaactaactacgactatctcaaaggatgacaaagctattttccctaacggtaatattaaaacactgagtggttcgacttatagtaaaatgattggttttaatgaaataatcgagaatagtgacaactattaa

SEQ ID NO: 301822 - DNA, 975 bp, Proteus mirabilis
atgaaattacaacagttgcgttatatcgttgaagtggtgaataacgatttaaacgtctcaacgacagcagagcgtttatatacctctcagccggggatcagtaaacaaattcgtatgctagaagatgagttgggtatacaaatattctctcgcagtggtaagcacttaacacatgtgacgccagcgggggaagaaattgtcagattatctcgtgagatattatccaaaacagaagctatccgctcggctgcaggggaacacacttatcctgatcgcggttcgctttctattgccaccactcatacacaagcgcgttatgttttaccccctgtgattaaaggttttatagaacgttatcccgaagtgtcattacatatgaatcagggttcaccgacacaaattgcagaagatgtttgccgtggtaaaagtgattttgctatagcgaccgaatcactacatctgtataacgatttagtgatgttaccttgttatcgttggaatcgtattgtggtggtaactaaagatcacccattggcgcaaaagcgtgaagttaccttacaagagcttgcaacttacgatatcgttacttatacccatggttttactgggcgctctgatcttgacgaagcctttggtaaagtgggtttaaagcctaaaattgtttttactgcaacggatgcggatgtaataaaaacttatgtcaggctacacttaggtattggtgtgattgcgagtatggcatttgatccgatgcttgatagcgatttagtcgctattgatatgcgtgataaatttagttatagcaccacaaaaattgcatttcgacgtagtggttttttacgcggttatatgtatgactttatgtggcgttttgccccacatctaacacgtaatttggtggaacaagcgacagctttacgcaccaatgaagaaattgaagagttatttaaagatatcgagttacctttagtttaa

SEQ ID NO: 301823 - DNA, 546 bp, Proteus mirabilis
atgaaaaaatcattattttcactattaattctatctacacttgctttatcaacacaagctattgcacaacagattcaccttggtggttataatatagatatccaaggcagagtaattgacgagaaactaacttgtgtcgttcaagatattgctccaattcaattggatgatgcttacgttgattctttactacttactcctgaaaaacgatttagtgtggatttttctggctgtactaatcaagcaagagatagaaaagtcaaagtagtttttggacaaaaaaacactactcatttaatgaatactggttcgacagaaaatgataccaatgctcgagtagcattattgcgttctacaggtgaacttattccacttaatggtgagaattcagaacgtacattttcttcggaggttgccggtgaacgtggtagcttagaattttcattaaaatatgatagaccagcatcgattgatgatgctgttaccgcaggtgctttcagtgctgccttatctcttgatgcttacgtcactgatgatatccaataa

SEQ ID NO: 301824 - DNA, 831 bp, Proteus mirabilis
atgccattgagagagaaaaagtatcaccaaaatcaagagagcattttattttttccaggtcagggtaggccttatttaggtatgggaaatagggtatatcgtgacgttccatcaataaaagaagtatggaattgtgcgagtgaaatagcagggttcgatgtaaggacggtttgtttaaaagggcccatgaataaattggtacaaacctgttatcagcaagtggcgttaacaactatcaatattgcttctctttatttactgcgtgagcattgttgtgtgaatgaggcgggttattcagggcacagcgctggagaatattcagcgttatttgcggcgaacgtactggaacttgaatctgtctttaagttaattagttatcgcgcatctatcatgcaacagctcgctaagaataacaaaggggtaatgtatgttgttaaaaattgctcttatcagatgttatcaacattgattgaccagcaagatctcgccacaaaggtgaatatttgctgtgataacagtgaacttcaccaagttattgggggggagtatgcaagtgtacgtaaggttgttaatcaattagctaatatgaaaatagaaacgaataaattagccgttaatggtgcttggcacactgaattgatgagcgaagggaaaaatttacttgctcactttttacagacaatccctttttcaatcccagataaacccctagtgatgaatgtttctgctgagattgttagcgatattgagacaattaaacagaatttagttaatcaactcacagaaaccgtaagatggacagcaactatggcgctatggtgtcaatcatga

SEQ ID NO: 301825 - DNA, 537 bp, Proteus mirabilis
gtgttacatcaaagtggaataactttggcacctgatttaggtaatacttttgctattgtaaatactaatggcattgccggaattaaaactaatcgttcttcacaagccactacagacaataacggtaatttaatattaccgcacatcatgccatatcgtaaaaatactattggactaaacataaattcgttacctgaatttagtaatactaaaactcaaagtaaaatcatcgtacccactttaggtgcggtagcaaaaatcaatttccctataaatatcggctataatgttttatttacctcaaatacaccaattccttttgctgccaatgtaatggcatttgatgataataataatctcatttctagtgattctgtctatgaccacaatagaatattcctctccggaataaaagaaagcggaacggtacaagtaaaatggggagatacagaggagcaacaatgtttcttccattataacgtaaaaaatgaaagtaaaaataattcaattattaagaaacaaatttattgccaataa

SEQ ID NO: 301826 - DNA, 318 bp, Proteus mirabilis
atgagtcaaaatagaaaaaaggcaataaagcaattagttaaaaattggcaccgttgtattaataaacagacgggttcaatttatataactgcgttactgacttataaatatatttctatacttgaaaccgcattcacagcgttacctgttaatcttaattgctattttttaaatcgtctttatggtgatagtgggtttatcacaccggctcttatgttcgatcatttacaaaaagcagcagatagtgcctctcattaccttttgagtgcgtttgatggagaaaatggtgtttggctggttgattgttggaaacaataa

SEQ ID NO: 301827 - DNA, 258 bp, Proteus mirabilis
atgcttgtctcttgtcctcattcaggaaatatgtatgtgacattaaaaccctataatgagctagtcaatgggagtaaaactgggatgacaatgtctccaagtatccctttgaaagataaagaagtcgcaccttatatcacggtatctgatgcagctaaaacaataactaatgcagtatgtaataacaattcctccgaagctttagagttttatgcaggacaaccttcaggcaaatataatggggggatctgtttataa

SEQ ID NO: 301828 - DNA, 123 bp, Proteus mirabilis; identical to SEQ ID NO: 298644

SEQ ID NO: 301829 - DNA, 213 bp, Proteus mirabilis
gtgcgatatatattattattctttatctgtttgttttttattgttatttttctattaaaaacacagggcagtaccaaaaacgatgttattaaccaacccacagaaatagaaagaaaattaaataaaaaagtcgaaagatgtatgtttcactcaaaaataaaaactaaacgtttgccttggataatgttaacgcgtaaacgttcatgctcttag

SEQ ID NO: 301830 - DNA, 2418 bp, Proteus mirabilis
atgagcaatcagtccgatcatcatagtattaagccaatttccggtgatataagtcgtcgccattttattcaagcgagttcggcattagtcacactgccctttttttcctccaacacgatggcggcaacacaagatcatgcaatagctgaaaaaacgattgacgccaaagagagtgagcgtgttgtctctacctgtagtagttttgactgtggcggaaaatgtgatattcgcgcgcacgttaaagatggcaaagtgacacgtattagcactcgacctgacgccgatttagatgaagagatgcctatcatgcgagcctgtgtacggggtcgtggttatcgtaaatttgtctatcatcctgatcgattaaaatatcccatgaagcgagtaggtaagcgtggtgaaggtcgatttgagcgcatcacttgggaagaagctacgacgcttattgcacaaaatatgcaacgcattaccaagcaatatggccctgcctcacgttttgtcagtttaagcactggggtgactggtggcattttttctggtgctaatatgctacgccgtctgtttaacctaaccggcggctttctggagaattatcactccgtgagtaatggtaacacccttgccgttaccccttatacttacggtacagccgctagcggaagtacattagatacattagcaaatacccctttagttattctatggggacataatcctaatgaaactatttttgggcattccaatcattacttccaaaaaatgaaaaaaaacggcactaaatttattgtcgttgatccacgttattccgatactgcctcttctttagctgaccagtggatcccgctgttaccgaccactgataacgcgatgatggatgccatgatgtatgtcattgtcagtgaaaacctgcatgatcaggcctttatcgataaatacacccttggtttcgatgagcatcagatgccagaaggcgttggtgaaaatgagtctttagttgcctatttaatggggaagaaagacgggatcaagaaaacccctgaatgggcggagcctatcactaaagtacccgcagatactattcgtcaattagcccgtgaatatgcttctacaaaaccggcagcattaatccaaggttggggaccacaacgtcatatttgtggtgaacggacggcacgcggtgcgacactgttagcgactattaccggcaacgttggtgtacgcggcggctgggcggcaggctatggcatggcattaaactctgagttacgtaaaaccattgccggcccaagtttattgaccaatcccgttaaagcaaaaatcaatatcaccaattgggtgcaagcgtgtgaagataaaaatttggtcacaccacaaaatggcttactcaatgccgagaaacttgatactgaaatcaagatgattttctcaatggcgggtaattatatggtgaatcaaaataccgatattcttcatgccgctaaagtgcttgaagatgaatcaaaagttgaatttatcgtctgtagcgacctctatttaacacctagcgccaaatatgcggatatcttactgcctgaaaccagctttttagagcgctggaatattggaggcacatggagttatggcgattatattattctgtccgaaaaagtgatagagccagagtttgaacgtcgtaccgactacgattggttacgtgaagtggctgataaactgggggtcggtgaacaatttagcgaaggtaaagccactgatcgcgactggattgaatatttagtcaatgatgccagtattaaacgtcctgaagatggtattcctacctttgatgaattattggttaaacgtcgtcatctgctaaaacatcgccctcatacccaaaatgttgcgtttgagaaaaatattcaagatatagaaaataatccatttccaaccccatcaggaaagattgagatcttctctaaacgcttatatgagatgaagaatagcgagatccccgcactttctcattatgtgcctgccattgaagggcccgaagatacgttaacagataaatttccactacaactcatcacgtggaaaggacgtaaccgcgcaaattcaacacaatttgctaatccttggctgcaagaagtacaacgtcaagaattatggatcaacccattagatgccgaagatagaaatatcaaacaaggcgataaagtcaaagtctataacgaccgtgggatcaccttagttcccgtcaaactcacacaacgcattatgcctggtgtcgttgccttacaagcaggtgcttggtggcaaccagataaacaaggtatcgatcaagggggatgtgccaacgtcttaacctcatcccgtagcaccgcaatggcacacggtaatgctcaccaaactttattggtcgaggtagtaaaagcatga

SEQ ID NO: 301831 - DNA, 600 bp, Proteus mirabilis
atgacacagacaccactttacgaaaataacacaccgaaaatcagccaaatcattacgttggcgttggacggtgaagccattttattaaaaaacctgaccgtcacaccctcgatgatgtatcaggacaaagaccaatcaggacagtcctcaagcaccgtcaatagtgagcagggcattaagcctaaagaactccgcattacgggcactattcctttcaccgaagaaaaaacgctaacccgtttatttgcgttagctgaagccaaagaaaatggattactaaaacgttatcgtgtggccaaccgtatggccagcgcgattaattttcgtcttggcacattcaccaatggcattgatgcgtcaaagatggacggtaaacaagcctggcaagtcacctttactttacgtgagcatttatccgtacccgaaaaacgcgaaagtcgttcagcagggcaagttaaagccaaaacacaaaatatgggtaataaaccgaacgctaagggtgagggaacggcagagcaagaacaaaaattaaattggtttgaacgcagggtattaaaaccgttaaacgaggcattagggggaagtgatgaaacccattaa

SEQ ID NO: 301832 - DNA, 621 bp, Proteus mirabilis
atgagcaaatatagtttagatatccagaaaggaaaaatcggtgataatggtttggcagaaatcgcaggttgggttaagtgttatttagctcatccaattacgcatgaatatatgggcgcaaccatggaaaatgtcatgtttgatgtttcattatctgcgggggcttatttagatgaaccaccattaccccaaaaagaaaatcaagccgttagacgtagagaagatggtagtgcatgggagattgttgacgattgccgaggtttaaccgcctacaatacgcaaacaaagcaacctatcatcattgattttatggggccattgcctgaatctctcacattgttaaaaccgaatagtgagtttgataaatgggatggtaagaactggattgttgacacagaagcccaaaaagcggcactcattacacagattaagcaggagaagtcacaacgcttagatgaagcagataacataatcacttatttgcaagaagctgttgatgttgacttagccacagaagaagaggctacagcactgcaaaaatggaaaaaataccgagttctgttaaatcgtgttgatatttcaacggcgccagatatcgaatggccggagaaaccacaatga

SEQ ID NO: 301833 - DNA, 2211 bp, Proteus mirabilis
atgtcacaatctgcaattacattggcgtttgagcgctggaaagccagtgccaccgaagcacagcaacccgttattttagacgaattcgtgttagcaaatgtgccgaacttggatccatctaaacccattgaccgtaacgagggtttgcctgacgcaaaatatattatgcatcgacaagcggtgaataaaacgggcgtcgtcaatcaaaatgccgtggcctattcggtcactatcggtgccgaaattggtgattttgattttaactggattggtttattaaacaaacaatcaggcacggtagcgatgattgtacatgcgcctactcaacgcaaaataaaaacacaagcgggacaacagggtaacgtgttaacccgttcttttttactggagtatttaggagcaagcaaagaaaccgcgattacgacacccgccgaaatgtggcagattgatttcacggcacgtttgtcaggaattgatgaaatgcaacgcctgattaatcgtgataagtacggtgtggcatcattttttaataatggttttttagttgccaaggcgggtaatcaattttatatcacaaagggattagggtatatcgaaggcttgcgcgccgagcttgcagaaaataaaaatatcacggtaacgaatcaaacgacaaaagtttgggttgatgtgagttaccagggaaatatcacaagtgattggggtgtgcatattgcgatcactgtaaaacctgatttgaaaaactataccgataatgcaggttttgcgcattttgtgtttgcggtagcgtctatttcggtaacgggtgttatcacggacttacgccctaaaggtacgctagatgcacaatactttgaagatgcattgaaaaagcatgaacaatcacggaatcatcccgatgcgacaacaacagtaaaaggctttacaaagttaaataatcaggtgggtgacagtgaaaataccgcattaactccttacggcgctaaaaaagaattagaaaactatcaacccaaaggcaattatcaacccgctggtaattatgtcactactgcgacatttaatttagaaatcaataaaaaaatagataaagcaagtctctcacagcaacttggtaatgatgtaaataaagtacctagtttagatttggtgactaaagagctagggaataaacaacctaaaggtgattatgcattaaaaacatgggttgataatatttattataaacgagatgacagtccttcatttaatgaaattagtgctacagctattcgagtgaatagtgttaacgtcgcgctaaaaggggattgctatacaaaatcagaatctgataataaatattctccgaaattaccctttgtatactcttcgggtgaggagtcaaaaatcatatcaccaaacaataaaatccttatttttgttaatgataatggaacaacaggagggtatgacagggatactcaagcaacagtctgggggtttgataaacgtggatttatgacaagaggcactgtgcattttgacagaatgtcaggtgtttattcacaatcacaggtagatgctaagttaaaagagtgcctaaatttaaaaacatcatcaaaacaatttattgcaagtgatatatatgcacccactttcattacaggctcgcagtatggagaacgttcctatttagaacataaaagtgatgagcttactattacccacatatcgccaaaatcaggggcaacaaatattacttgtagaaataaaagtggtaccttagcactattgggtgatctcgaagatgttaataatatccctgttggttcccctattccgtggtcattagctacagcaccctctggttatctaatctgtaatggtcaaacatttaataaatcaacatacccaaaacttgccgttgcttatccatcaggaaaactacctgatttgcgcggtgagtttattcgtggtttggacagcgggcgcggtattgatgcggggcgttcggtattatcagttcaaaaaggtaatagcttgttatccagtaatatttttggtggattgagttcatcggaatcaaataaatggcataaagcaattaattatatcggtattacaggtactgataatgacggtggttatggagttcaccagcaaatagaaggcgctaatggaaatgagactcgcccacgtaatattgcctttttatatatagtgagagcagcataa

SEQ ID NO: 301834 - DNA, 1119 bp, Proteus mirabilis
atgtggccaactgttcaggttaatcaacataaccaactgcaaggcgaaacaaaagaaattgaacgcattttgctgtttattggtaaaggaaaaaccaatattggtaaaactattgcggtcaatacgcaaaccgatttcgatgaggtgttaggaacgccagatagcccgttaaaaagtaacgtgttatcggctatgcgtaacgcaggtcaaaactggtcaggttatgtgcatgtattagcagaagatgccgaagaattggcatttgttgacgcggtgatggatgcacaagcggtcgccagttgtgaaggctacgtattagtgggtgatgcgacgaaagccgttattcaatcggctaaatccttacgctcggatttaattgccaaatatgggcgctggctgtttgccattttgggcgtagcagctacacaagacgatgaagcgtggtcgagctatgttgaacgcttgtctgctttatcaaaaggggaagcggaaccctctatacaattagtaccaatgttatggggtaatgaagcgggagcattagcagggcgattatgtaaccgtgcagtgaccattgctgatagccccgcacgagtcaaaacaggcgcattaaccgatttaggtagtgcgtatttaccgctcgacggtacgggtaaaagccttgatttagcaacactgcaggcattggaaaaacagcgttttagtgtgccgatgtggtatccagactatgacggcatttattggtctgacggtcgcacattagacgttgaaggcggtgattatcagtcaatcgaaaacttgcgtgttgttgataaagtcgcgcgcacagtgcgtattcgtgccattgctaaaattgccgaccgcagtttaaacagcaccccatccagtattgaagcccatcaagcctactttgccaaagtattacgtgaaatgtcacgcagtacgcaaattaacggagtaagtttccctggtgaagtgaaaccgccaaaagagggtgatgtggttattacatggaaaaacaaaaataacgttgaagtgtatatcacggtgcgaacctatgaatgcccgaaagggatcaccattggcatcctgttagacacgtcattggagaatgaataa

SEQ ID NO: 301835 - DNA, 453 bp, Proteus mirabilis
atgttaaacgggaatagcgttacttatcaaaatgaaacactaacaaatgatgaattttggcctgatttaaatttaggtgattttcaaaaaagtcgcgctattcccgccaatatcgatgctgattttattgctgatgcattattaactacggtcacagagattaattctgaattaaaagacgtaaaaagttattggctatcaaaaggtgttaatcaggcaaaagacgccccaggcgcaaaaataaaaggggtgaatgccctttgtgcgcaatataaaaaagcggtgtatgccagggcaaaagccgatttgttgggtgaatatttgtcgattgtcagtcgagcgcccaatccacagcaagaaagcgacgaattacggtcacggttattagcagaatcaacttttgttattcgcaatatgaaacagttgcctcgcattacggtaaaaatgatatga

SEQ ID NO: 301836 - DNA, 504 bp, Proteus mirabilis
gtggagacaaaacaatttattgtttattggtcatggaaactggtacgcccgctttttattaaggacaaaaggatgaaagggaaaatattacgttggattatcactctgttattttcaatctcgctattaactggcgttttgatgcagaatgaaagtcttttaaatattggtgtgtcaatggcttggattgccgtgttattggctttgttttgtagcagtattgtttttattgcttggtatgcagtttcatttattaaaaatttacctgaaaaaaacaaaagtgaattaagtgattttttctttaaattgacaaataaacccaaaaacagattttactggttatttctcgtcagtgacattgttggaattatctgtctgattttatcgggttggattattaccgcgatagctttcgcctttgtctatcttttgagtcaattaataaagaatttttctttagatgcactcgataacttgaataaaacgagtacgaatgaatgttaa

SEQ ID NO: 301837 - DNA, 1032 bp, Proteus mirabilis
atgtcacaacttaatgaacgtgcagataagtttttagcgagttatgaaaatgcattagcaaaagcgttcaatgttactaatgttaatcgctatttcaatctaacagacccgcaagaaacaagtctgcgtgatgcattattagaaaatgcggattttttaaatttaattaccacggctgacgttgaccaaatgcaggggcaggttgtttctgtgggtaaccctggcatttttacagggcgtaaaaaagatggtcgttttttacgtcaaaccaatattgatggtaataaatatcaattagttgaaaccgattcaggggctggattacgctgggatttattatccgtttgggcaaactcaggcggtgaaagtgagtttttcgagcgtatgcaagggtttatgttgcgttcttttgctcttgatatgatccgtattggttggaatggtcaatctgttgcagaaaatactgacccagttaaaaatccaaacggtgaagatgtcaataaaggctggcatcaaattgctaaagattggaatgggggcaaacaagttcttactgatgcaatcacattagatgataacggtgattatcgttcgctagatgcgatggcatcagaccttattaatacctgtattccggttgaatttagaaatgacccgagattagtcatatttgtcggtgctgatttggtttctgcagagcaatatcgtttatatcaatcagccgataaaccgactgaaaaaattgctgctcaaatgttaggttctacgattgctggccgtcctgcaatgataccgccatttatgccaggtaaacgaatggttgtgactattccaagtaacctgcacatttatactcaacggggtactcgtcagcgtaaagtggagtttgttgaagaccgtaaacagtatgaaaacaaatatctacgtaatgaaggctatgcactggaatatccagagttatatgcctctatcgacgaatctgccgtgactatcggtaaagtcaccgagccaactgaaaaagtagaaggttaa

SEQ ID NO: 301838 - DNA, 975 bp, Proteus mirabilis
atgaagattggcttaattgatgtcacaatcacaatgtcttatggtgggatccaaaccgcagtatgggagcttgccaaacagttacatgatgcgggacatgaggtacatctttatgggggcaatggtgatgtcaggcatgaactagcaggccgacaaattcatattcatacctatccttatacaccaagagagaaagttatcgatctcggtggtcgttttcgtcgtattgttgaacgttatagttttgctcgctatgctaaacaagatgttattcgacaaaattttgattgggttattttaactaagccgtttgatttcttttggcctgcaatgatgcccaaatcttgctcgacacgtttttgttatatgagtggtggcaccagcttttttaaaggcgatcgtaaactggcgaaaaaaatctctgcctgggttgcgtgtagccattttaatgcttggcaaattcagcagcattttaaacaatttcctgcggttatctataatggtgttgatatggcaaagtttaagcctatgacaacatctctgcgccaacagctcggtgtgagtgagcctacgtttttattggcatttgcggggcgtgtagtcggttggaaaggcttaagtgttgctattgatgcaatagcccaattgcgagatgaagacgttaagttgctgatcatcggcgcgggtgatgcgctggaacaattaaaaaataaagcgatggtaaaaggtgttgctgaacaagttatttttcatcaaccagttgagcatgcaatgttacctgagtttaatgagcaaagtgcaggattattggtaaccccaggtgatgtaaccgcaatggtgaaagccatcaaccatcttcgggtattgccggatagaggtaaagcaatgggtgaaaatgcacgccaacgcattgcttctcactatacttggcaacattcagcacaacgattactacaggcattaaaaacagaatga

SEQ ID NO: 301839 - DNA, 543 bp, Proteus mirabilis
gtgccttttggtgatcttaaatatgagattaacatacctgaaatagtagaaaatcgtatagtagattttattaataatttaccttataaaaaaaatgtagtaataaatcctttttctgcatcagaaaaaagagatatttcaaaagagcagttattgtttataatttcttatttaaaaaaatattctgtaaatattatatttattgggcgtcaagatgatttagttaatcttcaggtcgatagttttttaagtaatcctattggagattttattagtgcgtcagcaataataaaacatgctgatttaattataacaccagatacatctattgtgcatgttgctactgcttttgataaacctacgctcgctttatatggaaatgattatcatggtaagtatgtaaataattttatgtggtcacctaataataaaaaagcaattcagataacacagaagaaaatagatagtaaagtgagtgatatatcaatagacctaattaaatctaaattagattttcttgtggataaatatttatgtcaataa

SEQ ID NO: 301840 - DNA, 789 bp, Proteus mirabilis
atggttaaaggactttttgcatttgaaacgcaaggagtgcattatggtcttttggttgatagagggattcctagattaattggaacattaaaggatccaaactttttcatagcatttaatagtattttcctatttctttcatattataattttaaagaaagtaaaacagcgaagttactttttattttgtccagtgtcacttgtttatctactttttctattggtggtttcattgctataatttgtggttttattacaatgtctttacaaaataaaaagggtatatttagacttctttctttaattttacttattctctgtatatattttattagtatctggttatatcctgaaattaataaatttataatgtctagattatcaggagcatcagatggaagtggtcgttttaatgattggaaaaatgcattaataactttcttaaattatccatttggtataggaatttactcgtttctcgcttataaccaagaaattcttggaggtattcattatgttcataatacatacttagaggtattagtcgaaggaggcattcatacattttctttctatatattatttataattgtattattgctaactgtttataaattagggaaaaaaaatgaatattttgaatttttactacctagtacaattacattattgatgtcatttttttctttatctggatttgccagcgaattttggttattttatttagctatagttcacttttgttgtaataaagcgtcgaatgataacaagttaagtcaaaagaattaa

SEQ ID NO: 301841 - DNA, 237 bp, Proteus mirabilis
atggacattgttattcaggctgacagagatcagttcagagaagcaggacaatggcttgaccaacctctacataagagtgtgcttttctccaagtctagtgaaatatgggaaagtatcagggggatttttcacggcgaattttctgaattggtttatgacagtgatcttccctctgatgatgaagttttcagcttactttcctcagtgggcagtcttttgcaaaaatggtctgattaa

SEQ ID NO: 301842 - DNA, 195 bp, Proteus mirabilis
atgaatttgtgtagtttaagtgttgtaggtaatgaaattataattagacctcaaaaccatttacgtatggatcattgggtaggtgagggaatatctgatagtgcaattattacattaaaaaccaattgtagtgacgaggctttaggtgcttcaataaaaaaagcttttacacgttgtattagcagtagagtttaa

SEQ ID NO: 301843 - DNA, 603 bp, Proteus mirabilis
atgagattgttacttgatataaattggtatccaggtcagggaagaaatcattcatgggttgctatggataaaaatggatatatttcaatgatgctaaataatggatatggatggttacctaaatgtatattagaaataaataatataaaagaatcacttaatgatttatgtgaatatatcgatggcgactctgaaaagtataataataatgttaataaaaaaggtgagtatcttatagatttatattctagctgggtatataaaaaatataaaaataagcaagaaataattaataactttaactttagattagaaaataaaaaaaactgtgatgctgagttagcaactaaaatgggaatgttttattttgaagcattagaggggcaatcaataggagaggattatcccattggatatgaaggcaaaaccaaaatgggtgattattttcgttttattgttcctaccgtttatgcaacaatagcagatattccagaagagttaaggaaatatattgtagtctctgatagtcttgattttactaaagatagattgcttgataataataaaattagcgattattttactcatatgtattcagaataa

SEQ ID NO: 301844 - DNA, 456 bp, Proteus mirabilis
atgaatctaggcgaaacaatagtgtccgtgggcgttattttgatgatgagcgtcggtatgacgtggcagggtaacaggattggtaagctaaaagcttcaaacgctgaattaactagtcaactatcccagcaagtcgaaattaacaaagactatcaagcccgtatcactcgactaaaccaactcgatattcgtcactcacaggagttagccagtgcaaagaatgaaatcaacactcttcgtgatgccgttaactctggttctaagcgggtgtacgccaaagctgagtgtccagcagccaccaagaattacaccgaaagcggaagcgatgaaaccaccgcacgacttaacaaagcagttgaacaagattatctacgtctcagagaaatgatagttgagaacgaacagcaaactttgtatttgcagaattacatcaacactgaatgcctcgctcaatag

SEQ ID NO: 301845 - DNA, 306 bp, Proteus mirabilis
atgacacgaatggacgagaaagacaaattcagtgccaccgcatggggtgtcatattcgctatctccctatacggcggattggctagatacattattgacaataaacgtaatggttatcggtggagctgggtaggggcaattatgcaaatgttcgtatctggctttgctggaatgatgggcggtcttatatcaatagagcttaacgcctcattctactacacgttatttacggctggcttatgtggttccgctggctctttagcattggacttcttctgggataagtttacagggggtaagaagtga

SEQ ID NO: 301846 - DNA, 207 bp, Proteus mirabilis
atgaaaggaactaattataaagatctcctatgggcttatgccgatgagcggtcacgcaggaaattaaaatacgttaaaagtagtagccaaaaacctgattacaatcgcaaattacataaaccatatcgttgtgaaaaagttatgacgagactatttaggcttgaaattcatcagttaaagattaactcaagccaacaggagagctaa

SEQ ID NO: 301847 - DNA, 675 bp, Proteus mirabilis
atgaagactaatctggctactgcaatcgctaatcgtgatgcaggtgcattggctagaatggctcagagtagcaccccgcaaaaagttgtaaataatcatgctgagcaactagtcgatgtattattccgaaatctgaaacaaatatttccagcctcagtaaacaccattttcaaaaacgagtcagaggaacttactgcaaagcgacaatggatcgccgcctttgcagaaaatggaattactaccagagagcaacttcaaaatggcatgcgacacgccagagcaagtgataaccctttctggcctgctgttggtcaatttatcaagtggtgcaaggaagaggattatgtggctcttggtttgcctgacgaggatcagctttacgaactctatcgagaatactgcaaaatgcgcggctggcgtgaaatgaaatggccttcaaacgcttgctactggatggttaccaaaatttactctgatatgcgaagtaaaagcctaacggataatgaggttaaaaagctttgcgccaaagagttaagaaccatgactgtaagaatcaaatcaggtgaaaccattccagcgccagtgcttcaagtcgaacacaagatcacaccaacaagccgcaataaatcactatcaataatcgccaatttgaagcaaaagcacggcttcagatag

SEQ ID NO: 301848 - DNA, 981 bp, Proteus mirabilis
gtgaatacagctaaattctacgatcttggtgttgcaagacaacaaaggagcaacagggtggaaaaccagaaactaggtttcatcccgttgtacaggagcataaaaaataagtcatgggctaaagatgtttatcttagagcactgtgggaaaacttattgttagaagctcagagcgagccatacacagccaactacaaaggtcatatatggcatttaaaggctggtcaactggttaccactccagccaatctagggctaaacctgtgcgacaggaacggcaagccaaccagtagagatacggttaatcgaatgctggctgtttttgttcgtgaggggatgatttcaatcgaaggagagaagcataaaggcacggtgataaccatcacaaattacagtgattatactcaaaatttagtcaatgtacccgcacataagtacgcacataacaacgcacatgatgaagccagcattcatgcacctttagacggcatacccgcacataacaacgcacatgaatccgcacatcatgaacaatatatatttaataataaattattaaatgatcgtccgagaaaaaaatcttctgttcctcgtaaggtaaaacctgatgcagctgtgagttcagagaaaggggacaaatggggtaatgctgatgacctgaaagccgctcaatggatttactcgcaagtcttgatagtaagcccatcgactaaagaacctaattggtcaacatgggctaacgatgttcgcctgatgagacaactagacggacatacacaccaagatatttgcagaatgtttaaatgggctaatcgtgactcgttctggtgtagcaacgtgttatctcccgcaaaactacgtgagaaatgggacacattgaccatacagagccaacaacccaatcgaggtaagcgacaggttgatcctgaaccagcacagaactggaatactcgtgaagcatgggagaatgattttatatga

SEQ ID NO: 301849 - DNA, 327 bp, Proteus mirabilis
atggaatacacaaatacacgcaaacaatttaataaattcatttcaaatcacttgatggcttcggcattacaggcattgagaaataaaactcagtcagtggtcgctaaaacattaggtgttcatgactcaactatcctacgcagaactgaaaaatatcctgagatatgcgagacattagtcgcatcagggatagtcgattttgtgatggaaggtgagaggaaaatatcagaggaagaataccgctttttatggaaacaaataggtgagctttctcagatgagaacaaaagaaaacgccccgattgttggagcaaccgaggcgcattaa

SEQ ID NO: 301850 - DNA, 231 bp, Proteus mirabilis
atgagcaacgacttactccgctggagaaaagagtcctctcaagaggattgggaacgtctcgctcagttagcagggacgactgttggatatctaaaccatattgcttatggcaatcgcagagcgtcacctgaaaaagctgagatgattgagaaagcaacaaagcagttcaatttacaacccgtaacaaaagaaacattagtttttgcacggcttcgcaccaacgcagcttag

SEQ ID NO: 301851 - DNA, 729 bp, Proteus mirabilis
atggaaactaaagacataagacgcatgaatttgcgctccctgatcagcgaatacgcaagtaaagggattaataaagcaatatttgcagagcgtgcaggattgaatcctgcacagttgagccaaataagtggtgacaatccgtccagaaatatcggagatgtgatcgcgcgcagaattgaggtttcactaggattaacaaatggatggttagataacattcatcaatcaaacctcacagaaacaataaataaggataattatttattgaaaagtatttcagataaggatactgatcatacatacaggattgatcagcttgaaatggaatacagttgtggaggtggcaggttgaataatgattaccctgacgtggtaaaggcggttgagctagagccagagcatgccaagagattatttggtggtaggaatgccaatgctttacgtatagttacagctgtaggtgatagcatgagagggacaattgatcctggttctttggttatcgtcgatataaccacaaccaaatttattagcgatggaatttacgcatttagatttggtgaggctatgcacataaaaagattgcaactacttggagataggctgttagttatcagcgataacaaagcttacgataaatgggaaattaactctgacaatgaagaccagtttcaaataaacggttttgttgttggaaaatgggacatgaactacacaagattaggttaa

SEQ ID NO: 301852 - DNA, 312 bp, Proteus mirabilis
atgggttttcgtggttataactgcgcaagaagtcgcagagctgaacgcagagcggaattacaaaacgcatatgctatgaatgagcagttacaagttgcaattcacggcaagccgatagaagaaacaaatcgccctaccttatcgttaaaacgcaagccaatcagccgggttgagaaagcaatttcaattcgtagcactaaagtttatgactcagcagataatacttgcttgccaaattctagtatttactcagctaaatatagaaaatctggtacgctgttagaatctggtgaagtaactgcgagagcctaa

SEQ ID NO: 301853 - DNA, 621 bp, Proteus mirabilis
atgtatgcaaagcaattacaagaaggagaaatatttggactcctaacagtgtgtaaattctcccatatgaaagatggcaggcgggtttacatttgctcatgtaagtgcggaaacacctgcttaagagcggctaactcactaaagtcatctggaattaagagctgcggatgcttagtcggaagaaacaaaacccatggatatagaaatacgaggatatacaaaatatgggtaggaatgaaaaacagatgcacaaacaaaaataataaagactatgaaaaataccatgccagaggaataagcaaagaatggcttgatttcaaagctttttttaatgacatgggtaacccaccatcaagaaatcaccaactagacagaatagataacaatggcccttactctaaagaaaattgcagatgggctaccgtatcagagcaagcaatgaataggtctaactcattctactggcatattggcgatttggtgttcgatagctgctattcagcatccaatcatttcaaggtgaagccagcaactatttataaatggtgtaacggatatataaatagaggaaaaaaagtaccaccaagaaatggctgtaggaaggttccaaaatatgagtag

SEQ ID NO: 301854 - DNA, 501 bp, Proteus mirabilis
atggcaattaacacaataacggcaagtggaaacttaggtaaagattgcgaacaacgatggacgccaaatggtaaagcggttgcatcttttagtttgccagtgaaacaaggttacggagaacacgaaaaagtatcttgggttatctgtaagatgttcggccctaaagctgaaaagctacctccgcacctaaccaaaggaacaaaggttacggttactggtgagttcgtcatggaagaatggacaagccagaacggtgagaaaaaatcagcaccagtaattatcgttaaccaattagattttggcggtaacggtggtaatcagtcaggaagccagaagccacaacagaatcaaggatggggtcagccacagcaaccgcaagcaccaaaacaagcatcgagtaatcaagcgtcgcaaagtgagccacctcaagattgggatgatcaaatacctttcgctcctatcggactcccctacccacgccacgctatttatgtgatttaa

SEQ ID NO: 301855 - DNA, 270 bp, Proteus mirabilis
atggcgaatgctgctagattaagactgggcttctcacctttaactaaaaaaataagcttagcaaaaatgaaagtcgtcggcgatggcctcttggtcagagttggcaacaatgaaagagacgtgacaaatgaagccgcgcaaatggtctggcaattagttatcgctgaaggcggggaaataaattggcatagagaagatggaaagatcatgaagctaaaggctgaactgattgatgacgacaactcgcagggatgcaatgaagaggaatga

SEQ ID NO: 301856 - DNA, 285 bp, Proteus mirabilis
atggcaatagttcaattttatataacaggcggtaaaggcgaagacccgtcaggaattagtgaagataacctctatgaattaccagatgatcataatttcagtgctgatgatgacgactttgaattttgtattgaagcatgtgcagaatattatcacgctgactgtgacggatgcgaggctcgatggccgttgttatttatgttatggattgacgaccaatatcttggcacgtttgaagttgaacgtgagtttgacccagtattctcagcaagtaaggtggaatga

SEQ ID NO: 301857 - DNA, 315 bp, Proteus mirabilis
atgaaagttgaacaatctcaagttactaagttagaaataacagacgtaaaaaatcacaacccaattaggatttatttggaaaatgataatcaaggtcatggtcgattaaccataactgaatggggggaagcttggactgcatattggtctgcaatgtcaggttcgttaattgattttatcatcagaaatgataacgggtatttaattagctacctttcttcaaaaccattaggtgcaagaagtattgcatataagcggctcgattctagattaaacgctgttcgtgaggcattaaagcaaataaaggtgaattaa

SEQ ID NO: 301858 - DNA, 681 bp, Proteus mirabilis
atgaagcggaatattgatgatttcgatgggatgaaggattttattattagcatcattactgttgtggcttgggttttaataggcgcgattgtaacaatagggtattttaccattgagacaaaaggcgaaagtgtaatgctttcttttgtatcaacaatatttactgtcatctcttcattgggtatagtcgcaaccataggtgtttatttttggcaaaagaatgatgaaaaaaataaacagaatgaaactaatgccaagttatgttatttcttaagtgaaaagatagcgcacttacaatcattgattaaatttgtaaaaatgataaataatgaaaaaataaaaataacgagagttatactaaatggtagtgaaattactatatatagcaataataaaaaaagcccagaatgtcatgacttatactttacatatcatgatgagtttattcaaaataacaagatactaggaagcctaagggtaatattatatattagtgaagttgaaataataagcaatgaagtaatatcaattataaattcatacacttgcgccgcacataaaagtgatggccaaaaaaaaatatattataataagctccatataaaacatctaatggagaagttaaatttaaatgaaactaaacttaatagaataaaaaaatatatttcatccctgcactag

SEQ ID NO: 301859 - DNA, 162 bp, Proteus mirabilis
atgaaaataattggatatgtattactcatgctaatgcagggttatgctgtacctgtaacggaagatatttatacgcaatcggaatgcaataagcgtgctgaatatttaatgtcagtgaggaattttgaagttatttgtggtgaggtaatgagaggtgaataa

SEQ ID NO: 301860 - DNA, 231 bp, Proteus mirabilis
gtgaataaacgaaagcaattacttaatcgtattaattgggatgcccaagatgttgggatgataagacttagaaatgaagatatagggagtaaacttcaaattagatgcgctgaattatggaaagaattattaaataccgtcaaaccaactgatgatttaattaatcgattaactgtatttcataatgatgttgaattatcagcaaagcaaacgggattatataatgaataa

SEQ ID NO: 301861 - DNA, 321 bp, Proteus mirabilis
atgaataaatacaccgagctatctgactttgagattaataaaaaagttgcaattacgtttcataaggactcagatttcattgagcaatacgataataaaactatttatgttgacggcaatatgttcgacccatgcaacaaccctactgacgcaatgccgattgtttttgaaaacggcatcagtcttatttcagactggaatgaggttggtgtatggggtgcgaccaatcaaccatggtattcatcagaaaataaaaacccactacgcgccgctatggaagttttcttgatgatgaaggatgcggagaatgaagaagtatga

SEQ ID NO: 301862 - DNA, 138 bp, Proteus mirabilis
atgagtatgaagattaatagtgataatgtatctaatcactatcaaaccacaatcaataatgctgatgaaagtgagggtattattgatagaaataagttatataaagaggttgcacctagcttaagcaaattaacatga

SEQ ID NO: 301863 - DNA, 309 bp, Proteus mirabilis
atgaaagatgttgatcgtttaatattaattaagcgattaaaagataagtttgaaaagttacctaatattggttatttggaaatatggtttcaaagagccataaaaaattatgatgatagcattgaatttaacgaaccattatgtaatttagttaaggatactagtgttagaatatgggactcatcatgggttggaagccgagagctatccgaaataatggagtctacatctatactagacatagactcttatagagaaattgattcgataattaagttagatgagtttgatttattttcaccctattga

SEQ ID NO: 301864 - DNA, 594 bp, Proteus mirabilis
atggcacagcatagctttatcaaaatgtctaacgatactcttgtaccggctaaccctgttacgagagattttctgcattcaaaaatcaagtgtggtgatgtgctttcagctaattttaagaaagctcgtaaccctcgatttcatcgtaaatacttcgcattactcaacttaggctatgaatattgggaaccagttggcggtaccatttcacctgaggagagggagcttgtgcgtggttacatcacattcctttcgtattacacggataatgctgacgcgctcttatcagcatccaatatctatctagaagaagtcgcacaaaaacgtgcgcaaaatatctcagcaacaaaatcatttgatgcttttcgctattgggttgtagagcaagccggttattacgacacgtttgaaatgcctgacggtagtttacgtcgtgtcgctaaatcaatcagctttgcaaatatggatgacctagcatttagcgaactctacaaagccacactcgatgtgctttggaattttatccttcgtaagcgattctccactcaaaaagctgtagaaaatgcagtatctcaattattaagttttacgtag

SEQ ID NO: 301865 - DNA, 357 bp, Proteus mirabilis
atgaaacgtatgccagaaaaattcgaatgggagcagattttacgctggttacaatcggtcctcccactcttaggtggatttactattgctacaacaattgcatacatcagagaaagacaggctggttctcaatggaagcgttctttaggtgaggccgttatgtgtggcttgcttagtgttggaactattcggtttattgattggtggctatcacgtagtggtgatgctagttcgtgggcattattggcggaattctgtggtgttgtaattggatttttagggacaaagaaactatacgcactttttgagggtgcggtcaaaatagtaaaggctaagtttggagttaaagatgactaa

SEQ ID NO: 301866 - DNA, 405 bp, Proteus mirabilis
atgactaaatcagcacgcggggaaagaaacaacaaccctggtaatattcgacacggttcaaaatggcaaggactatctgcacagcaaaccgatgaagacttttgccaattcgtgtcacctgaatatggtatacgagcaatctatgtattgatgcgaacctacgaaaataaatacgggttgtgttctatccgtgaaatcatcaatcgctatgctccgcccaaagaaaataatactgagggatacattcatcgagtcgctaaagaattgaatgtaagtacggaagattgtgtatcagtcaacaaaaaagaagttgcgattgcattggccacagcgattgttggtgttgagctgggttatcagccttacagcccaaaagtatttgaagatgcatggttgttgttatga

SEQ ID NO: 301867 - DNA, 453 bp, Proteus mirabilis
atgaatctaggcgaaacgatagtgtccgtgtgcgttattttgatgatgagcgtcggtatgacgtggcagggtaacaggattggtaagctaaaagcttcaaatgctgaattaactagtcaactatctcaacaagtcgaaatcaacaaagactaccaagctcgtatcactcgactaaatcaactcgatattaaatatactcaggagttagccagtgcaaagaatgaaattgatgggttgcgtgatgatattcgcaatggcactaagcgggtgtacatcaaggccgagtgtccaaagtccgacagtagtacctcctccagcttggatgttagcagacccacccccgtggagagagacactgaagaaaatatactcaatctcgtggaacaaattgaaacactcgaaagtcaataccttggtttaagggattatacaaatacagaatgtctaagataa

SEQ ID NO: 301868 - DNA, 441 bp, Proteus mirabilis
atgattagctttttaaagaaaagagcgttaaaaaaaagaatagagaaacttgatgccaccatacttaataatattgtttccattgagtctatcttcaaagagaaaatatttttcaatcgagatattgatgatataaagctaagagctattgccgtagctggtgtattacatgcatgcaccgaaatgcgtcaactatatgctaatgatgaattgattgggaaaagtttattttattcttgtatgcgattcgctccagttgaatatactgatttgattattgatttggctgaagaactaaatcaccctaaaaaaaatataaatgaaaatttttggccttgctactctagcaaaacagacgaccaaggagacctagctattgtatatatggctctaatagatatagcaccaatcgtaggctcaaatattatcaataattactaa

SEQ ID NO: 301869 - DNA, 837 bp, Proteus mirabilis
atggaatatgtatatgacacaactgtaattgattgggataaagaatataaatatgctaattacagtataattaaagaaattattaataatgaaaaagatgatgataatgttgcagctattatcactgttgaagaagcagagtatattttaagtaacgaatcaaccccaacgccttttaaatcgtctaaagatacattgcttggtactattgattttatttctaatttttcagggaatctttatgaagcttatcgcttagataggattattagcgaattcggtaatatcaatatccgagcaactcagtatactgggcctaatggtaatgtttatattcggctatcaggtcatcccggagttagatttttcttgaatggaactcgatatttagcaaataatcctcgtatattatttatgggggttggaactcaaggtataaatgatatatctgtcggtgcagctcgtttcgcaattgttttttcagcagcttatcgcgtagtcgaattgatattcaaaaatgaatatacattagttgatttttttgtcaatgttactatggatatggcaaagcttgctattagcacccaaataagcacagctatagtaggagggttaacaacaacaggcttaattacaggaggaagtgttatcgttgtatctataggagtctttttgataggtttagcaatagcctatgcattatacaaattagatgataaatatcaaattagtgaaaatattattaaagccttaaaaaataatagatcaaaaaaaccaactcctgcttaccatcctgaccaatttttttctcagtgggggaaatttagtcatggttaa

SEQ ID NO: 301870 - DNA, 1383 bp, Proteus mirabilis
atgaaaaaagcctcatatcagaaagagctgaaagcaataaagcttttacaggaaaggtcatcagaaatatctatgacccatgagttaataaatactgatttagagtcaataaaggcagcattgtcaggactaatagataaccaagaggttctgaactcccctgattttattaagaataagaagaagcacctagagtctatgtcaggtattggtcagttgaaggattctagcttagaacaaatccatagtacggctgaaagcaattataaagataggatttcattaagtgatgtattaaccgagcaggattcatttgaaattaataataaaattaatttgcgagtagaagcatttaataaccaatatgggctggataggtgggactatgcaattgcaggctcgtgcggcctttttgctgcgatgttagatattttatgcgttaaagctccacctaaaccgactgtaaaatgggagcaagaagttgatggtgtattcaataaatgggttcaacaagcgttcaacaagattattcctcctgatttaagtaatgcactcagtaaggccaacccaattggtgcaccagactcatcaactattgccgaccttgttggtgcaccaccaatatccataaatccactcaatcataggctgaaatctttagcccatgacccaattttgggattcatatttggtgtcatcgatatgctaaatggaacttgcaccgttgtgactaatggcaccataaaaagtattcctagtacaaagccaccaacagaaggaagtgtttttcagcttctgggaagaatgctaggacatttgctttcagatgttaatgcaccttctgcgaaaggcaatcgaggaatgggattacccgcacctttcatgggtatcctacgcatgtttgaagggatacctgtgggcaattcaaactttggaaagcaaatagagtctatgtatgtaaatggatatgactttaggcaattcgttgtcaccagcattccaatgacaataatggaagtaatgctgcgagctttttatgttataaaacaaatgaaattgtacgataggccttttggtgaatcaatcatggatacaatgccattaaaaataaaccctcgcttcagaatagtgctcgctttagcttatgggactagtagctcaattaatgcaggaaaaatgtatattacaaagaatattttgaatgctaattatgcttcatggctaggattggcttggaatggttttcatgcacttaaatgggttgcttttgaccgtcacctcaaattatgggatggcatttcccaaagagaaattgaagatatgcaacagataattattgatctggatactttatctgagagagcctcacgacttccgatataa

SEQ ID NO: 301871 - DNA, 477 bp, Proteus mirabilis
atggaacatatgtcccaggagcaagtcgagaaaatcagaatacaagcaacagaagatgtctcatctgccctcaactctctggaaaaggattacccaggaattactgaagggttagctactgtcttgggatctagcacaggagctctaggttcattaggagcactttattttggaggtaaagtcgtcggtttatctgctgctggaataacttctggcttatccgcagcaggggcgcttgtgggtggaggtatggttgcaggaataggagttcttgctgcacctgtggcaatcctcggtgttggtgcatatgcaattgctaagaagaagaaaaatgcaaaactagctgcagctttgggtactgcaatacgaaagctttatgatgtacaagaaagacttataaaaaatgctgaatacttcaaagaagaaatagcaagcattaaggcgacaatagatcttcttacaaagaaaaagccataa

SEQ ID NO: 301872 - DNA, 3093 bp, Proteus mirabilis
atgagcaacgtaggtcagcgcgaacgtatcacccaaaatcgtatcgttcagttttttcaaactgacttaggatatcgccatttaggtgattggcaggatcgtacaaataataagaatattgaagttgagatccttgttgattggttaataaagcgtgatgtaagtgaagcgttgatcaatcgcacaattcgccagctagatgcagccgctgcgctgggtgaagggaagaaactctattacgccaacaaagaggtttatcgcttattacgttacggtgtgaaagataaagaaggtgctggctaccaaaatgaaaccgtttggttgattgattgggataaccccgaagctaatgactttgcgattgcagaagaagtctcgattaaaggtgaaaataaaaaacgcccagatattgtgctatatgtaaacggtattgcgctgggtgtgatagagcttaaacgttcatctgtctctgtttctgaaggtattcgccaaaatctagataaccaaaagaaagattttattcgtaatttcttcaccacgatgcaattggtgatggctggcaatgatactcagggactacgttacggcacaattgaaacacccgaaaaattttatcttgagtggaaggaaccgcttgaaaataattatgactataaactcgattttcacctaagccgtgtatgtaataaggcgcgctttttacaaatcatccatgattttattgtttttgatgctggtataaagaaaacctgtcgccacaaccagtttttcggtgttgaagcggctaagcatcatatcgcaaagcgtgatggcggcataatctggcatacccaaggttcaggtaaaagcttaacgatggtgtggttagctaaatggattcgagaaaatgtcactgatgctcgcgttctgattgtaactgaccgaactgaacttgatgaacagattgaaaaagtgtttacgggtgttgacgaagaaatttatcgcaccaaaagtggtgcagatcttgtggccacattaaatcaacctaacccttggttgatctgctcattggttcataagtttggccgacaatctgattctgaaaatgatgccgcgaccgatgaatttatcgaagaactgaaaaaatcactgccatcaagtttcagtgctaaagggacattgtttgtctttgtcgatgagtgccatcgtactcaatctggtaagttgcacaacgcaatgaagactattttacccgaagccatgtttgtcggtttcacgggcactcccttgatgaagaaagacaaaaaaaaatcagttgaggtatttggtccttatattcatacctataaattcgatgaggctgtagccgatggcgtagtattggatttacgctatgaagcaagagatatagaccaacacattacctcccaaaagaaagttgatgagtggttcgaggcaaaaactcgcggattatctcgaatagctaaaacacagctaaaactaaaatggggcaccatgcaaaaggtgctatccagtaaatcacgcttgcaacagattgtgaatgatatcttactggatatggatactagaccacgtctaatggatggccatggtaatgcgatgttagtttgctccagcgtttatcaggcctgtaaagcctatgaaatgtttagccagaccgatttagcgggtaaggttgctatcgtcaccagtttccaaccaacacctgcaagcattaaaggtgaggagacaggggaaggcttaacggaaaaactctttaaatacgatatttaccgcaaaatgttagcagactacttcgaactacctgaagacaaagccgctaataaagttgaggattttgaaaaggaagttaaaaagcgtttcgttgatgaacccgggcaaatgcgcctgctgattgtggtcgataaattgttaactggctttgatgcgccttctgccacttatttatatattgataagcaaatggcagatcacagcctgtttcaggcaatttgccgtgttaaccgcctagatggtgatgataaagaatacggttatattatcgactataaagatttgttccgttcattagataaagctatttctgattatacccaaggcgcatttgagggctatgacaaggaagatgtggttggtttactaaaagaccgattagagcaagcgagactcgatttggatagtgcgctggaaatggttcgagcattatgtgaaccagtaaaagcaccacgaaatacagaggattacatccattatttttgtggcgaatccggcttgaatcaagatgagttaaccgagaaagaggcacttcgtttaactttataccagagcgttgccaagttgctgcgggcattcgcaaatatcgccaacgaaatgccagatgcaggttattctacacatgatattgactcaattaggtctgaagtttgccactatgaaaaagttcgcgatgaagtgaagcttgcaagtggtgatctcgtcgaaatgaagcgctttgagcccgcgatgcgtcatctgctagatatgtatattcgtgccgatgatagtgaagtccttatggactttgaagagctcggcttgattgaattaatcgtcgaaaaaggagtcagtgctgtcgatgccctgcccgaggatctgcgtaaaaatccgggagccatggctgaaactattgagaataacgttcgaaaaattattgttgatgaaaacccggttaaccctaaatactatgaacagatgtcagttttgctgaatgaactgatcgaacttcgccgacaaaaggccattgaatatcaggattacctagagaaaatacatgaactcgccgctaaagtggtacgccctgagcaaacagcatctagctatcctgcatcgatagatactaatcccaagcgtgctttttatgataactttggcaaagatgaattgcttgccaccaaaattgatagtgcaattcgttatacgaagaaggcggactgggttggagatcgttttaaagaacgagaaattgccaatgctattcgagaagaaacggccggttatgaattggatattcaagctgtaatggaactcgctaaagcgcaaaaagagtatcaatga

SEQ ID NO: 301873 - DNA, 2616 bp, Proteus mirabilis
atggaatctatcgacattcggtatatagatatagtctggaattctgatcgttcagtattgaaagttgagacaagttctcaccctattgagatagaaagagtcgagcagcactgggtaggcaatacggtcgcctacccacaaaaatatttttatattgggatatgcatcgccgataaacttatttatgaaccctatttaaaactgccaaatgatggatcttatccattaatgccaattaaggttccaggagaagataaaatctggtgggttcaaaaggggaattgggatacaaagcacaataagtacttctcgaccatataccataccgcaggtcgtgtcgaaattagcgtgcaaaatgaaacgctaattctagaaaaccatactgtaaatttttctattgcagatcttgagtactatttatcagatcttaaaaacaaactctggatgctgatcctcgataataaaaatgcaagcaaaatcaaaattcaaaatgaagctccctccattttttcagaggatatcgtaaaattatttggcgagctaacgtcgagctttgaggctatcgttaaaaaacctcacgtcattttatctgaagtacaagagaaactacctaagcgcttggtaaaacctgtcgctaaaacctttcgtgagattgtgactcaaccccactctaagcgtttgacaagtcgttcatataaggaatcttacgatattccagaaaaccgctttgtgcattatctgatgcaaagaactttatatttactcaacaccctgagtcggcttgcatatcatcaagtgaacgctatgcacgatcgagttgaaagagacgaacattggctgaaaacagaaagcagaaaagaaacaaaggtagtcgacccagtcgtctttgataatgagatccaagcgattacttcagatttggaaaaacagcgccttatgttgaataacgcaattaaggcacagcaaataaatcgtggtgatgagaattttattggtcaaacttatacggttacattaaataatacctatggtaaatctgatactgattactttgtactctcattaaatggaaaaatcgttagccaagattttgatacctatgtcgttttctcatcagggattaattttaaggagctatttaatgataagtatttaactacatacgaatttcgaattacaggctcaggaaaaaagtatagcgataaaaacaacaatgggaaaatatactatcggctttgtttcactaacatacacgctattgatatcttacgctcccccctaactcaagagcttactcatttagaattaactcgtgccaatttggaaaataatgaatgggtcactcatttaagtcccgacgagcaggaaggcattcgtaatcaaatacagatcacactaacaaggctcgatgctattaaggatgcactaaaccagttgagcgaattcagctcgcatattcctcatttaattacccgcgtaaagaaatctatgcagtttttccgaatgcacaaggtaaaacagcaacaaagtctccctaattctatgatttttgttaagaatcccttatacacttccgtaaaaagtttatttcaacaaatttcaaatctagagggaatggatgactcgctgttaaatagcatgatggccattgatgaaataggactcgttaacttaccgaatctttatgaaagatggtgcttgcttcaattaattattgttattaaagatatttatagctttcaagctcaacacaactggcagcaaaagcttattgatagtgtattgaaaaacgaaagaaatattgagatatcattttcatgtaaaacgcggcaactcgccctaatcttgacctacgagaaggaattagattcaggtaaaagacctgattttgtcattgacttacattacgaaacttacctttcgaagccggacacaaatactttttcaaacgagcactcaaaccaaacccaatggtatatcaatgaacataacattaaaagaatggtgcttgatgctaaatttcgtgggaatgtaagtgagcgccatattgataatttgattaatgagctttacgacgataaaaattacagtgagaatgaccataattcagtattcattgttcaccctgttgcaaacgtgactgaaatgagaacttcgccgttagcatggggaaaatattgcaattatgggcatgctggtcaaatcgaccataagaaaggtgctatatatttgagccctagccgagagcaccgaaattctattgaaaatttacaacgcctcattggtatgtttcttcaaaatcacaccaccattctcgatgatggtaatagaaagaatattagttggcataataaaaactgcatatcatgtggtagtaacgatcttattatttctttaggtaaaactaaggctggaaataatgtgaataaaattcactgtaaatcctgtggtcaaaatacgatcgaaacactatgtgcgtcttgtcgaagacctttatataaaaatggcataaactggacttatcatcgcacccgagctatacaaacaaccaatatcgtctgcccatgctgtgagacatttttatcaagcaatggcaaaggttcacaaacgttttaa

SEQ ID NO: 301874 - DNA, 2145 bp, Proteus mirabilis
atggctgaagaaactacacattacttattagaagaacttgcaggctttagtgaccaacaattactcgaaacgctcaaacgtagttggcgctacgacccacaaaagccgttggaaattattggtaaactgaaaaagattaccatagataccaaattcttctatattttagaagaattacatagtacccatgatggctctgctttagtttatccattacaacgagaggatatccatcacactgtatttgtgggcacaattaaagagtacagcgttgaatctggcagttgggtgaaagtaagcgtcactctttctcctgaaaatgagcgtgtaaaacggaataacccattttcgcttatggtggagtacggctctgtcagcctactcagtgagctaccgggaagtgccgacaataatcagtattttattgatggtaagttccatgttgaaaattggatagtcgatttttatctctctaaaaataacaaaaaaattcaagaggatgaagctcgtttattagaacaatttgctcaagaaaaaagccaagtagagcaaaaaattcattcattaagtatgacggagcagtccttagctaacaaagtcaataaatctcagcaagaactggctaaaaatacgcaaagtttagagaatctacaggcagaaatggcgaagcagcaacgagagttttctaagcaacaaacggaattggagtataaattgaacaaactaactgaatacgttaagaatacggcttcaatgctgctcgatctcgatcttatatcacaagccgatgttgatactttattgggtcaaagcaaggtaagtgaacgactcatcggccatgattttaaaaccgtttttgatagtgataaaaaactagctgttggttacattcaagcctttatgtacaaaaaagacattatgtaccaacgctctgtattggaagatttttttgcattagtgtgcaccaatgatttgattgttttagccggtgattcggggtcaggtaagacaaatttagttaagtcttttgctgaggcaattggcggtaaagcaattatcattcccgttaaaccaaactggaccagtgctgaggatttacttggttattataatccactcgagcaaaagtacctcacaactccatttcttgacgcattatttgaagcaaaacaaaacccagatattccctattttatttgtctcgatgaaatgaacttagcgagagtcgagtactactttgcggatttcttgagtttgcttgaagaacgctattgcagccctgagatctcgctctattcagattcagagtcagagcatttattgagtgaagcacgcaattttttagcgctaatagaagattcaaaaaacaagcttgataaatcagatctcatcagcttcctcgacttaatgcgtgacgagcaagttaacgctaaactccatgagttatgtggctttcatgaaagtgactcactactaaaataccatgcccggcttcggaaaatgttacacagttatttaggcactccagctaaattggaattacctgctaatgttcgtattattggtgctatcaatgttgatgaaacaacacattatctttcacctaaaattcttgatcgggcacatttaatgcgattcactagcccattattgactaactgggatgaagttgaacaagaaattgaatcgtttgatttggatatgtcactacccgtgaatcttaaaccaagcgaattaggtattcgtcaaccctatccaccatttgatagaaacgatcccctagttaatagacttctctatttaactaaagagtacttagaccgcctaggtatagagtttggtatgagaacaattaggcaggcgagactctaccaaaatgtactcgctccatttggtgcaagcgaagaagttattttcaataacatcattctccataaagttcttcctaaaatgatgtttgatggcgataaacagcttgaaggtgacctacttcgtaaggatttattgggttccttgagggactaccttcaaagcgagttagcaagtattacgaatagctctgtcacctcctgtattgatgagctagatcgcattatacaaaatgctgcaagtaatgattggattgttaactactggtcgcgctaa

SEQ ID NO: 301875 - DNA, 1275 bp, Proteus mirabilis
atgagtagcagagtatctgaaacagccttaaatattattccaagtggttataaactgactgaagttggagtgatccctgaggactgggaagttgattcaattggaaacttggtttcaattacaactggaagcaggaatactcaagatagaatcgaagaaggtgtgtatccttttttcgtccgctctcaaatagtagagagaattaacactttttcatttgatggtgaagcagttttaacagctggggacggtgtaggtaccgggaaaatcttccattacataaatggtaaattcgattttcaccaacgagtctatttaatgtacaactttagtgaaatagttgatggatatttcttttacatctatttcagtaataatttttatgatcgcattatgtccatgacagcgaagtcatcggtcgattctgttcgccgagaaatgattgccgatatgaaaatgttattaccaactaaagaagaacaaaacgccatagccactgcactatccgatgttgatacgctgattagtgaattagaaaaactgatcgctaaaaaacaagctatcaaaaccgccactatgcaacaactcctcactggccgtactcgtctaccacaattcgtactacgtgaagatggttcgaaaaaaggcaccaagcaaagtgagttgggtgagattcctgaggattgggagattaaaaaaattggagatatcacaaactgtacggctggaggtaccccaaacacctcaatatccaaatactgggggggaactaatccttggatgagctctggtgaattacatctaaagaaggtatttgatgtcaccgaacgaataactgatgatggattggcaaacagtagcacaaaatatgtaccaattaattcagtactaattggtttagcaggacaaggaaagacacgaggaacagtggctatcacgagaatatcgttatgcactaaccaatctatcgcgtctatatttccatcaaaaaaccattcttcggagtatttgtattacaaccttgatagtcgttatgaggaattacgaggactttcaactggcgatggtggtcgtggaggattgaatttaacaattattagaaatctgtctcttccattaccgtgtatagaagaacaaactgccatcgccaccatcctttccgatatggatgaagagattcaagcactggaacaacgtcttagcaaaactcgccaaattaaacagggcatgatgcaagagttactcacagggaagacgagactggtgaatggctga

SEQ ID NO: 301876 - DNA, 618 bp, Proteus mirabilis
atgtctaaaaatgaatataatgagttttatctagaatgcattgctgatacattgaattacgctttaaaggaatactctcgtatcactgtaatacgagttgaccttcactttccgcctattatcgataatggagatatgctgacatgtttcccttacttagaaggaagtcctatatcccgatttactgattctttaaaggctaaacttaagcacgatcaacaccgtaaaaagcttcaaggtaaacgtacttttgaaaacaacatgcgttatatgtgggtaaaagaaattgcaaccgcaatacagcctcactaccatgtatttttagtcttcaataaagacgcatactaccatttaggggactacaatttgttcgagcctagcttacgggccatgatcaccacagcttggtacaatgcattacagctcgaatttgatccttcttttgatacaggcacattagtacactacccagaaaactgccgatattgcttaaataaactttcagcatcatttcctgacgattaccaattagtcatgaaacgtttgagttatttagcaaaagaatactccaagcagtacagccctgtgcgtcgtagcttagggcgtagccagtattga

SEQ ID NO: 301877 - DNA, 585 bp, Proteus mirabilis
atgagccattatgcatacatccgagtaagacatgatgacagtgatgccttagcaaatcttgagcaatacacacaggaaattgtcacgttttgccctgaggttaaggataatatcatcattgaacgtcaaccattgcttgatgtgaaacttcctccaccacaacttatggagcatattgaccatattttaacaccagaagacactttaataacaaggagtctcgatgatataggaaataatactcagcaggctatacagattttatctcgatgccacgaacttggtatggctgttgtcatccttaatcagtctatcacgaatatatttgagcagaagtttttcttgctagacgtgcttaatctattaaatgatttagaagaaagctatgaagtactaaaactaagcaggcgacattacatttcgttatcccaaaataagtcattaggtcgcccaataggaagtaagtataaggattatatttacgatctgaaatgcaagggatataaacaacgcgagatagcaaataagcttaacatcagtctttcaactataaagcgccactggaataaagatattttagaatag

SEQ ID NO: 301878 - DNA, 738 bp, Proteus mirabilis
atgtctcaacggataactattactgtaaaaaatgaaaacagtttaaaacagatagatgagtactgctgtaagcataaaacttcacgttcatctttaatatccaatatattaaagagtgcttgcccattactttcagagataaaccaatacactcaattaactaatgaacttgaaagtaaattattttccccagataaatcttcaatgaattatcaagggaaaacatctacattttctttagctgaacatcttttagatatatggcaaacgcacataatagaaaaaggtgtcattattgatcaacatgcttatcctcatgcatttaaaagtcctaaagttggtctcaaagaaaaaataagcattcaagaagaactagagcactatattagcgaacccaatattaagaaagctatctttatttacactgataggcatgttcactataagctacataaagcaggtggattatcaaatacaattttaattaaaaatactgagtataaaaattacgtttttgactttaatgggatcattaacataccgatgaatgatattgttttttttggcattgaagaagcgataaagaaaagtaaggtacagttaaaacatacctatgaggcttttataccgatttatcacacaaaccatcagtgcattctaattggggttattgataggaacaatgccaacaaaagaatagacaaaagctcaaacaccataatcataaacccactataa

SEQ ID NO: 301879 - DNA, 207 bp, Proteus mirabilis
atgaatcaatccaatatcataattcttcgactacccactgtaatcgaacgcattggtatcggtcgttccaccatctatgactggatcaacccaacatcaccaaggtatgacccaacgtttcctaaacaaaaaaaattagggaagcaatctgttggttggatcgaatccgaaatcaacgattggttacttcaacgagagtcaacttag

SEQ ID NO: 301880 - DNA, 792 bp, Proteus mirabilis
ttgattgataataaagagatatttcatcgtgcgcaagtttttgttgaagcaaaacagtggcaactacatgacgaaatttacaaaaaagggtggcgaggtttaagtgcaacgtcgaaagaaaatgcaatagacatgttacaaatgaaagatccaagagtttctgaaactgcaaatgagctctatgagaaaataatgaagagttcgaatccgtacaaacgtctagaaaaagacctgttaactgatcatgtcgaattaactagggtgcattatggttctaatgtatatcttttaaatactatattttggtcctgtgttacctttcaccttgcagtaaagtttcataaattaaatcgttctactgaatttgaagtaatggcgatgcagtgcttacttaaaagccttgagatagttagcgaaagttttggtttaggtgtttatagctattacagtaaagatttaaatcgattgagactgcagcgtagtgatgcagctaaagaggggcgtaaggctcgaacaaacttactgaatcggataaaaaaagaagcaagtgatttactttatacacataaacctcctaataaaaaatggaaaagtaaagctgaagcagctcgagaaattgaaggcaaactatggagttttattcaagaattggaagagaacggcgaaaaaacagatcttgtttgtgagagtttagataagacgattgtacgatggtctaaaaaagaaggtgaagtaaaattagcaatggaaaaaacagttcggataagaaaaagtaaagtttcgtcatcgtga

SEQ ID NO: 301881 - DNA, 2196 bp, Proteus mirabilis
atgaccattctctccatccacggcgttcgcagttatcagggtgaaaagccagtggaattcgacttgagtaagtatgtcactcttatctatggacaaaacggttcaggaaaatcaactgtttctggttacttttataagcatggtcgaccagaatacagtcagtgtaacctgcaacctccgttgagtatgaactacttggtatttaatcaggagtatgtagatgatattttcagtcaaccttctcagccgggaattttcactttaaatagtgaaaatgcagaaattaaaactgaaatagatactctggaagcacaatgcaaacgcctccgtaccgatagcgatgctttggatgtacaaatacgtgatgttgagagtatgtcagaaagagttaaaagtgaattagcaaaacaaatttatagttccaccgtagaaatcagaaaaacagatttatgggatttgatggctggaaccaaacaaaccgataagctttatcagacaatcttggaacacactgaagttgaagatacatcaacacaggaattggttgaagaattgaaccaacttgaggcaagtagaggtaatccttatgctttactcgaagccttgccagcattccctttgaatgaaaccgacattacgttattgatgcaacctcttattccaacaggtgatagccgccttgctgctgcaattaatcaattgggcaacattgactgggtgaggaatggacagtcgtggctgattgatgatatttgtccattttgtcaaacaccaatagatgcccagcaacttcaacgggaaattactgccctttttgatacctcatgggaagccgcgatggagcagttgcaggagcttcaggaacgatatcaatcctggtacgataaacccgaagatatgcgtcagttaataaaggcgtgcccgctagttgagaaagaacatcctatttatctctatctgcttgaactagaacaggtatatcagcgaaacaaattgcatattgatgagaaattaacatcaccttcgatatcgatctctcttgaagatctttctgttttggcagacgctgtttcagcacagctgactgatattaatacgataattggcgaacataaccgaaaggctgacaattatcatgttgagcggtcaagactgaaacagaagttactcggctatatccgaaaactggtaacagaaataataactaatcatgataaaaaattagcggagtttgcagagaagttagacaaattaacggaacgtcagaaagaaatctcggacaatcttaatgctctgaccttaattattcgcgataaatcaagccttatcgtcaatactcaggaaacgattgatcggattaattgtagtttgaatagtctaggggtcactgggtttcatattgcaccttatgaagatcgggatgattaccgtctgattcgggaaggagagaacagcgatacaccagtttttagtagcctgagtgaaggggaaaagacgttgattgcttttctatattttctagaaacctgcacagggagaaaaagtcgtgatgacaatgaccaacgaacacgtttaatagtcattgatgaccccatatccagcttatcgcaacattatgtttttgaaattgcttcattgatccagtaccatgttatacgagccagaattgctgaaaaagttattattctgacgcacagcctatttttctttcaagagttgctactttctgcggaaagaaagaaaaggcctgctggttcttgccctcctgaatggacgctttataggatatccaaatccctgcatagttctgcttctcctgtttctgaaaaagaattgctgaacgactatcaggcactatggtatgtcttgcgtcatgcccaaaaaaatgacattgccagtgttgtgatcccaaatacaatgcggcaaattcttgaatattactttggtttttcaggaaaaagtgcaacccttcaccgagcgcttgaaacactggccagtggacctgaaggcgaaccggggtttcgtatatttgcccgttatctgaacagacattcccaccaagatgctcgcaatatctctcttcatgaaggtgcttcggttgaacgctatcttacttggtttaagaaagtatttgaggcagcgaaagatgaagaacattacacatcaatgatgggagaagtgacaaaatctgcttga

SEQ ID NO: 301882 - DNA, 1263 bp, Proteus mirabilis
atgacatcgtttatagtggagcaaaaatttcactcggtagggaatggcacttttaaatcaggtgtagtaatgagcctggatacaagagaggctttccaatgggtttatgattgtggctccacaagcatgactacgctaaatcgagtattaggggcaataacccggcgcggatggccagaatccattgatatgttagtgctatcgcatttcgataatgatcacgttaacggcgttgaagagattctgaggcactgtcgcgttaaaactcttgtcctcccattttcagaatgggcgcagaccgtgcgcgagatttcggttatgggcaaaaagggtacttcaccgtcaacagcgctcatgcagctcaatccagttaaatggctgacatcaagaaattttgatgctcatgtcgaagagattgtattggttcaggggggaaccgaaacttcacctgttccctatggtgacgatgatcctaaaccggaaccgagagattttcagcgagatgatgatgtcagacgtttcagtcagaactacttttctttaggttcggctatgaccggtgcctcaagaattcgaattttccgccatgatcgatctattcaagccttaaacagggagtttgagttcgtcttttataatgcagagaaagactttgctaccctagggttgattgaacagcgaaacggacagtggtatgcaaaaaaatcaggtagtctcttatctgatgctaaaacagatattcagaataccatcatgagtattaacctacaccagccgctatcgacaatgcctacaggctggaggaaaactctaaagaattgctatgaaaaccattttggtcattcaggcaaggctaaaaataacatttcgttatgtatgtatgctgcacctatcagagcaacaccttgtcaatttcatgtgaggaatgattgttgcattatcccgcatgcgaaaaagccgactgttaggctggctacgctctgtactggcgatattcatcttacttcatcagtgatttcagatatccaaaaccatctgggaacgcaacgctgggacagaattggtttggtgcaggttcctcaccatggttctcagcattcgtgggaactaggtaatgcgaaattactggctcctgctcaatttgtacattgcgcatcggggacaaagcaccatccacatccactcgtgcaggcagatctcagtagttctgttgtgtatacggcagaccgtaagcaaagtgtatatgtttattataagctttaa

SEQ ID NO: 301883 - DNA, 1242 bp, Proteus mirabilis
atggcaagaaaaactaagccattaaccgataccgaaatcaaagcagccaaaccgcaggacaaggactatcagctgtatgatggtgatggactcactctactaatcaaacctagcggaagcaagttatggcaattccgttactaccgcccgtatacaaaacaaaggaccaaacaaagttttggggcctaccctactgtcacactttcagatgctagaaaacttagagcagagtctcgctcattactggcaaaagatattgatcctcaagaatatcaaaaagataaaataagaaactctcaagaggccaaaaccaatacctttcaacttgtcgctgaacgttggtgggaagtaaagaagtccaccgtaaccgaagattacggtaacgatatttggcgctcacttgaacgagatgtctttcccgctataggtgatatcagcgttaccgatatcaaagctcatatattggttcaagcaatacagcccgttcaagccagaggcgcacttgaaactgttcgccgcctttgtcagcgtatcaacgaagtgatgatctatgcccaaaatactgggttaattgatgccgtaccaagtatcaatattggtaaagcttttgaaaaaccaaagaaaaagaatatgccaagtatccccccagatcagctaccaaagctcatgcagacaatgcgtacagctagtattagcctatctactcgatgcttgtttatgtggcagctacttaccatatcccgcccttccgaagccgctgaagcccgttgggatgaaatcaacttagagaccaaggaatggaagatacctgctgctagaatgaagatgaaccgtgagcacacggttccgttatctgacgctgctttagctatcttagagctaatgaaaccactcagtggtaatcgtgagtttatctttcctagccgtatcaagcctacccagccaatgaatagccaaaccgtcaatgctgcattaaaacgcgccggatttggtggtgtattggtttctcacggtctacgttcaattgccagtaccgcactcaatgaacaaggcttcccaccagatgtcatcgaagccgcccttgcccacgttgataaaaatgaagttagacgcgcctacaatcgtagtgactacctagagcaaagacgccctctgatgcaatggtgggctgattttattgaagaggcagataggggaagtattattgaaggcgggataagagggatatcgctagtcgggtga

SEQ ID NO: 301884 - DNA, 1173 bp, Proteus mirabilis
atgggccagacaaaacaaaataaacttccccgcggagttatgattcgtaagcataaatcaggagaaacaattaatatttcattcacatttaaaggggttcattgccgtgaacctctatctaatcttgaaataaactctaaaaacataaaatacgcagaacgtttattaggtgagatatataacaaaatagaaaaaggaattttttcttatgttgaatatttccctaaatcatcaaaattaaaaatatttggtaataaatgcaaaggaaggagcataaatgaatatctagatgagtatttagatatttgtaaaactagagagttgtcaccatcaacaattgttggttataaaaaatgtaaaaatgcactttctgcattacacgatttatcagttgttgatttaacgccagggatattaaaaacatggatacaaaaacagaatacgtcattaaagacaattagaaatcaattatctttcttacgaagtgctttagatgaggcggtaactgatggtttaattctatctaacccagcaactttagtaaccgcatcaagatatcagacaaaaagtagttcgctagagagtgactatgttgtagatcctttaacgcctgaagaggtagataaaatatatagctccacaaaatatgatcaatggaaaaacttatttcagtttgcagtcaatacaggcttacgtagctctgaattatgtgcgttgaggtgggatgatattgatttcattaacaacaaagcgcatatcaaatcagctagtgttgttggcgtaattaaaggcactaaaacgaaagctggaacacgaattatagaattgaatgaatatgctatttcagccataagctcccaaaagaaattcacttttttaaaaaatgaaactatttttgaagatccaaaaacaaatgaggcttgggctggtgctgacgcaattagaaaaaaagcatgggtaccaacactaaagaaagctggagtacgatataggaacccatatcaaacaagacatacatttgctgtcaagcatattagcaatggagttaacttattttggttggcttcacagatgggacataaaggccctgaaatgcttttcagacattatggatcgtatttgaaagagtatgatggcaacacttctattttaaagaaagtagacagcagatag

SEQ ID NO: 301885 - DNA, 207 bp, Proteus mirabilis
atgtactttgaatgcataccgatttctatgtattgcaagttatttggtgaatcaactgacgcaataaataagcggttacaaaggcaattctggcatgagggagttcacgtattgaaaattgaaggcgtaaaagaacgctggattgatatgaaggaagtcaataaatgggccagacaaaacaaaataaacttccccgcggagttatga

SEQ ID NO: 301886 - DNA, 222 bp, Proteus mirabilis
atggataaatcaataaaccaattaaatcccaatgatgttataaaaattggtaataactggtatcgaattaggtatttaagatattggggaaatgaagcatcaataaatctacaaaaagaagaggatctattatcttattatcatgacaagacgtgtttaagattatcgataaataaagattcaaatattaaatttgaggttaagagtgaaaccgatacttga

SEQ ID NO: 301887 - DNA, 699 bp, Proteus mirabilis
atgaaagagcgtggaattatttttaatgctgaaatggtgcgtgccattcttgacggacgtaaaactcaaactcgtcggatcataaaatccgtaccagcaactcataattttcatggctgggtaacgtcaagcacacacgcaaaagatgaaggaaaggcttgctgggctatcgatgattcaccgctactcaaagaacctattcgccttaactgcccgctaggtaaagttggcgatcgtctttatgttcgtgaaacgtggagtgtagtcagtcatgagtttgatgatgatggattgatgattgattatgttcctgatagaccaactaaagctgtgcatgaaatgccgtatggtcatggttatttcactggacatgtcatttactctgctgatggtgatttcacgtggggtgacgatgatggttgtattgatggtcgttcttgctggaaaccatctatacacatgcctcgctgggcttcacgtattacgttagagatcaccgatgttcgtgttgagagattgaatgatatcagtaacgatgatgctaaatctgaaggttgttggtatgggcgtggaggtggagttcccgataaggctattacacctagcgatcaatttcctactttatgggaagaaatatatggagatggaagttggtcgtctaatccgtgggtgtgggttattgagtttaaaaggatttaa

SEQ ID NO: 301888 - DNA, 498 bp, Proteus mirabilis
atggctaacggatcagtaaacaaagtaattcttatcggcaatttagggcgtgatcctgaaattcgttatcttccttctggtggtgctattgcttatttagctgtggccacatcagagaaatggcgtgacaaacaaacaggtgaaaatcgcgaaaaaacagaatggcatcgtgtcgttctgtttggaaaactcgccgatatcgccagtggctatttgtgtaaaggctcgcaagtttatatcgagggccaactacaaacgcgcgagtgggatgataacggcgttaaacgctatacaacagaaattgttgtaaagattggcggttcaatgcaaatgctaggtggtgctagtaaatcagcaggttcacaaccggcacagcaaaacccgccaccggctcaacctcaagcacagagtagtcaaccaccaatggattttgaggatgatattcccttcgcacctattgggcttatgtatccacgccatttaattaatgtggtttga

SEQ ID NO: 301889 - DNA, 468 bp, Proteus mirabilis
atgcaattgagctctcgccaaatcagagtttttaagctggctatacttttaagtacagggaaaaaagtccccacgattaagattatttctgctcttgaatgctcggagccaactctcacccgtgttttaaaagaaataagagagtcttatagtgctgaaattaagtacagtaaatcatccagatcgtatcaaatgactgaacgaggtcagcttgataataaagcattacgtcgtatgcgagaggcattatcttcgaatgaagaactacaacatagtggcacaacgagtcgtgtttatttagataaagataagaaaaaatcagtatcactatctttaaaaatgtcagcactacgaaaaatagataaactttcttttttaagaagtacaacccgaagtcagacggttgagtttcttgttgataattatgtagaacatttaattcaagttgctctccaagataaaaaataa

SEQ ID NO: 301890 - DNA, 300 bp, Proteus mirabilis
atgagtcttgatatacatattacaactattgaaggtgatattattcatattgttatgagtgaagcactacattctgaaatcttttcatcttcaacaaaatggggtagtttgaaaaatatacgaaaaataaaagactattacaaggttgattgtctttttaagaataaagatgcaattgcttttatacaagaattagaagatataaaaagtagaatatcagcaaaaaaaactgagctacaagaaatactgaataaagttgacaacacaaaaatcagctttattcgagtcagtggcgattaa

SEQ ID NO: 301891 - DNA, 126 bp, Proteus mirabilis
atgattggtttaggaagcgttcatttacattgtgcaatggcctatttatactaccagccaaattttacgaagagaaaacagatggatacgcaaagtagtaaattaatgcaaaaaataaattggtaa

SEQ ID NO: 301892 - DNA, 318 bp, Proteus mirabilis
atgaaaatatcggatatatacctaggtacaactgatgcgaaaaatgagttattaactaatagccctgaagagagattaaaatttaaaaaattatatgttttacctcctgcgttaactgtagataaatacttaaaccacagtaagtacttcattacaggattgaaaggtacaggtaaaactgctctattacgatatatatctattgttttggatgagcaaaaaaacacaacatcaaaattcgtacttttcaaatcagaagttagtgaagaaactaaaaaagatttcagtaaagcctcaagagttgaagaggtaatctaa

SEQ ID NO: 301893 - DNA, 1161 bp, Proteus mirabilis
atgttaaccgaaagtggcattgacacctttcagaataatgaaaatctctcaatgtttcatactttaatgagatcagagaaaaaagaggtaaatggaaagagttgtttttcaaaattgataccgaacattagaaaaggtaatatcgaaatcagtaaagaccctagattaaatcttgattttgattgggataacaatggtgtcgcaaagattgctttttataaattaattgaaaaggctgattctgcatttgaatcacttcaaccttcaaaagatagcattaatattttctttgatgaacttgaacttaattatacaacaaaaaaacaatatcagcgtgactctaggttgttaagagatttaattataacaattgaaaaagttaacgctatatgtaagagaaatggattcaatatatgcttatttgcagctattcgttctgaggttttaaattcagttgattctttagggaaggaaataaataagccacttactgattttggtactgatatagtttggaaccgtgctggcgttgattcgattcaacagccattacttcatattgtagaacagaggataaacaactctcgagaggagtttggattagacgtattaaatccagctgagttgtggagcacttactttcctaaatttatccataataaaaaacctcaaacatatctccttcataattcttggtatcgtcctcgtgatattgtcaggctgttgctttccgcacaagagagctatggtgaggagagtgcttttagtactcagtctctggaagctattagaaaaaggtattattctgcatgttgggttgaattgactgaagaacttaaagcaatatacaagtcagaagaaataaatgggatcaagaatattctatatgggtatactcaagtctcaactattcaggagatttcatcacatgcagagagcgttgcacaatcctaccctgatacaagaaaacttcttgataagagattaattgctgagatattagtagatctatataggattggtgttattggtaattattctaatgaaagtcaaacaggaaagaaaaagtttcgtttctcctttcgtggggatgatgacattttacttcatcagaagttttatatacataatgcactcaaagcccatttatcaatagattga

SEQ ID NO: 301894 - DNA, 981 bp, Proteus mirabilis
atgggttctttatcttggaaaaataaattaaggtggttgttcaataatctttttgtaattatattgttttcggtaattttatctgcagtaataaatactggaactcagtttcaaaatggaattttttattttttgggtgacgctgagcataatgagtataactattcttttaataactttccgaatttttttgagtttattaattcaacgtttaccgataacttgctattgtgtttttttatagttcttccatgcttctttgtgaaaaagttaaagaatgttctattagtttctataatgacctcatttgtttttactacggttaaagatgctattggcatttatttctttatgagtggtgaagggagtacaatatttgagtgcattttttcaaatgcgataggttctcctgtaattggacttatagtaacgcttatctttcatattaaaaagattttatttgaaatgaatttaaacttgattcttaataagtttattttttttattgcttctgtttttatttattttttattgatgttcttttgttatctttttgttttatttttttataagcctatgccagtcaattttagttttgagtccaaggctgattttaaaggttttttctatgacataactaaaggtgaaggtgagggtgaaatatcagttgatgtgagttctggtaagggaagccaaattgggtttgctggaatgtataaggatattagtttaattcaaggtgataatgagggattaaatatacaggtggctttttttgctaattgcattaaaaaagagcctcaagactttcctgaagaagacttttatacatttgaaaatgttaaaagctttagttatgataatgaagataaagatgctatttcgcttgtttatttttccaataaattttcatcgaatacagttaatataagaaatgttagtaaattaggccttttttccaataaaaaaatgtttcactga

SEQ ID NO: 301895 - DNA, 777 bp, Proteus mirabilis
atgcctagtggagaatcttcaaaaataagttatcctattaatagtttgaatacggaattagtcgtaataactccttcatttattagtgataaagaaaagaaaagtgattttttaaataaaaagataattattaatgttaatggtgttctatatgagtatacgtttaatttaacaaggatgaagctattagatgcaagtaaaagagtaaaatgttcttgggtgaaaaaatcgaaaatagaaaacggtaatgtggagttaaatcctaatatatcattggggatggcggttagaataaataaagataagaatgattattactattatctttccaaagatgaatcatatattgaattgaatggctttgagggtgacttaagaggatataagtcaaatgacaatgatgacaatgatgacaatgatgacaatgatggtagcacaatagaatataaggttataaacaataaaattgatgttgttgatatttatggtgtcactaacttaatagttgatggtaaagttttagagctaaagaatgattcatacatgagggtttttggtaaggatattaattggcatgttaaaaaagataacattgtggctgtatatggtaaaactagtaatatatatttaaataacaaaaggcttactgaaactttatgggagaaattagatattttatctataactataatatcagttattagtatgttatttcccgttttcatatatatgatgaagtatgcactttctttaattaaaagaaatgaagagttataa

SEQ ID NO: 301896 - DNA, 225 bp, Proteus mirabilis
atgaaaccaagaaaacgtatttactatacacctgaacaaaaagcgattatttgggacagatataagcaaggtgattctttacatgagatcgccagaatgtttgatagataccattcttttattatgcccactatttatcaaacgggtggcttccgtcctcccgtccgtaaacgccacagattatcgctttcgctgatgaacgagaagaaatatcgagaggattag

SEQ ID NO: 301897 - DNA, 399 bp, Proteus mirabilis
atggtggagaagaagaggaagacccactcaaccaatacttcggttgatcctgcaactcaatatgctcaagacgttaatagtggaaaggtgtcagccggtcccgatatcagaaattcctgtgcaaggcacctcaaagatttaaatgaagctaaaaagcgcggtttagtatggaatgttgatgctgtacagcgcgccattggattctttgcaaaggtgttaaaacttaatgatggtgagcatgaagggaagtcatttatcctattgccttggcaatgttttgttatcgcctccatctttgggtggataatagaagatggtacacgtcgatttagtatggtgtatgttgaatcaggtaaaggatcaggcaagtcaccattagctagtggggttggtctttaa

SEQ ID NO: 301898 - DNA, 273 bp, Proteus mirabilis
atggaggacggttctatcctcgtgaaaacgtatcgtcgaactcaccctaatgcacctaaatttgcccgtaatgaaattgacggttacagcgatggggatccgattgatatccctgatggtcgttttatttctgttcgtgtgcagatgccagagcaatcaatctataacgtgagaatgcgtgagatggaagtggcacagaaagtggaagaggagcgcagacaaaaagaagaggaagagcgacaggataacataaattacattcattcatattaa

SEQ ID NO: 301899 - DNA, 609 bp, Proteus mirabilis
gtggacaatattaagccaccaacttgtactattaaaggcgcagcacaaaaagatattatttttgattatggaaaaataagcccatcacttatccccaaatcgacaatttactcttattctggcattgtaactaataatgccattacgattgaatgcgatgcaaacacatatttaacatttgttgtgtctgatacttatggtgacacggagttaagtgttaataatacgtcaggatggtttcatttagttgataaatcgaatcctgaacatacagttggagcggctgatttcgtattgactaatgttactgtcgatggtaagcctgcgtatatttcacgagcaaatgatgttgctattacagggacaaactacagtaatgtcatctataaagggccaacctttggttggacatcaaaacaacaaacagacgttgataaaaatgccctggctctaattccaggtcaagtttttcaatcaactttagggtatggtaagtcaaatggtacctttattttatctaaagatgaattaagtaaaaaaggaatagatttatctaatggtttagattttatcggagaggccgttctcacttttaactttggtgtctaa

SEQ ID NO: 301900 - DNA, 927 bp, Proteus mirabilis
atgaccagtttacgcactgtatcaaagcacccagagcaattagaaaccacaccattaattgcggaaagtcatcactatgatgatcctttagcacctcaaaagctagtgtttttagaggcagttaatcaacagcgttgtgtaattaactcaccacagcgcaatagccaactcactaatacaatacctttttttatcgtacttttagttatggcctgttatacattatttggttttatttccgaacatataaattataaaagacattttcagagtatggtcgaaaaagttgaggctaaatatagtaatgaacttaatttagatgcgcctacattaaaatatgtaaacacgtacagaccatattttgggaaaaaaaatataaattattgggattatataaaggcttataattcaggtgaattttttactgatggccaatatgaaaagtacctcgtcattggctggttaatttttttccccggttttttatggctatttggctacctctctttctttacgcctcctgtgtaccttattgctgataggcaaagagggatactgtatagctatggcatgggaaaagtacgtttaacccgctataaagaggcgcaatttggttatgcgggcaatatgttggcaattaaactatatagcattaatgaaaaaacagaccaattaaaaacgatcctctatcgccccaatgtgtcccactactccagtttcctaaccagtactgacagtgaaaaccaccgttttatcactttccttaatgcctatatgcaacaaggccgagatgccgtttcgactgttgattaccaagcccgtaagccctttttatcttttggtaaaaacccacttcctgctgattttgagcaacaggtcgaacagattctggcaaagcttgatcaggagaaagaacatcatgcgtag

SEQ ID NO: 301901 - DNA, 900 bp, Proteus mirabilis
atgactattgatatttttcagtcactgaaaaatgcagtattcgatttacagcgtgctgattttcagaactatcatcagcctcttaaacagctagcacgtctgctgaaatcggatgaattaatcaatattaataattcattaatacaggatgttaatattgatgactttctggcttcaagctatgccacagaatcaagcatggcgggatctgcaacgctttgttggcctgatgaaccattagaaattctcgggatcaagttgcttttaattgaaaaaatggctcaggatgaagattttacctttaatttctgccataaattcttttatgatagaaaggtaattgaatcaataaggaaatttacttcatcctgcctcgttacttttatacgtgattaccagctatatgctcagaatcagtcagaacctaagcccaaggtaatacaaaatatctctcgtaagatatttattgttcatggacacgattctgcaacacttcatgcagtggctcgttttataggtaagattggcttggaagaaattattctttctgaacggccagatggttcgagaacgataattgaaaaatttgaagaggaatctggtgacgctagttttgctatcgtactgatgacgcctgatgataatggaaatgccgttgcatcggaaaacctaaagcttcgcgctcgccagaacgttctttatgaactaggctactttactggcaagctagggcgggggaaagttatggtgctgaaaaagggtgatatagaaataccttcagatctggccggtgtcctatatacggaacttgatgaacataatggctggaaacgaaaacttataagtgaactggattatgctggagttccattcgataaagctaaagctctcattgcttaa

SEQ ID NO: 301902 - DNA, 285 bp, Proteus mirabilis
atgaaaaatccaagtattgataagcttcagaaacagataaaagaagtggaacatgcaacagtagcgctggatggtagttataatgttaattatgatgcgaatgatctagttagtattgaaaatgcaattcaggaagcatacagtttagttgatgaacgagcttcacagtaccaaacaaatcctctcgtcatacccataatagaacaggtgaaagaaaatctgcgagagcagatactcaatgatgctgagcaacaaagaaatggggtgaagaaagatgactattga

SEQ ID NO: 301903 - DNA, 171 bp, Proteus mirabilis
atgtctgatacagttgatcgtgccaatgaatatgcagagttagtgctggaacaaaatattcaagcaatgaaaaaggcaataaagagtgtatcggcgtttgaatgtgagaattgtgagcatccaaatacctcaagagcgtctccaagcagtcataggctgcacattatgtaa

SEQ ID NO: 301904 - DNA, 489 bp, Proteus mirabilis
ttgccttgttttatacacgattttcaattcaaagagcaaaatggctatttgcgtcaaggtgtttgcccaaactgtaagaaaaaagagttatttacttcaattgaaataccgtttgtgttgcgttgtgaccgtgtgaatacatgtggtgctgaattgatcgtaaaagaaatttatcccgatatatttgacgattggtcaactcattaccctaagacacaacaagcacccaaactgatgacttgccataattatcctgaaattgcgttggccaagttaaaaatagaaattggtagcaataaaaaaccgttattggtttgggcattagataatggcgcagctggcgaacgggctatgagaaagtttgtgggcgttaagacggtgcgaagtgtggtaaataatcagtttaatagcacgcttgcggtggggagtacgcttaaaagacctgaagtgattaagtgctgggtgtttcaggaaaacagtgaggggtag

SEQ ID NO: 301905 - DNA, 2538 bp, Proteus mirabilis
atgataaatattgaaatagctggtgctggtgcaggaaagacgtatggcttagcaaggagaattattaactcgtataatacaaattcgagtaaaacaatatatgctctaacttatacaaatgcagcaaaagaaaatatatctaaagaaataattaagcaatataaaaatatacctgataagatcaaagtagtaactattcatgactttttgataaatcagattataattccttacgcacatttagtgacagaataccacataaatagctcatcaacacaaaaactgagtgataaaataccatataaacagaaaacacttaaataccttaaaggtcagaatgtcattcacgtagatgaagtctattccttttcaagggcaattattaatccaaaaggaaagaataaaaaaataaaaaaacacatagaaataatatatcaattattagaatcacatataagtcatattttcattgatgaatgtcaagacttagactcaaactgtttagactttttttatttgctatctggcgctaaattagaaatttatatgattggagatccaaaacaatcaataaaatatccatctgatttcaatgattttttatctgagcactatttaaataaactgggaaataatgaaaaaatattaataaataatatatctcgtagaatccctaataaaatattaaaaatctccaactatttttgccccgaaggacaagaacaaagtagtatagatgatagattaggaataattaacttattaaaaatagatcattctacttggattaatgatttagatgaaaacgacatgattatattagatcgttcaaatgaattttatagcacatcaaaaggtaacgatgaaatatctttgccctttgaattaaaagaaattatccctctcagttcaattagaaaaaatcgtgatattaaaacattcacatattcatttgtagaagatatactatcaatgatttccgaattgaatgaaaatgataaagtcgttatagctagaaaacttatagcaaaatatatgattagtaaatttatattttgccaagaaaataaaaataaaaattatgctattctattagatttcattgagtcactaattaacaataaagaaaagacttcaaaagttttaagcatcgataaatccaaaggactagaaagtgataacgtttattttatattatcaaactctacattgaattatattaaggatgctattagcaataaaaccccaaaaaacaaaaagcataataaagaatggaataaagtttatgtggcattaaccagaaccaaaaataaattaacctttgttttagatgaaaggttaataaacgaaaataatataacatcatttacaaatactattaatcactatataactaatgtaaggaaaaaaatgactaacgaatatggcgcaataacaattgacacttcgatatttaaaagccaagggatgaagttggattcattattatttaaaagcttatatcaatttaaagattccactctaaaaataatcatttcagatatcattttaaatgaagttaaaaaacatttaattaaccatagtaaagaaattcacaatgaattaaataagaaactaaaagattataagagatactttcctactgaagttgactttgacgatttcactaaccgatacttatccgccgataattcacaagttgtttctactgataaaatacatgattttattagaaatacaggagcaaccataattagttcagatgaatatctggatattaatttactgatagaaagctattttaatagtgagcctccttttagcgattctggaagtaaaaaaaatgagttcccagatgctattgctctattagctatagaaaaatgggctgaagataataatagaaaaatcattgctattagcaaagataatgattggttgaattatgcagatagctctgagtggatagatgtttctgatgatttacctagtattatagcaaacttacaacttcagattaacccagaaataattctatctttcatttcaaataaattatctgatgaaagtgacatcaaaactgagttagatacatacgtaaaagatactttagactatttaacaccttatgctgaagccgaatcaggtttttcatatgattatgatagtgttgaactgatttttgaaagtttatcgataattgagaacgaaaatggtgctttagatattaagttaatagattataaagaagatagtattgtcgtaaaaattaatgctaacatcaatgcaaaagcatattgtaactttcatttttcagttatggattctattgacaaagattatgtttcaataggttacactagtgccgaatctgacttagagtttgactctgaaattctagtaactttttctggagattttgaaaatgtaaatgccataactgacatagcaattgaagaaatacaactattgagaaatctaaaatccataaactttggctttattgagccagatttagacatatacgacgatgagtaa

SEQ ID NO: 301906 - DNA, 1779 bp, Proteus mirabilis
atgataattaacaaggttgaaatcaaaaattatagatgctttgaacatcttgaagtatacctacaaaaattgaatgtcattgtaggagaaaacaattcaggtaaaagtaattttataaatgcacttaaattaccacttaattgtagttcctttgacttttcttcaaaaaaattacactcatatgatataaactctaaatcaattgaaaagttcaataaattagctcaaaaaacactcaagaataataaaattgataacattgaaccaaaccaatttgacctatttatatcaagcattcctattgttagtatatcaatacaattagatgattttaaggataactttgagaaatccatcgttagaaaatgggcggtaaaagataataatgatgatataatttttaaaataacatatatattcgaaccacgcgattacattgattttatacaaaaaattcatgaaatagtaaatctacaagcagatgaaattacaagccaaaattttccaattgatttttatgattataaaattatttcagaaggtaataataaacagatttcatatgatgaattgaatcttatcagcatgagtataatcgacgctgagcgtgacgatttctctaactcccctgccaataaatccaataacattctgactaaatttttacttaaagaacttaacagtcaagaaattaatttaatttcagaatcttattttaaattctttgatagcattaaagatcttaaagcattaaataaatttctaggctcagatgatgcattcaagaatataaaaaattatctacaggaattaatatgcgttcctaacattccaaatttaaaacacattatttccaatataactttagcttatggatctgagtttctttatcagaaaggtttaggggaaaggaatttagtttatatttttttattttttgcatattataaaaatcaagctgataattttaatttatgctgtattgaagaacctgaagcacatctaggtgtaaataaacttagagctataactgattttatttataaaagcataaatgaatcaaactcattattccaagcaataataactactcatagcccatccatcattaataaattaaaaatagagaatttaattgccatatcaaataataaagctataactttatcaagtttcactagtgatcttaataattacttaaggaaaagacctaattttgatattttaaaaatattatttgctgataaattaatattagtagaaggtcctacagaagaaatgctcataagaacatttttagaaaaagataatctatttcttcatgatgtagaggtggtaagtataggacaaaaggggtataaaatattccttgatatttggttgaaattaaatgaaggaaatatgaataaaaaaataggaattgttcgagattatgatgaacaggataatgcaaaaaaagaacatgatgaatattctataaatcataaaaacatatatatagaaacgactgataattatacgcttgaatatgaccttgtattaaaaggaaaaaatgctttttctatagcaaagtattttcaacttaattacccacaagaggatacaaaaattgttaccgatgatacatatcaagatatgtgtagtgatattattgatttattaatcaataataaagctgatatgatgtcatctctttgtaatgcaattcttgatcctaacaaaaatgtagatatagagttacccgctcacttaagcaatattataaaggcaatgaaatga

SEQ ID NO: 301907 - DNA, 411 bp, Proteus mirabilis
ttgtacaccggtgtacgcttggtggtcagccaacctgaaatgatgtctatcgccactttcccgcgacggcaagggcttgccactttacgtgcattcctttgtgccaaagacgagtttatcggcatcaaggacatcacccgcgatgatttgttggccatgcaccggataccaccgcaactgatggggatcattccgcaaggctccggtagccttggtgatatcgaaaaggccgcaatggtgttttggttcaatgagttattactgctgatggaaagtatgaaatcaattaacgacatgctaggtattgaggtgatccgctttaaacaatatgcattactggattttttgacacaggcgaagaaaataaaccattcaattcacattaaccgatgctctccctttcaaagctaa

SEQ ID NO: 301908 - DNA, 741 bp, Proteus mirabilis
gtgccttactttctttgcctttcatttgtattaaccgaaactatttttaatttcaaaaaagcccaaaaagaattattccgctcagtgaaaaaaaatttccaaacaataataaaaacaccttacttcatgacgcaccccaatgaatttaaagatatttttagaagtaaaaaagacaacaacagaataacaaatctagatagatttataatgctattattgttttcactgcttattattcctatgtctatactatctatctctgcattagtaaataaccttgatggtgaaatgcaattagaagaagcattcataccatttattatattgtgctttatcttatatacaattccaaacatgatgcttttactcccaaacattgggaacataaaaaaaactgtttacctttcactttatttaatatttttatccttcaccactaatattcttaatcttctggcttataaaacctttgactccatacatttcattaataaaaacaaaatcgaaatagcatcaaaaaaatggcatgatgctgacatacctattcctgcaacactgaataaaattcaaatgactgctttcaatgcatttcaaacaccaacccattctatcttttgtaactacgatgatataaaatcattaaccacaaaaattgaatttgttttctttaaacatgaaaaaactcctcctaaatgtatatttgtcaacaatgacgatgtgagtctagttgaaaaggattag

SEQ ID NO: 301909 - DNA, 1629 bp, Proteus mirabilis
atgaataattcgttttcaattatactacctaaaaaagataatagcctagaagaaatagagactaatcagagtgtgcttattatcggtgcgaatggttctggaaagtctcgccttggggtatggatggatcttaaatctcctcaaaaaaatatggttcatcgtatttccgctcaacgggctttaaggatgcctgaccattcaacaccaacttcgcttaaacaagcacagaataatttactctatggaagtacggatttgggagatttggaaatattttggtataaagagaataggcgctggacaaaggaacctgccatatcatcattaaatgattatgataaattaatggtgtacctcttttcagacaaagttgaagtgaactccaaatatattgaattagtaaagctttcagacgaaagaattgaaccactgacaactaaattagataaggttaaatacatttgggaaaaaaccttacctcaccgagaacttgttttaggtggtttgacaattcaaacacgagtaaaaggaaataacgatattgtctataacccctcagaaatgagcgacggtgagcgagtcattttctatctaattgggcagtgtcttgcagcacctgaaaatggaattattattatagatgagccagaaattcatcttcacaaatctgtgcaagttccattatggaaggatatagaaaaactccgacctgattgcctgtttgtatatatgacccatgatactgatttttctgcagcactgtatgaagcaaagaaaatctggttaaaaggttatgatggttcctattgggattgggaatacgttcccgatatagaaggcctaccagaaagtttactaattgaaatattgggcagtagaaagccaattgtttttgtagagggggaaaatggaagctatgatgtatccctttaccgtgctgtgttaaatagttatctagtgataccatctggttcctgtagccaagtaatacaaaatgttaaagctctaagaaccagtgaagaactccattatatggaagtttctggtattattgatagggatagacgcgttgaaggagaaattcaatctcttctagagtatggtatttatactctaagcgtagcagaagtcgaaaatctcttttgcgttccagaagttataactttagttagtgaacaattagtcagagatccagatcaagatctacaatcagttaaagattttgtgttccgtgcaatatcctctgagctggatactcagatttcactgcgtgtggctagcgagatcaaattcatgcttaatggtttcgatgaaaaagcaaaaggaatcgacggtcttagtaacgctctcaatttgttgacgtcaaaaattaatgttgaagaactttataatgaaagtttatctctgtttaaaaatgcagttgagaaacgtgattatcttcttgcattaaagctttataacaggaagagtctttcatcacaagttagtaaacatctggggctagctaacggccaacttgctgaattagtaattagaatggttcacaatgaaagaggagagtcaatgagaaaggctctcagaccatattttggtgagttttcgagtaaaatagtcatacaaaatacataa

SEQ ID NO: 301910 - DNA, 1098 bp, Proteus mirabilis
gtggtcatttcgctacattcgccctctcaagctaaaaaaagccttggttcttaccctgccatcaatcttgctgatacacgtagttaccgccttgaagcaagaacactgctcgctaaacatatagacccacaagatcaccataaagagcaagtcagtatcggcttagaagctaaggcaaatacctttcaacttgtcgctgaactttggtgggaaatgaagaagcccactgtaacagaagactacggtaatgatatttggcgttcacttgagcgagatgtgttccctaccattggtgacatcagcgttactgatatcaaagcccatatattggtccaagcaatacaaccggttcaagtcagaggtgcattagaaaccattcgtcgcctctgtcagcgcactaacgaagtgatgatctatgctcaaaatacgggtttaattgatgctattccaagtatcaatattggcaaagcttttgaaaaaccaaagaaaaaaaacatgccaagtattcgccctgagcaattaccacaattgatgcaaacaatgcgtacagctaatattatcttacctaccagatgtttgtttatgtggcaactgcttaccatctcccgccctgccgaagccactgaagcccgttgggacgaaatcaactttgaaaccaaggaatggaagatactcgcagccagaatgaagatgaaccgtgaacacactgtttcattatctgacgcagccttagctattttagaactaatgaaaccactcagtggtaatcgtgagtttatcttccctagccgcattaaacctacccaaccaatgaacagccaaaccgtcaatgctgcattaaaacgcgctggattcggtggtgtacttgtttcacacggtcttcgctcaattgctagcatcgctctcaatgaacaaggtttcccacctgatgttatcgaagccgccctagcccacgttgataaaaatgaagttagacgcgcctataatcgtagtgactacctaaagcaaagacgccccatgatgcaatggtgggctgattttattgaagaagcagatagaggaagtattattgatgcgggtttagagggatatcgctag

SEQ ID NO: 301911 - DNA, 708 bp, Proteus mirabilis
atgtctaagaaaactcttagagagtttgtgaaacatgattcaatcaaaaatgtcaaaaaaaatgtattaaaaatagacttgaattataaaagacttattcagttttgctcgggcactgaaaatattgaaagaactaataagaatgtagcactaactaatattgcaaaaggaacccaccgttctttaagtttactggccaacaatttgtcagatgactatgatataacattaatagcattatgtgcgagaaacctttttgagcttaatatcaggctaaaatcgataattgaagatgaaaactcacttaacaaatggatgagtgagatggttatggatgaaaagcagattatagacgctatatcaacgattgctaatgataaccacaccactgaactggagttgttcgaaaacaaaaagaaactaaatgattctattctagatcaaaataacttaaaaagtgtcaaaagccctgaaacagtcaaaagtattgctgaaaaaattggtgaacaagaagaatacacgacgctattcaaactattttcaaaattattgcatcctacttcatatcttatcaatcgacataacgaagcaagttgcatctatagctttaacatactgattgtatctgcacaaaaatatgcatttgatatgtttgagagattaaggattgaattaaacgtgccggaaggtgtattaaaaccatggtga

SEQ ID NO: 301912 - DNA, 744 bp, Proteus mirabilis
atggctggtaccaatatagaaggccatatggcatatcgtattaatagtaatttggtaatgaccattgatactcaaatgttgaattgggtaaatataagaggatctgtttgtgaacaggctacaccaacattaactgctcataccagtgaatttactgtacaatttccaatcagtgtgacattttatataaatgatatggttattgattctcagctacctataactgaaatggatctaggaggttatgttcgtgcatttacacgatcaggaacgagtcctcctcaaaattcttgggcattgaatgatgtcactgttcctatgcgattagcagcatcacaattaaacataacttcttcttgtaaaacagtaacaagtacaggacaagtaagtactttaaatttaaagcatgggcaactcaatacattaaattatgacagcttagttacagaaagtgtaacttataattgtgttttttcaaaagcaacaaaagtgggattacgtctctattatataactgataacgatcctcaaaaaagattaccgatggtgagtacccaaaacagtaataataaaatttatagtgaattgaccatgacagatgaaataaccgggcaaaaaggtaaagattttaaaattgacattaatgatttgagaacaattaagataaccagccatcttcaaggaacaaatgcgatagctggagattataaaggttcagcttggctaatcgctacgtttgattga

SEQ ID NO: 301913 - DNA, 462 bp, Proteus mirabilis; identical to SEQ ID NO: 300354

SEQ ID NO: 301914 - DNA, 159 bp, Proteus mirabilis
atgcaatggaagtctttaatcatcatcgtcggttttattcttacattactcatctcggtcgctagtggcatttatctctcaattgataattcatgtgttaacgataaagccagtttagaaaaacgttgtcagattgctctctcacatcatcggtactaa

SEQ ID NO: 301915 - DNA, 471 bp, Proteus mirabilis
atgaacctaaaacaaaaggtgacagctgttgcgagtgctggcgctgtaagtattgcactaacagtgattggttattttgaaggtgtgcgttacaaaccttatcgtgatgtcgctggtgttttgacggtttgttatggacacactggaaacgacatcattcaaggtaagacatacacacaacaagagtgtgacgagttactgcagaaagactttatcagaacgcaacagcaagtcgatatcctggttaaagtaccagtcgatgataaaacaaaagcttctctatattcctttgcttttaatgtcggtaccacggcttttgcacgttctacattgcttaagaaattaaatgctggtgatcagaatggcgcttgtgaagaaatgaaaagctgggtttatgctggtggaaaggtgtggcgagggttggtcagtcgtagagaggcggagtcagcgttatgcaatggaagtctttaa

SEQ ID NO: 301916 - DNA, 270 bp, Proteus mirabilis
atgcgcatggacaaattaaccaatgctacctacggaacggctggcttaactgccttttttgcaagtctctcactttatgaatggggctttgtaatagggatgggatttagcatgcttcttggattagcaacttatctgatgacacggcgagaacagcgaaaacgaacagcattatttgctgaattagttcatcgaaattgttctagcgatcctcaagacatagaaaagatagttggtgaaatactgactaaagctaaaaaggacatttga

SEQ ID NO: 301917 - DNA, 264 bp, Proteus mirabilis
atgtcatttatccatgccagagaacatgcagatcatggtgatgttatctctgtacaatgcagccatcagattaatgtaattgttatggatgatactcaattcaataactataagaatggacgacaagcaaaatattacggaggtttttataaaagatttccagctaatattgcagtccctcataatggttactggaatgtagtactagcattaccagcaggacaccgcgctaatatcaggtactcaatcaacatcttgagatag

SEQ ID NO: 301918 - DNA, 180 bp, Proteus mirabilis
atgaaggttattattgaaaatgcaggtagtgtcatttggtatcgtgatgatagtaaaaaagaagggatggcatcaagagggtatataaaggacgggatacagaaaaaaatcatcaccgcccttgagagtgccttagttcaagccaaagcagagttacaactatctcaagatgttgattga

SEQ ID NO: 301919 - DNA, 804 bp, Proteus mirabilis
atgaatggattaattgttattgatggttttcaggttcgtagagatgtagccggtcgctattgtttaaatgatttacatcgagtgtcaggtggcgaaaaacgacaccaaccatcgaactggagttcattggctcaaacgaaagagttaattgatgaaatttcgaccgctcctgagatcacaggagcgcctattgccactgtcgctggtggatataaccaagggacgtatgtttgcaaagagttagtgtatgcctatgcaatgtggatcagcgcttcttttcatttaaaagtgatccgcacctttgatgctttagtgtcacaacagcaccaggagaaactcagtgataaggttcaagcgggcgtgatactactggaatcgatgtctaaaagtttaaacttctcgaattcatcaaaattaggggcttatcaaaagttacaagcaatggcggggttacctgagttagcccctgtttatgcgattgatgcgccaagtggatctatggatggctccagtcgtcctactgtggctttatcaatactgattaaaaaacacaatttacccatttcagcacctcaggcatttaaacgtttagccgaactcggaattgttgagcgtttatcacgtccaagtacgaaaactgccagcaaagtaaaagagttctggtcagtgactgcacgaggttgtcagtttgggaagaatatgacgagccctaataatcctcgtgaaacccaaccgcatttctttgagagtaaaacggatgagttgatccgtatggtgatgttgaataaacaggtgagcgcatga

SEQ ID NO: 301920 - DNA, 639 bp, Proteus mirabilis
atgattgattacgcactgaaattacaggagttaaaaagccaacctgctcataaattaaaagaaattggtgaccaatggcaatcaccagataacctttactacggtatcaactctaaatatggaccgtttactttagatttattcactgatggtcaaaacagtaaatgcccgcatttctataccgttgaggacaacgcactcactcaagattgggctgaaaaactgaaagagatcggcggttcagcatttggcaatcctccttactcgcgtagttcatatcacgaaggccagcctttaacaggtgttggtcacatcatgagccatgcattagctatgcgtgaacaatacggtcggtatgtttttttattaaaagcagctacatcagaaacatggtggccagaagaagcggatcacgtttgttttatccgaggacgtattggctttgacgttcctgagtggtttgttcctgcagatgaaaagcagaaaccaacgggcgcactctttgctggggcaatagttgttttcgataaaacatggacgggtaaaaaattcgattacattcatcgtgatgaattagagcaaattggcaaagcatttattgagcaaatgaagtggctggcatcgagaggtgttgcatga

SEQ ID NO: 301921 - DNA, 1062 bp, Proteus mirabilis
atgagtttattattactaaaaagtcgccctttagtcgttattcctgaattagcggtacgtcttggtttaaatgaggcgatgctgttacagcaaattcaatattggttaactgaaactacttcaggtgttgaatatgacggctcacgctggatttataacacagttgaagagtggaagaatcaatttccttttttctctgaatcaacgattaaacgtgcttttactaatttgaaaaagcagggtgttttacgcattgagcaaatcaataaatcgaaccatgaccgtactaattattatgcgattaactacgatcaccatctgctaactgatggggtcaatatgacccaatcgaacagtgataatacatctaatcgagcagttcaaaatgaccttatcgataagcgcaaattgaaaccgtcaaacagttcaaaatgcgctgttctgaacgggtcaaaatggcctgatcttacagagaatacaacagagattacttcagagagtacaacagagactaactcttcttgtcaggttcctactgaacccgacaacgctcctgaaaaattaattttggattatttcaacaaggtgacaaattccaaatatcgtgaaggaaaaacaacaaccgggcatatcaaggcgcgattagcagaaggatttacctctgaagacttgatattaattacggattacctgacagctaaatggcaaaaagatcccaagatgcgtgattacttacgccctaaaacattatttgttcctgaaaactgtattgaataccaagataaagcgatcaaatggcgtgatgcagggcgccctgaatgtgtgaatggtcgttggttaaagcctggagaagtttcagtggaaattaacacggttgaacgcgatgaaacttttagaaaaatgttcacctcaggctggaaacctgaaaatcgtattcaagcattagcagtcgagcaagcaaagaaaaatggtcttggtcgtatgagtgaagttgctggtttagcttcattccgtggtatctggaaacaggcgacagaacaagttgcactggaggctaagtga

SEQ ID NO: 301922 - DNA, 180 bp, Proteus mirabilis
atgaacaatgagaacccaaaccaacttgatcgctactataaaaatcaccgaggtatcgttgttcatgttgttcgttatgacagagaaaaacagcgcgttatttttatgcttgatggttgtgacgacccacagtgtgaacctgtacagcgttttaaagagaagtacacacgtattaagtaa

SEQ ID NO: 301923 - DNA, 990 bp, Proteus mirabilis
atgagccaaagtacgctaagagtagacgagttatatactgatgatattgatgagaacatggaagagttcgatgaagcagccgcaacaaaagaggctgaaaatgaatctgacgctcaagatgaaattgaactcattgaaggagtcaatcagcgtgcgttagatgcaactcagctctatttaggagaaattggctattctccattgttgagtgctgaagaagaagtattctttgctcgtagagcgttacgaggtgatatcccgtcaagacaacggatgatagagagtaatctacgtttagttgttaaaatatctcgccgttatacgaaccgagggttagctcttcttgacttaattgaagaaggtaatttaggccttattcgtgctgttgaaaagtttgatcctgaaaaagggtttcgtttttcaacctatgccacatggtggatacgtcaaactattgaacgtgccattatgaaccaaacccgcactattcgcctccccattcatatcgttaaagaactcaatgtctatttaagaaccgcaagagaattagcacataagctcgatcatgagcccagtgttgaagaaattgcgcaaacgctggataaacccgtcgatgatgtcagcaaaatgctacgtttaaatgaacgtatttcttctgttgatacaccgattggtggggattcagataaagccttactagatattatttcagacgaaaatgaagaagggccagaagcaaccattcaaaataataacctcaaggaaaatatcgtaaaatggttatttgaattaaatccaaaacagcgcgaagtattagcgcgtcgctttggattgctgggttacgaggctgaaacattagaagatgttggtcgagaaattggtttgacaagagagcgggttcgtcagatccaagttgagggattacgtcgtttaaaagatattctgcaagggcaaggattatgcatagaggcactttttaagatgaactag

SEQ ID NO: 301924 - DNA, 201 bp, Proteus mirabilis
atgaaagatcaatgttcaatcaatataggtaagcagaagcggtatatccctatcgcggaattttgtaagcgatacggtatgacgcttgattctgcaagatggcaagtgcgagagggtaaattgaaaataaaacccaagaaaaaatcacacgagcgagtttatatagatttagaacattaccataaagaatggtatgtatag

SEQ ID NO: 301925 - DNA, 585 bp, Proteus mirabilis
ttgaatcaaaatattgatttaacaaaaggtggaactgaggttttaaatcgcattatagaagcgtatggatttccttcaaaaatagctttagccgagcatttaggaataagcagtagtagcttatctatgcgctataaaagagatttatttccagctgatatcgttgttcgatgcgcattagaaacgggcgcaaatcttgaatggctaacttttggcattggtaaaacttttacaaatataaaagtagatatactaaaaatcccttgttcacgtttagtgaatgggaacctattaatgtttgatgatgttttatttgataaagcaatgctcaaaaacaccgcgccactaccaaaaaaggcaaaatgtataaaagatggtgatagttactacattttagaagaaaactttgacgatatatttgatggtaagtggttggtcgatgttgaagggaaaatcagcatacgggaattaactcttattcctattaaaaaagttcgtgtttctggttctggtgttccctttgattgtaatttagatgacctcaccattttaggtcgtgtaattaccgttattgaaaatttatag

SEQ ID NO: 301926 - DNA, 1017 bp, Proteus mirabilis
atgacaattagaaaacttgattctggagagtggctttgtgaccttcgccccaacggggtcagtggtaaacgcatacgcaaaaaatttgccactaaaggggaagctctttcttatgaaaaatttattcttgctgaaatagaagataaaccgtggcttggcgaaaaacaggataacagaagattatctgatttaataactctatggtatgacctctacggtagaacattgactgattcaaaacgcatgatgtcgaaactaaatggtatttgtgcaggattaggtgatccaatagcatctcaattaacagcatctgattttagtctttatcgagaaggtcgattaaaaggcagaatacctgatattaacgggagattaatggaagtaaaacccgtcacagtaaatcatgaacaaagaaacttatcagctgttttcggtactttaaaaaagttaggacattgggatttacccaatcctcttgcggggcttcctacatttaaagtcgatgaaacaatggttacctttttatataaaaatgaaattaagcgtttactagaagcactggcagaatctagaaataaaagcgtcttaataattacaaaaatttgtctatcaacaggagctagatggagtgaggcagaaaatctagaaggtagccaagtaacaccgtatcgcatcacatttagtaaaacaaaaagcaaaaaggtgcgcaccgttcccatatcgaaagaactctatgaggaaatacccaaaaagaggggtaagttatttacaccgtgccgaaaaaattttgaacgtataataaataaatcaggtattgaactacccgaaggtcaatgcactcatgtgttacgccacactttcgctagtcacttcatgatgaaaggagggaatattctagtgctaaaagatattcttggtcattctgatatcaaaatgacaatggtctatgcacactttgcccctacccatttagaagatgcaattacaaagaatccattagcttccttaaacgaataa

SEQ ID NO: 301927 - DNA, 483 bp, Proteus mirabilis
ttgcgttatcaagtcgtagcatcaaacaatcctattaataatatagagctaaagactgacagtgaatatcctaattgtattcttattgattttattgaaaaaaatgaaggtgctagaatagaaattctccatactggagataaaaacgatgttagggagaaaggaaaactaataggtgtaaaatctatctttagtaaacagaaaaaactatcaagaaaaaagaaaaaatcccaaaaaacttttagtaaaaaagcattagatgtaattcttttattgttgtcactattgtttccaataatgatcctattaatgattatttactcattcgcctctccagaggcttttatttctacaccccgccccgttagagatagtagttctccatgggtgatgcgtattatgggcttttccgtgatatgtgtatttatttttcaatatattaaccagcgtcccccttacccatcaagtttaaaaaagccttaa

SEQ ID NO: 301928 - DNA, 297 bp, Proteus mirabilis
atgagaaaccttgcgaacttatctcaagaaaaaaaagacaaaatcaatgtcgatttagccgcctcaggtgtcgcttataaagaacgcctcaatatgccagttgttacgtccgaagttgaacgtcaacaaccagcaccgaaacctgcagcccggatcatcccgctaccaacgaaagtcggtcaggccaagctaggtaaaggcgcttcttttcgctggactagccccgataggcggggcttggggtgtggcaacaatttccgctgtggccatagaaaaatcgccaaaggtggtatctga

SEQ ID NO: 301929 - DNA, 612 bp, Proteus mirabilis
atgaaatatagaatgaatgaaattaaaataaaatgtgatgaaatccttctagtcaatatgtggtataatttggatgagtcatttttttggccaattatggaattaattgacctcgatgatgattcacttataaaaatatatagcactattgaagaaaaatatcttaaaattttatatcatgaaacagttattgttcctgtagttgaatcaactcaatgcgaaaaatttgttgactatattaaaagcgctagtaataataaatcgaatttcattgatgacattctagttaatgatcttgaatcagctttgtttattaattatgaagagcctaattcccctactaaaataaaatattttagtagggtttattcaaagttaaaaagaatcataaaaaatgaccaagacaaaccttggaatgaaaagagggttaaagaaatattgaatcagattgtaattatctcaagtgaaaacaagtctgagtactttacttatatacaagtatattggcttagtatttattttaatcagtacagaaagtttagtagtgatattaatagtatagagttatacaaaaaaaagttatcagatatatttccatgtgctagactttaa

SEQ ID NO: 301930 - DNA, 210 bp, Proteus mirabilis
gtgctagcttctttccaatctccttttgcggaatggttaataatatcatcatttataaaactagatgttactggagccccttattccccttaccacccgccaactcaaacggatcaatataccccctcggacaatacacatacccatatggattcagcccacccaataatcctatcgggtctggggaaagatactaccctgtctccttag

SEQ ID NO: 301931 - DNA, 270 bp, Proteus mirabilis
atgaagctattaggccttaagtcctgcattagggcaacgaaatatcgttcttataaaggtcaggtgggtaaaattgcaaaaaatattttaaagcgaaagtttaaaactaagaagcccaatcagaagtgggtcagtgatgtaacgcaattcaatgttcaaggtaaaaagctttacctctctcctataatggacttatttaatggtgagatcgttgcctaccaaacgcaacgtcgccccacatataagcgagttgataagatgctaaaataa

SEQ ID NO: 301932 - DNA, 774 bp, Proteus mirabilis
atgtattatataaacactgatggtgaaaacgttgaaataaaattcacaccccaaaaaaagataaaatcagtagttaaatggacatttgataatgtcataatttctaatgatatttttgctgatgatttaaataactatttttcacctgaatacattggcagtagtcattatctaagtgatgatggctatttctttgatagttcagataatttgttggttggggcatttttgtatgttccagataaaaattattttaatcctgaagtgttaaatactatactgtcatttgattctacagatgcatctattcaaattataaatccgattaagtttaatgcagtatcaccatgtaattttagatatctgagtcgcgatggaaattatttgctatgcttatccaatatagatttaaacggagaaattaaaagaataaagattcacgacttttttgaatttatatttttaaataagaaaatggtaggttttttgctaattatgccctttgaaaatctagttttttttgatgacttaaactatgaatgtgataataatagcaatataactttatctttggatgaaaaaaatatttttctaagctattttgatttggttgatgaagatggttgggataaaataaatgatggtgatttacttatactaagtgaaataaataaaattaaaaataaaattaccaagatgaatgttaaacatactcaattaaagtcattatataagcaatgtgaatttatagtaaataattactataccaattaa

SEQ ID NO: 301933 - DNA, 1380 bp, Proteus mirabilis
atgtcagataatgtcatctcctctatcggcaccaatcaaactggtgttaataaccgtgttcaattacgcaaaacattgacgctaatgcaagtcgtcatgatggggttggcatttttacaacctatgacgatttttgatactttcggtattgtatcaggcataaccaatggtcatgtggcaacatcatatgctattgcgttaaccgctattttatttaccgcagtgagctacgggaaattagtcaagcgtttcccttcagcaggctctgcttatacttatgcacaaaaatccatgagcccacatgttggttttatggttgggtggtcttcattattagactacttatttatgccaatgataaatatcttattggctaaaatttatttacaagccatattcccaggcgttgatccgtggatctttgttgttgcgttagtcgcgttaatgacattttttaatctacgcggaattaacgttgtggctaacttaaataccgttattgttgttattcaagtagctgtaatggtggtatttgttggtttattaattcatggcgtatataacggcgaaggtacaggggagttatggactttccgcccatttgcgtcagtagatgctgaattaatcccaatgataaccggcgcgacaattttgtgcttctcgttcttagggtttgatggcattagtaccttatctgaagaaacacctaatgccggtaatgtgataccaaaagcgattttcttaactgcgttaatcggtggtttaatttttatcgctgtttcttattttttacaattatatttcccagatatttcacgttttaaaaatccagaagagtcacaacctgagattatgctgtatgtagcaggggccttgttccagtctattatcttagtgttttcttgtgtgacggtattagcatcgggtatggcggctcacgcaggtgttgcgcgtctgctgtatgtgatgggacgtgatggtgtattccctgaaaaagcgtttggttatgttcatcccaaatggcgtacaccggcatttaacgtactgttagttggctttttagcgctaggggcgatcttttttgatttagtcactgctacagcgttaattaactttggtgcgttagtggcatttacctttgtcaatttatctgttatttcgcagttctacattcgtgagcgtcgtaataaagggttaatggatcatattaactatcttatattaccgattattggtgctgcgacaatgggggtactgtgggtaaaccttgaaccaggctctatggaattaggactgatttggggggcaattggtatactttatatggtgtggatcactcgtcgattccgtcgacctatgcctcaaatgccagagaaataa

SEQ ID NO: 301934 - DNA, 201 bp, Proteus mirabilis
atgatggaaacagatgttacccctatagcagccccaatttgttgtaatgttgccgttaatccggaagcaatccctacaagttcaggcttcactttttctaacactaaattcagcataggagtcataatcatgccttgtgtaaagccaactaacaataagaaaggaataattaatgtagtgttcttaggggtaatcaaataa

SEQ ID NO: 301935 - DNA, 1530 bp, Proteus mirabilis
atgaaagtgaaatccaatacgctggtcaaaattctggtgccgtccgcactggcgttggcggtgctgattggtatcaaaagctgccagcccgacacgccggtcaccggcagcggacaggacaacctgtctcagtcaatcaatgaccttgacccaggggagctgaagtcactcgggattgagggggataccccggccgatacactgaggacgctgattggcactatgaaaacggtacgtgaccgtcaggcggaattgatcgcccagaatgagaaattgctggaagagaatgcgcagctgcgtaaccggcagcagaatgtgtcggggcagatccagtctgcggtggcttccgtccgtcaggaagcggagagtcagcagcgtgccctgcaacaggagcagcagacactgatgcggcgtctggatagcctgggggaaacgctgacagcatcaggtggtcagccggctcagggcagcggacaaggcgatattccgctgggactggggctggataccgggggcagcggactgacggtgaaagacgggttgctgtgggctgagccgcaggatgcacaaccggctgaaccggggcggatggtgaacggacaaccggctgaaccggggcggatggtgaacggacaaccggctaaaccggcgtttccgacctcttttctggaggataacgccattacccgtcagaaagcggaactggaccgggtggccaaaaatcagcgcacgctctccggtacagtggacggtgaggcccataccgaaccggcgtacacgataccggagaatgccaccctggtgggcagccaggcgatgacggcgttgctggggcgggtgcccattgacggtaaagtgatcgatccgtatccgttcaaggtggtggtgggaaaagacaacctcacggcgaacggcattgagttaccggatgtggaaggggcggtgatcagcggctcggccaccggtgactggacattgtcctgtgtgcgcggggatatcacctcgatcacctttgtttttacggacggcacgatccgcacggtgccgaagccggctgaccggacggacggcggcagtcaggccaacagcggacagaatgcccgtaataacggcgggtcgctcggctggatttcagatgagagcgggatcccgtgtatcagcggtgaacgtaaaaccaatgccggcacctatctgccgaccctgtttgccctgacggcagcggcctcggccggggatgcgatgtcgcagagtcagtataccgcgcagaacaacgggtacggtatcacctcctcgctctccggggatgcggggaaagcggcgctgggcagtgccatcggcggcgggtttaaggatgtggcggactgggtgaaatcccgctacgggcagacctttgatgcggtgtatgtgccgccggggcagaaagtcgcggtgcatatcagccgtcagatcccggtggattatgaatcgcagggacgccgggtgaattacggtttttcactgacagagggtgaggaaggaggtctggagtga

SEQ ID NO: 301936 - DNA, 2148 bp, Proteus mirabilis
atgagtgatcgttatgtgatagaggcctggctgcgaccggccgtggaattgaacagtgctctggtgtccggcggggcggcgtttgtgtgtgcggtagcgccctgggcagtggcattgtctccgtccgtgagttatgtcaccgccggtgcgtttgccggtttttccgcattgcgggcacatcagggattccgggtattacgttaccgccggaatctccggcgtctgccccgctatcaggtgacgttggcacaggtgccggtcagccggcagcgtctgtttctgggaaaagggtttcagtggcagcaaaaacacacgcaacgcctgctggaaacccagcgtccggaagtggagcggtatgttcagccgccggcacattaccggctggcccggcagtttgaactccgttttgaatcccgttttccggcggtttgccggcttttgcaaaaagacagttggctgaatccggtccgcccgctgacgccggtgggggggaatccggtgttacacggtgtggagccggatgaggtgaatgtgaccatggatttgcgtgaacgggttggtcatatgctggtactggggaccacccgtgtcggcaaaacccgtctggcggaagtgctgatcactcaggatatccgccgggggaatatcacgattgtttttgatccgaaaggggatgcggatttattgcgccggatgtgggcggaagcgcatcgtgcggggcgcagtgaggagttttatgtttttcacttgggctggcctgatatcagtgcccgttataacgccatcgggcgttttggccgagtatcggaagtcgcggggcgggttgccggccagttatccggggaagggaacagcgcggcgttccgggagtttgcctggcggtttgttaatatcattgcccgggcactggttgctctgggggagcgtccggattatgccaaaattttacgttatgtcaccaatatcggggaactctatcagacatattcgatgcaggtgattaaagcacaactacctgatttgtttgcccaaatcgagaatgcgcagaacgcgctgacggtcgaggatgtgccccgtcatctgcaaagtgatccgaaagctgtggctatctgggcaacggagctggcgttaagtagtgagaaagggaaaaaaatctatgatccgattttggacgggctgcgcagtgcgatccgttatgaccggacctattttgataaaatagtggcttctctgctgccgttactggaaaaactgactaccggaaaaactgccgccctgttgtcgccggattacaccaatatgcaggatccccgtccgatttttgactggcagcaggtgattcggaaaaaagggattgtatatgtcgggctggatgcgttatcggatgcggaagtggcggcagcggtggggaattccatgtttgcggatttggtctcggtagccgggcatatttataaattcgggactcaggatggactgccggaggatgagcacgccggaaaattaccgatcagcctgcattgcgatgaatttaatgaactgatgggggatgaatttattccgttactgaacaagagcggcggcgcggggattgaagtgacggcctacacacagacctggtctgatattgaagcccggctggggaatgcggcgaaatcggcgcaggtcaccggtaactttaatacgctggtgatgttgcgtgtccgtgaactgatgaccgcgaaattactgacggaacagttaccggaagtggatatttacaccaaaaccctggtatccgggatcaccgatatttccaatccgaggcaggggagtgattttacctccaatacccaggacagggtcagtatggtggctaaaccgctgctgttaccggcagatattattcagttaccgaaaggacaggcgtttgcgctgctggaaggcgggaagttatggaaaatcaggatgcccctgccggcggcagaggctgatgccctgatgccaccggatttacaaaaaatcgcacagtatatggagaaaaattaccgtaccggcgaaacttggtggactgcgtcatcattttcggatgcgcggcatgacagcggcggtatgaatgtggctgagatggcaccggataccgaagggggcaacgatggcaactgctga

SEQ ID NO: 301937 - DNA, 306 bp, Proteus mirabilis
atgcaattacctacaattgaagagttgcgccttcagtgtcgtatcgatatcgatgatgaagatcctctattacttgggtatttgactgcagcaaaggaaaaagccagtaattatttaaatcgtaatctgtatgaaactgatattcctgatgaagataaagagggattgattattactcccatcattaaactggcattaatgctcgctgtcggcttttggtatgacacaagagaattaaagaaagtaccacaaggattttatgatttattgagtgattatcgtatttcaccgatgaggattaaataa

SEQ ID NO: 301938 - DNA, 1209 bp, Proteus mirabilis
atggctattgatcataaagacgtcagtgaagttgcgcaggaattaaaaggtcagtttgacgaatttaaaaaatcgaatgataaacgtatcgatgcgattgaagctgaaaaaagtaagttatcagaaacggttgataccttaaatggcaaattatcagagctggatgaattaaaaagcaatttagaagctgaactcgcttcggtaaaacgtccagatggtaacgtgatgaataaagatgtctctgagcataaaaccgcgtttgaattatttgtgcgtaaaggcaccgatgatgggcttgcggaattagagcgtaaagcaatgcaggtcggttcagatcctgacggcggttatgcggtacccgaagaactggatcgtaatatcattacggcattgcgtgatgaagtggttatgcgccaagagtgtaatgtgattacggttggcacagagaagtttaaacgcctgattaatcaaggtggcacaaatagtggatgggtgggtgaagtggacaaacgtcctgaaactaacacatcaaaactcgcgtctattgaaccgttctggggggaaatctacggtaaccctgccgccactcaaaccatgcttgatgatgccttttttaatgttgagcaattcatcaccagtgagttagccacagaatttgctgagcaggaagaagcggtatttacccacggtgacggtattaaaaagcctaaaggtctgttggcatacggcagtgacgataaaggcgacaaagagcgtgaatggggtaagttacagcatttgttattgaaaaaaccgacagaaatcacggcggatgaaatcatgaaattgatttacaccatgcgaaaggtttatcgtacaggtgctaaatttatgatgaataacaatacattattccaagttcgcacactgaaagatgctcaaggtaattatttgtggcaacccggtctgcaattagggcaaccttctgcattattagggtatggcattgcagaaaatgagcaattttctgatgtctctgctgatgctgtgccgattgcttttggtaacttcaaccgctgttacactatccttgatcgtattggggttcgtatgttacgtgacccatacaccaacaaaccgtttgtgcatttttatacaacaaaacgtgttggctctatgttggttgacagtaatgctgtgaagttactgaaagctggagccactaaataa

SEQ ID NO: 301939 - DNA, 651 bp, Proteus mirabilis
atgccaatgacgaccaaacaacggcttgatgtgccattgaaaattaagtctgttagtgactctggcgagtttgaaggctacggctccgttttcggggtaaaagacagttatgccgatattgtgatgccgggggcttttcttaattccctgagtcagtggaaagaaaaaggtgcgttacctgccttactttggcaacaccaaatggctgagcctattggtatttataccgaaatgagagaagacagcaccggactctatgtaaaaggtcgcctgttaattgatgacgaccctttatctaaacgtgcacatgctcatatgaaggccggatcactctccggcctttctattggttacattcttaaagattatgaatatgaccgcagtaaagatgcttttctactgaaagaaatcgacctatgggaagtcagcttagtgacatttccttccaatgatgaagcgcgagtcagtgatgtgaagtcggcatttgctcgtggtgaattacccacacaaaaaagtattgagcgagtcctgcgcgatgttgggctttcgcgaacacaagccaaggcttttatggccaaaggctatgatgcactttctctgcgtgatgttgagcaagaagcattagaaacattgaaatctatttttaaataa

SEQ ID NO: 301940 - DNA, 1230 bp, Proteus mirabilis
atgtttttccctgggttatttcagaaatctcagaaagagatgacctcatcagaactgagtgagttaattggattgtcttatgacacttattctggtcgaagagtgagtacacaactcgctatgcaactgacttctgtatttagttgtattcgtgttcttgcagaatcggtaggaatgttgccatgctcattatatgaacaattagaaagaggaaataaacgcgccaccaaagaacggttacacaaattactggcggttaagcccaataattacatgacacctcaagagctttgggagttattaattgcctgtttgtgtttaaggggaaatttttatgcttataaggtgtacgccttaggcgaagtggttgaattactgcctctcgatcctagttgtgtcacgccaaaattaaatagccaatgggagccagagtatcaggtgacatttccaaatggtaaaagtgaaacactgacacagcaagaaatctggcatgtgcggatttttactcttgatggtctagtgggattaagtccgatcgcctatgcacgtcaagccattggtttaggattagccactgaagagcatggttcgcgtttatttggaaacggtgcggtgacaagtggtgtattacaaacggatcaatatctaaaagatgatgcttacgaaagactgaaatctgacttcggtgaacggcaccaagggttagccaatgcacacaaaccgatgattttagaaatggggttgaagtggcaacaaattagtttatcggctgaagatgcgcaatttcttgaaacacgcaagtttcagttagaggaaatttgccgtatttttcgtgttcctctccatatggtgcaaaacaccgatcgtgccacattcaataacattgaaaacttgggtattggttttattaattactcacttgttccctaccttattcgtatagagcaacgcattaatgcaggactagtaaaagccagtaaacaaggcactttttatgccaaatttaatactggtgctttattacgtggtgacatgaaatcgcgatttgaagcctactcaacaggcattaactgggggatttattcgcccaatgagtgtcgtgaactcgaagagttaaatcctcgtgagggtggtgacatttatctcacaccgatgaacatgaccactaaaccagaaacccaaaaacaagaggagaaagcgcatgccaatgacgaccaaacaacggcttga

SEQ ID NO: 301941 - DNA, 180 bp, Proteus mirabilis
atgaaatttttaacaataacagccttattggttgggattgcgggtgcctttttgttgtcatggggcgcttggttaatctatccaccgatagggtatatttgtgcgggtttattgtgccttttatggtcataccttgtttcaagagcgattggacaacctagaaataacaaggaggaataa

SEQ ID NO: 301942 - DNA, 1740 bp, Proteus mirabilis
atggcaaaggttattgatggcattcgttatgctgagaaagtagtgacagggaaaattgttgcaggtgaattggttaggcttgcttgtcagcggtttctcgatgatttaaaggaaggtgagaaacgaggaataacgtttagtgaacctcgtgctcagcatattttgaatttctataagtttgttcctcacgtcaaaggtgcattggcgggcaaacccatagacctgatggattggcatatttttattctcatcaatatctttgggtttgttcgtccattaattgatgaaagtacgggtgaagtagtccttcgtaacgatggtagcggacgtcctgttatggttcgtcgatatcgaacagcttataacgaggtggcgcgaaaaaatgcaaaatccacattgtcatcgggtattgggctgtatatgaccggtgctgatggtgaaggtggtgccgaagtttactcagcagctacaacgcgtgatcaggctcgtattgtatttgaagatgcgaagaacatgctgaaaaagtccaaagcgacattggggcgtttatttgaatttaataaactcgctatttatcaagaagaaactgcctctaagtttgaaccgctttccagtgatgctaataatcttgatggtttaaacattcactgcggtattgttgatgaattgcatgcgcacaaaactcgtgatgtgtgggacgtattagaaaccgctactggtgcgcgtctgcagtctcttctttttggtatcacgacagcaggttttaataaagaagggatttgttatgaactacgggattatgcgattaaggttctgcgtggtcaggtggatgatgattctttctttggcattatctatacactagataaagacgatgatccctttgatgaaacggtgtggcaaaaggcaaatccgggtctcggtatttgtaaacgttgggatgatttacgtcgtttagcaaagaaagccaaagagcaggtttccgcacgaattaacttcttcacaaaacacatgaatatttgggtcacagccgaatcttcatggatggacatgatgaagtgggatgatgcaccagaactcgcacctcaacatgaattaaaaacctatccattatgggtgggcgttgaccttgctaataagattgatatttgtgccgcggtaaaagtgtggcaacagcctaccaatgggcatgttcatgctgattttaaattctggttacctgaggagagattagaacgctgttctcgccaaatggctgaactttaccgaaaatgggcagatatggggtgtctcgaattaactgatggcgaagtcgtcgatcatgctcaaattaaagaagaaatcatcgcgtgggtggatggtgaaaacttaaaagagctgggctttgatccgtggagtgccactcagtttagtttagcactggcagaagaagggttaccccttgtagaagtcgctcaaacggtgcgtaatttttctgaatccatgaaagagattgaagctctggtttatgcaggtaagtttcatcatagccaacaccctgttatgaactggatgatgtcgaacgtcacggttaaaccagacaaaaacgacaatattttccctaataaatctacacccgaggcaaaaattgacggccctgttgcactatttacgggtatgagtcgattattggtaaatggtggagatcaggaacaaaacctctctgatgtcctcgcttctcgaggcttacgctctctctaa

SEQ ID NO: 301943 - DNA, 171 bp, Proteus mirabilis
atgaatcatactgatattttttctgaaaaagacataataaaaagaatcgaaagtggtaatattttggaggaaaaaggcgatgttagtggtgctttgaatctgtatttagatatttgggataatttaccgaatcctaagcattttttggagatggaatatcattatggttaa

SEQ ID NO: 301944 - DNA, 315 bp, Proteus mirabilis
atgagtgtattaaggtttaactattcaactttgttgaaaagaaacaaaaggttatcttatcgtgagaaaataactaagataactaaagtgttgatgatttttcttaaggaaaataacttgattactttagagccatttaaggatgatggggaggtaaaagatgaactagtgttatacagttctgatctaactgatttgggtaatcttttatttaaagaatactatcctaaatggtctgcatatatagatcgtggtggggatgtaagtaatataaaaatattaaatgatggtttgaataaactgaaaagaaaatag

SEQ ID NO: 301945 - DNA, 2718 bp, Proteus mirabilis
atgacccgggcggatgagcagaagatttactatgcgaatccgtcctttattgattacctgccctgggtggaatttctggatgaggagcaatgcctgctgcttgatgacggggtgtcggtcggggcggtgtatgccgttgagccggcgccgacggaagggcgctctgccggccgtctgctcgaaatccgggatgcggtggaggatgcgcttcaggacagtctggatgagcatgatgataacccgtgggtggtgcagtttttttgtcaggatgaggacgacgtgagcgtcacactggccacattgcgggactatatcctgccggcggcccggggcaccgcgtttaccgaagcctggctgaccgaaatggcgcgtcatttacgggggattgcccgtccggaagggctgtttaaggacacggaggtgaccggacaaccctggcgcggacagcagcgccggacccggatggtggtttaccgccggctggggaacagctataccgatccgatgccgccggtggcgatgctcaatcagatgtgtgaccggctggtcagcagtctgggcagtgccggcgtgcagtgtgtccgccaggacgggaggcaggtgcatcagtggctgctgcgtcatttcaatccggcccctgactgggtggaccgggagacgctgtaccgggaaggggcgtactggccggcggcggaggaagccccgggcaccctgccggtgctgaaggattttgcggaaacgctgtggtttaccccgccccggtcggatgtggaaaacggcgtgtggtggtttgataacctggcgcacggtgtggtgaatatcgaaaaactgcgtaaagccccggggccggggcacctgaccggggagcagaagcgcggtgacaaaaatatcaatgcgctgatggacctgtttccggaagggacgatgctgtcgatgaccatcgtcacacagcctcaggatacgctggagcaggaatttacccggctggggaaaaactcggtgggggaaaacaccgactcgcaacgtacccgccgggacgtggaaaccgccagaggtttactggggcaccgccataagctttaccgggcctccctgtcattgctgctgcgtgccggctcggtggaggaactgaacaaaaagcgcgtggatctgacggccacgctgctgaatgccggtctggagccggtgaagccggaatatgatgtggcgccgctgaacgggtatctgcgtgccctgccgatgtgttttgacccgcagacggataaaaaacactggtatacccggctgacctgggtacagcacctggccggattactgccggtgaccgggcgcaccagcggcaccgggcatcccggctggagtttctttaaccggggcggcggggtgctgacctttgatccgcagaataaacaggatcgtacccagaatgcgcatctgctgttattcggtcccaccggggccggtaaatccgccaccttatgcgcacagttatcgcagctgatggcggtccgccgtccgcgtctgtttattgcggaggccggtaactcctttggtttactggcggactattacgccagtctggggctgagtgtcaataaggtcagtgtcaagcccggcagcggggtgcgtctgccgctgtttgcggatgcgcatcagctgctgatgatggatgaacagcgtctggcactgaatgcggatgaactgccagagacggacagtgaatctgaggatgatgacgggcagcgtgacattctgggggaaatggaaatctccgcccgcatgatgatcaccggcggggatgtgcgggaagaagcggagctgaagcgggctgaccgggcgatgatccgccgggcgctgatggcgggggcccgggcgtcttatgccgccgaccggcagatgctgccggcggatttgcaggaggcgctgtatgccctctcccggggggaaggtgaagaggaagggcgggcattaaatccgcagcgccgggcgaaagcggccgaaatggcggaatccctggggatgtttaccgaaccgggcagttttgagcatgagctgtttaatctgccgggggagctgtggccggaggcggatgtgaccctgattgatttggggcacctggcgcgggaagggtatgaggcccagatggcgctgacgatggtgagtcttatcaactccatcaacaatattgccgagcgggatcagtaccgggcccgggacattaattttgtggtggatgaggcgcatatcgtgacggtcaacccgctgttatccccctatgtgaccaaagtggtgaaaatgtggcggaaactgggggcctggctgtggctggcgacccagaacctcgatgactatccggactgtgccgagaaaatgctcaatatggcggagtggtgggtgtgtctgacgatgccgcagaaagaggtggaggcaatcgcccgctttaagacgctcagtgaggagcagaaacaggtgctgctgtccgcagccaaactctccggctgttacacggaaggggtggtgctggcgcggaaagtggaggcgctgttccgggtggtacagccgagcttatatctggcgctggggatgacggaaaaagaggagaagcagcaacggcgggtgctgatggagcaatacggatgcagtgagctggaagcggcgttcagggtggcagatgaacttgaccggaaacgggggttaccgccccgggtgccgggatga

SEQ ID NO: 301946 - DNA, 840 bp, Proteus mirabilis; identical to SEQ ID NO: 299235

SEQ ID NO: 301947 - DNA, 897 bp, Proteus mirabilis
gtgtctctttttaatcaaaaagcaatgattgtttataacctaaacaaatcggttgatgcagaggagttaaatagctgcatccaaaatttaaaatgggttgaatgtaagccgactgatatgtctactgttggctttgtttcacctgcattcaatgatgatttaatctttgagtgtaaaggacatttgttattagcaatcaggaaagaagaaaaaatcctaccttctaatgtcatcaaaaaagaaactcaacataaagtagagaaacttgaaggggagcaaggaagaaagctaaagaaaacggaaaaagctacaattaaagatgaagtcatttactctttgttaccacgagcatttagcaaatactcaactgtttatatttggataaacactatcgatcatcaaatagttgtattcacaggaactagtaaaaatgcagagagtagccttgctttattacgtaaagccattggttcactacctgtaactccattgaaatttgattcaatcgaaatgttattaactaattgggtaaaagacaattccatccccactcaattacaattaaacggtgaagctgaattaattgctattttagaagaaggaggaattgctaaatttaaaaagcaagatttaatttcagatgaaattctgactcatattgaagcaggtaagttagttacaaatttatatttaaagtttcaagatagaattgatttcaccattaataatgattttatttttaaaaaaataaaattctcagagaaaataattggaaccaacgaagatattgatagaaaagatgtatcactgagatttcaaagtgacttctatttagtggcagaagaactatctaagttaattaagtatttatcagatttatttaaaaaaacatactaa

SEQ ID NO: 301948 - DNA, 579 bp, Proteus mirabilis
atgaaaaatgccattgaaatcaaagcattattaagagattggatttctactagcggttatttcgatttccatgacaatgatgtattaatcgatgaattgtgtttttatgaaaaaaagaatcgtgctgatgttgtttacgctaatggtaaattgacgggatttgaaataaaatcagaatctgactcattagctaggtggggtaagcagcatgacgcttacttgagactatttgatgcggtttggttatgctgccatcataaacatgcgttaaaagcgatagaacagtcggaaagaaatgtaggtattttgatattagataattatagtcagaatgtaacaatactcagagaagctaaagataataaaaagattgataagtttgaggttatctccttattgtggaggagtgagttggatgagctttgtgtagaaaacaacataaaaattaataggaaagaacgaataaatgaagctagacgtcgcgttctgtctgagcttcattttgatataattaaatgcaaggttttatcatgtattaaaaatagatataaagggaaggattattcatcatcgtcataa

SEQ ID NO: 301949 - DNA, 1098 bp, Proteus mirabilis
atgaataaaatatatgccccatgtataaagaatggattgaatgacctaaaggctttatctgaactatatcctgaaagtaagaatagtattattccaataatactaactactggaacggttttttcaccaaaaacaggtgaggtaaaaagagatcagttaattgatggttttattactaattgggatggaggtgagtttattgttgatgcgtcaaggatagaaactgattcagtatcagaatataatgaatattatggattgactgaccaaacggatagttttagcaggaaaatagatttttataaaaagatatatgaaattaataaaaacattatccctgctgtaagctggaataagaatgatgaccttaaaaatatcatacagttactgataaatctaaaatcatcttataaaactgttgctattattttagatccaaaaatagaaagtaatttaaatatccttgatattttactatgcctatttcctgaaaatggaagtattattgtcgtacttaactatggttcaatatacaaccaaccactaccaaacaaagaaattatcgataacgtactagatactataaataaaagaggtgtgaaacgagttatattactaagttcatcgttcccacactcaaagccaacagaaaaagatatatggataacatcttcatgtacagatctggtgtggcaattaatgactatcaatcaaaataaaacatctatcaatttaatttatggcgatttttcagctagttctccacaagcacccagtgaattcattttaggcatgaaaataatccctagcgctacatattttaatgacggaatttggtatcaaataaaatcgggcggagataaagaatattctgtctataaagatatagctaaaaatatagtatctagtcctttttttgatgatttctgctggggaacaaaaaatatcgctaaaatatcagtatctaccgacggctatgggcacagcgggacttggaatggatacaaaacaaacatacatattgaagaaatactaagaatattaactcgtagtacggagagtgagcctccccgtaatgattatgacgatgatgaataa

SEQ ID NO: 301950 - DNA, 993 bp, Proteus mirabilis
atggatctaaaaaagagatgttttagacaaattgctcctgcgcttattttttctttactaacaattggtactttctcggcaaatgcgaatatcgatgttcgcgatgaaaccttatttgaagcacatcagcgttttaaaacacaaattataaatgatagttttgacaatactgaagcaccttgggaagcgccagcagaaatattcaatgtagttaaatatcccaccaaactaggtgatatgtatgcttatttaactcctccgccggcgaataaaaaaaataaactacctgcggtgatttggctgaatggaggatatggtgggataggaggagatgattatttttggacaccacaaccagttgaaaatgaccaaacaggagcgacgtttcgtgatcctaatatggtactcatgataccttcttttcgtggtgaaaataccaaccctggtcgctatgaaatgttttatggtgaattagaagatttagactcagctagagaatatttagcgtcattaccttatgttgatcctaagcgtatttacgtggtaggacatagcactgggggaacgagagcattattggctagtgaatacagtgataaattcagggcaatattctctttaggaggaatacctgatcttaaactacgcacagaagggcggatgatggttgaattaccctttgataaaaataacgaagaagaatttaatgtccgttctgtataccgttatattaaatcaataaaaacaccaacattttattttgaaggtcatgattatttttgggatgaattcaatcaattgcgtgtggttgcaatagaacacgatattcctctgaaaatttataatataaaaaatggagaccattttaatattattgtccctgttagccaattaattaaagacaaaatattgcaagatactgatacaaataaagaaagcaatattcgattcactaacgaagaaattaagtggatcaataaaatagtgaaataa

SEQ ID NO: 301951 - DNA, 483 bp, Proteus mirabilis
atgtctaagggttcatattcttctaaaatcacattattgatatccgtatctgtccttatatcacctataatattatttatttatcttagtacactaagtgctcaaaatttcttttcttttttattacaagagagctacttattcccttacctgatatttatttctatcgcttggtttatttttacatttatattttatagccttccatttttaacatttaaatttattaatctatctattaaaataaccaatgataataatataaaacaaaactttggattatctacctggagttatttgttatcaatatgtataagtccaattataatattttctatgatttatttaactacggactatcccaaatatgtgaaactcatggcattcataatatttatgattatgatactgctaatattacgatacaagaataatgttaaaataataagaataaaattaattttttataagattattctatga

SEQ ID NO: 301952 - DNA, 210 bp, Proteus mirabilis
atgagtagattagcgcatttagtacctaaaaagcaattccggtgtttacctgtctcaggtcgtcagtcatttcgctatgtagaaatcatagtctctgacaaacaaccagacaactacaagaaacctgcatgtttggtagataggcaggctcttaaaaaggcgtggactgatttttatttttcaagtggagggcggggcaatgagcaatga

SEQ ID NO: 301953 - DNA, 375 bp, Proteus mirabilis
atgagccaagaagatcgtaagacaaatgtccctgactttctttctgaattggacgctggcgtttttgaaaataaagtctctgctgttttaaatgatgtggctttaggcgttttaaataatggtggaaaaggcaaagtcactattgaattagattttgctcgccttagtaattcaatggaagaaaaacgagttgaaataactcataagcttaaattctctgcaccaacacctagaggaaaacggactgaggaagataccaccaaaacacctatgtacgtgggtaaaggcggcaagttgaccattatgcaagaagatcaaggtcaattattttctttacaaggtcagcccgatggtaaattaaaagccattaattag

SEQ ID NO: 301954 - DNA, 828 bp, Proteus mirabilis
atgtctcaattagacggtaatgctatttcgcaaattcaagatatgaccgcggcttcattaagcctcgaagcaatagaaaaatctctttgtccagcgattgtgcttccgaatgactttaaagtaagtagtttagaaaatttacaagaaggtcgtttccgttttcgcggggaaatgaaaacaaccagtataagcgactttgttaaatactcaatcaagaatgcaattgatgaaggtgttagctgctttattgatgccgatgaaatgagtgccgaaactatttttaatctcggcacaataggtaaagcaggtcatgctgataacactgctattgtgaaattaaaacaaaccgccccattcacagcattattaaaaatggatggtgttaaatatcgtcaaaaacaattagccgagtggttagaagattggcacgattatttaatggcatttgatgctgacggtaatgttttagatatcaaacaagctatttctgctgttcgtcgtattacgattgaatcaacacgctctgctgaacatgaagatgctgattttagtgctaaacgctcagtgttagaaaatgttgaagcaagaagcaaagacattatgcctgctacattccagtttacttgtactccttatgacgaattaaaagaacgtagcattaaattacgttatagcgtactcactggtgatgatattcccgttttagttcttcgaatcattcaacttgaaaaacttgaagaacaaatcgctcaagagtttcgagatatgctttgcaatgaattcgatgaaagcaaaatcgaaacattcattggtaaattttcagcgtaa

SEQ ID NO: 301955 - DNA, 195 bp, Proteus mirabilis
atgactattacattaacaacgaagcaaataatggctatggctgattttgtcggcttaaaagtagaacctcacggattagatattaatgatgagactgaatacaccatcgagccacgtagagataaagaaaccggtcgtgtgcatgtattttactgtactgaatatccagaagaaggcgccattcagctggactaa

SEQ ID NO: 301956 - DNA, 606 bp, Proteus mirabilis
atgaaagagcgcggaattatttttaactcagaaatggtacgcgccatccttgatggccgtaaaactcaaactcgtagaatcatgaaaccccaaccaaaaacaaatgaaaatggtgatatatggtggcctagtaatatatgtcagtccatgatcaatattaaagaaatgatgcaggacaacgagggtgtatgggctggaattgctggtatatcctgcccgcacggtggtgttggcgatcacctttgggttcgtgaaacatttaaagcaggggtatgcactgaatcaacaattgcatataaagctacacataaaccatctgatttagaagaaagatggtatgaagaaattaagtggactccatctatacacatgcctcgctgggcttcacgcattacgttagaaattgttgatgttcgtgttgagcgtttaaaagatgctggagatactgagtttaaagctgaaggctaccctttagatcgtgaattaactggcggtagtatggatccgttttgctggtttcgtaacctttgggattcagtgtcacctactaactttaaatatgcagataatccgtgggtgtgggtgattgagtttaaaaggatttaa

SEQ ID NO: 301957 - DNA, 396 bp, Proteus mirabilis
atggaaataaaaggtcaattaattagtagtcagcgttatttaaatgagtatgttgttttagataaagttaaaagatttaaagtgtttattgtcgatatattgcatgtaactttaagaggtaagcaatatacattattagtaaatgggcaccataatttcgcagctgcaaaaaggttagggataaaaccacaatacagaacacctaaaaaattattaaaagcatttaactcctggtctcaaagtgaaagagaaacttttattataaataacctaactgatagccatttatatgatgtaaatacaggtgaggttgtgcaggagttaatggaaccagattttaataatatgtcatttcaacgaaatctaacaaacggattaaaattgtatcagcaataa

SEQ ID NO: 301958 - DNA, 252 bp, Proteus mirabilis
atgtcaagaatggtaagtcttgaggcgtgggctatgttggaatttggtgaagaatcccccagcataacggtattacaaaaatacgcaagaaataatcttatcgcacctccagcaatgaaagttggtagaaagtggatggtcgatagagaagctcgttatgtgggttatttatctttaccaaaaattccgactaaatcaacggagcgacttcagaggataatttcagatggctgccagaccgcgaacccataa

SEQ ID NO: 301959 - DNA, 1134 bp, Proteus mirabilis
atggctgccagaccgcgaacccataaaataaccattcctaacttataccgtaaattagataagcgtaatggaaaaatttattggcaatataaacaccctataacgggaaaatttcatagtttaggcaccgacgagcaagaagcgagagaaacggctattcaagccaatacaattattgctgaacaacatactcgacagttattaagtattaatgaacggttatcaaaaattaagacaaacaagtctgaaatatctgttgatatatgggtggataaatatttggatattcaaaaagaaagattagatatcggtgaattaaaaattaattcttatcgacagaaaatgaaacctattaatttatttcgtcagtattgtggtacgaaaatattgaaagagataactgctttagatattgccgaaataatagattcagtcaaagcattaggacattcaagaatggctcaggtcgttcgcatggtgctcattgatgtatttaaagaagctcaacatgctggctacgttcctcctggttacaatccagctaaagcaacaaaacagcctagaaatagggttaaaagagagcgtatgacgcttgatgagtggaatactatttatctacaagctgaaaagcatcccccttacctgcaatgtggaatgttgcttgcgttaattactggtcaaagaataggtgatatttgtaatatgaaatttacggatatttgggatgacatgttgcatgtgcagcaggaaaaaacaggcagtaaattagctatcccattatcattaaaatgcgatgcccttaatatgtccttaagggatgtcattgcaaggtgtcgtgatgccgttgtgagtaaatatcttgtacattatcggcatacaacatcccaagcaaaacgaggcgaacaagtcacgccaaatacattaaccacaacgtttaaaaaagcgcgagataagtgtgggttaacttgggagaaaggtactgcaccaacctttcacgaacaacgctctttgtctgagagactttatcgcaaacaaggaataaatacacaaaaattattaggccataaaacccaaaaaatgactgataaatatcacgacgatagaggcaaagaatggcaaattattgctgtttaa

SEQ ID NO: 301960 - DNA, 165 bp, Proteus mirabilis
atgctacgccatatgggttggacagaagccgctgacttaatcattaaaggtatggaaggcgcaatcgaagcgaagaccgttacttatgatttcgaacgtctaatggacggcgctaaactgctgaaatgtagcgagtttggtgacgcgattatcaaacatatgtaa

SEQ ID NO: 301961 - DNA, 321 bp, Proteus mirabilis; identical to SEQ ID NO: 300106

SEQ ID NO: 301962 - DNA, 1215 bp, Proteus mirabilis
atgtctgatacaaatgaattattaaaaaatctatcggcaaaaattgaagaagccaatggcaaatttaatgctaaagccgaagaagccttaaaagaagcgcaaaaagtcggtagtttaagcaccgaaactaaagcagcggtagataagatggcaaccgaactgaatgcattgcgtgaatctgaaaaaacactcaaagcttcattaggtgaattagagcaacatgtagcacaaatgccactgaataatgcggttcaagcagccaaaacaattggtcaacaggtcatttctgcagatgcgctgaaagaaattaactctagcattcaatcaagtaagcgcatttctattccagtgcaagccgcattaacttcaactggtgtggctgaaggtgttgttgaacctcagcgcttacctggtattgatgttgcgccaaaacagcgtttatttatccgtgatctgattgcgccaggcaaaacaacttcaccggctattttttgggttcagcaaactggctttacgaataaagcctctgtggtaccagaaaataccgctaagccttacagtgatattgaatttgcaaccaaaatcacaccagtaaccactattgctcatatgttcaaggcatctaaacaaatcctagatgattttgcacaactgcagtctttagtcgatgctgaaatgcgttatggcttgaagtttgttgaagagcaagaaatcttgtttggtgacggatctggtgctcacttacatggcatcattcctcaagcctctaaatataaacctgaatttagcgtcgaaaagcaaagtggcattgatgatttacgccttgcgatgctacaagcgcaattagctcgactgcctgccacagggcatgttttgcattttatcgattgggcgaaaattgaattaaccaaagactcattaggacgttacattcttgctaacccctccgcattagttggcccaacattatggggattacctgttgttgctacggaatcagcagcgtttaaaggcaagttcttaacaggcgcatttaacgcaggtgcacagttattcgatcgtgaagaaaccaatgtagtgatttctacggaaaacactgacgattttgagaaaaacatgatctcaattcgttgcgaggagcgtttggcgttagccgtaaaacgtccggaagcctttgtttacggtgatttcaccgtgcctacatcaggggaataa

SEQ ID NO: 301963 - DNA, 852 bp, Proteus mirabilis
atgaaaaaaagtcatttgccagttgcgctggaggatcgcccctgcgcatcgattagctacgagcttaaacctagagcgctggataaatggaatagcagtattcgtgcatcaagtacagataataccatctcaatattagatgtgattggtgaagattattggggagagggggttactgcaaaacgtatttctgccgcacttcgcgccattggaaataatgatgtggttgtcaatatcaatagtccaggtggcgatatgtttgaagggttagccatttataacttacttcgttctcacagtggaaaagtgaccgtcaatattttaggtattgccgcttccgctgcatctattattgcaatggctggtgatgaagttcaaatgggccgaggtgcctttttgatgatccataactgctgggctgtcggtgtaggtaatcggcatgattttgcaaaattagctaatgatctcgccccttttgatacgtcgatggcagatatctatgtggcacgtagtggacaatctaatgaggttgtaagtcagatgatggacgacgaaacctatattggtgcgagtgaagcgatcgagaaaggctttgctgataatttgcttactgcagatattgttgatgatggtgatgaaagcccgcaagctgccattcgtaaattagatgcgttacttgctaaggcgaacacttctcgctctgagcgtagaaaacttattagtgctttaacacgaagtatgccgagcgctacttccaatcctcacggtacgccaagcgctacctctgaaattaatcctgaaactctttctgaattggaaaaggcggtaaatgccttcgccacagctaactaa

SEQ ID NO: 301964 - DNA, 1332 bp, Proteus mirabilis
atgcaacacaataaaaaaccagggcgcattaaaagcgcgcttcttaattggttgggcgtacccatttcgctgaccagtggagatttttggcaagaatggagtggcacaagcagtagtggaaaagttgtaacagcagataaagcaatgcaactttctgcagtttgggcatgtgtaagattgctgagtgaatcaatatcgacattaccgatcaagatttataaaagtgaaagtgatggctcaagaagcttagcgaaagatcaccctatttatagattgctgtgcaagcaacccaattttgagatgacgccttctcgtttcatgttgatggttgttgctagcctttgtttacgtggtaatagtttcattgagaaaaaatatattggttcaaagttagttgcgttagagcctttgttgccacaaaacatgatggttaaacgcagtgatcaaacgggtatgctcgaatataaatacactgatccgttagggcaaaaaacacgaacgatccctactaataaaattatgcacattcgtgggtttggtatggatggcatttgcgggatgatccctgtaaaaatagggcgtgatgttattggtgctgcattatccgttgaagagtcagccgctaagatatttgaaaatggattgcaaagttcgggctttttatcttcagagtttccgcttgatgatgaacaaagaaagcgcattagaagttacctattaagctttgtaggttcaaaaaatgcgggaaaaatgatggtgttggaagggggaatgaaatacaacaatgtcaccatgaatcctgaagcagctcaaatgctagaaagtagaaccttcagcattgaagaaatttgtcgatggtttcgtgttccaccgtttatggtgggtcatatggataaacaaagtagttgggcatcgagcgtcgaaggtatgaatatgcagtttcttactaatacgctaagacctcttttagtcaatatagaacaagaaattagccgatgcttattgaatggtgacgacgattattatgctgaattctctgttgaaggtttattacgggctgacagtgcagggcgttccgcttactacacaacggcattacaaaatggttggatgagtcgaaatgatgtgagacggctagaaaatttaccgccgattgaggggggtgatatttataccgttcaacttaatttaacaccgcttgatcagctcgggcaagaagcctctagtaatgaagctgaaaaacttaaagcgcagatcaccaactggttgtttcctgaaggtaatcccataaccccacattctcaaaacaatcaacctcactctgaggagtaa

SEQ ID NO: 301965 - DNA, 1800 bp, Proteus mirabilis
ttggcaaaaacgcaagataaactggctgtagcgaataatttacttaatgatgatagcctaaaacagtctgtggctaagttacaaaatgaattagcacagtctaaaaaagagcaggataccttgcttgcacaattagctgaaaaagatcagttgctgtttgatgcgacagaaaaaaataaagtattaactaaacagcaagaagattttgatattcaggcacaaaaattaaatcaattgactacctatgttgctcaacttgagcaacaaaaacagcagctacaatcacaatatgggcaggctcaacggttattaacaaataacagtgctaaaaaagagattgaggtactacaaaattctttaactaatttatcagcagtgcgccaatctttagaaaatcaattagctaaaaacaaagcctcttttgaagctactctagctaagaataatcagttaattgatacccaacgccaacagatagctcaacttaacgatcacataaaaaaaataaaccaagagcaacaacagttaaatcattcgttagtgactcttcaacaacaaaaagcacaagcagatgataaattaacacagatcccagcgttgaagcttgagttacaaaataaggttaatgaattagctgagctgaaaaaaagtttatctacgggcgagaaagcttttgatgctttgatttcagaaaaaaatggtgcaatcgctaaattagagaaagctcaggcagatctcgccaataagtatcaagcattggatacccaatttaaagagaacaataccatcattgggcaacttaaagagagcaaaatagcgaacgataacgcttatgctcaattagagaaacaactagcagaaaaacaatcgcttactgataaattaacgacacaattaacacaagctaaagatcagttagcaaaacaaaattctgaaagtaaccaactaattgcttcattaaaacagcagcaagtagaatcgacggctcaatttaagcaacaagaaagtgttttagcaaattctcaaaaagagtttaatgaagtctctaagcagcttgaagctcagcgtgcgctaacgaaaacacttgaagaaaaagaattaaaattaagtgagcaactaaaagaaaaagagagtgaaattaaaaaaataaatagcgaaaatgcgaatgctcaaaaagagtttaatgaagtctctaagcagcttgaagctcagcgtacgctaacgaaaacacttgaagaaaaagaattaaaattaagtgagcaattaaaagaaaaagagagtgaaattaaaaaaataaatagcgaaagtgcgagtgttcaaaaagagaataaaacattaaaacagcaattggataaagctatgggagaagggcagattatcgcaagtcagcttgcatatgcctattcaattatcggtaaagataatgcccaacgaaataaatcaattctgtcggaaatacaaaaacagaactatgtgcaatacgatgataacacttactttaaaatcctaaaacaagggaaacctgtggattcaattgcaggtaaaacagttgttttcgctatgcatgaacaattaaccgatggtacagtaacacttaattatgacaaagctaagccgttaattttaccataccgccaacttccactgcctcttaatacttttgttgctaaagcaggcttaaatggcaaagctaaaatttatattaaacctgatggagggtatgggaaagatggtatcccagggcaagtacctccagaatcgatgtctatagtgacaattgaaattttagctatcaaatag

SEQ ID NO: 301966 - DNA, 180 bp, Proteus mirabilis; identical to SEQ ID NO: 301918

SEQ ID NO: 301967 - DNA, 264 bp, Proteus mirabilis; identical to SEQ ID NO: 301917

SEQ ID NO: 301968 - DNA, 159 bp, Proteus mirabilis; identical to SEQ ID NO: 301914

SEQ ID NO: 301969 - DNA, 126 bp, Proteus mirabilis
atgaatattctacttattaacggtggacaaaaatttgggcattctgcaggacaattaaaccgtacattacatgatatcgctctggcacatttggcgacattagggcatcaggtaaaagaaacataa

SEQ ID NO: 301970 - DNA, 363 bp, Proteus mirabilis
atgccatggaaagtgaaaaagtatatggatgaagtctatacttatggtcacggcaaactatatgaaaatgatggacgtactcgtcatgatccaagcaaacaatatggtagcgggggattgttgcaaggtaagcaatatatgatctccgtgacttggaatgcccctattgaagctttcaatgaatttggtaatttctttgatgggcgaggggttgatggtgtctattttgcttttcataaatcacaacaatttcttggtttatctcagctgcctacttttatgaccaacaacgtcattaaagagcctaatattgagaaagatattgtagaatataaagtacatctaaccaaagtctttggctaa

SEQ ID NO: 301971 - DNA, 579 bp, Proteus mirabilis
atgcgctatatcattatctttttgagcctcattttatatggatttaatcttatggcttattcagaacaaacgctggtatttatccgtcatggtgaaaagcctgataatgatagcgggcaattaagttgtcagggattaaatcgtgcgttagcgttacctaatcgattgataacacaatttggtcagcctgatgcgttatttgctgcagcaccaaaacaaagtaaacttggaaattcattacgctctcttcaaactttaacacctcttgcggtgaaaacatcactgccaatccatttaaattaccatgccaaagagatagacccattacgtaataaactgctgagcgaagaatatcagaattcagtcatttttattgcttgggagcatgataatttagttaaagtagtaagggatattatggcgcaatttggtggtgatccaaaagctattcctaaatgggaaagtggtgattttgatagtatctatatattaaaaataatcaaagaagcagataagaaaaaagtgctctttgagcaacagcatcaacagctaaatgatgtgcctaaacagtgtccttag

SEQ ID NO: 301972 - DNA, 1938 bp, Proteus mirabilis
atgccaaacatttcccctagaactgatgaagtcattgcttatttagatagttttgaaaatattatttgtagtgggaatagtgacgatatattgatgggaagtgataaagataattatattgatgcagcttcaggtaaagattatgtcctaggattaaaaggaaatgatacgatcaagctatctgaaggtttcgctaatggcggtgaggggcatgatacttatattatttcacgtctaaatactttttataaagggaaagcagaagtatctattattatcgatgaagtaactggagatgaaaaactagaaaataatcaaaatgcatctgagcaaaatattgttaaactagaacataacttaaaagatataaaatcaataaaacgtattggttcagatattgtttttttattagataatggctttattatcaatgaagataagacacaaacgccacttcctgcaacatcgatacgtttaaaaaacatatttaaaaatgagaacagttttgatgtactaactaattattgcattattacaaatgatgggtttattttaaataataatagcgatgctaattgtaatagtgatccgttatttaactttagctatatggagaattattcaaatcttgatgataaatatgaatatatatacataaatagcaataatcgagagtttaatctccgttcacgctccggttctgttaaatataatatattgcctgaattaaaatacagcggacttgctaacggtaactcgatagagttatctattgaaggagatagtggcaataatacttatttagccattgatcataatgcgcgaataacattaaccgcaggtgttgatgtttatcagctaaaaacgtttatagctcaaaacagcaatgagcgtattgagatatttcctagtaaaacagttgatgatgaaagtgttgataatctatctacctttattttaccggatgttagtgggtatgatcttaagtttgaaaacggtgttatctctcatcgctataatccagctgctcatcgctttatagatataaatatgactgaaaaaagtttaaataaaattttaaattcaggtgttcaaatcagatttattgataaagacaataagatgtttattttgccaaatagtgatagtggcgaacagttgttaatacctgttgttaaagaaaaattatttatcagttattttgatgatcacgttattattcctaaatcccttatcttaaataagataatgatggaaaatagtaatatttatttatctccgccattacaacaacacgcatttttatctaatttgcttaaacataattcaattcaaaatattgaattattacctgttatcgatttgctaacaggtgatgatatgttgataaataaaaatcaaggttgctctgtaattgccggaggtaaaggaaacgatactctaattgttgagggcggacagcatattttatttgccaatgaaggggatgataagctctatggtggtaaagggaatgatgttcttatttcagagagtggtaatgattatctggaaggtggagagggggatgatatctacctaattaacaaacatcatggtgagatcacgattaacgatcatgtagggaaaaatgttatttttattactggcttgggtaaagatgaagtgatgttatcttcccgtgataatgatgatgaagttcttctttctcaggataaaaattttattgtgagaataaagaataaatataaagaggagctgcagagcacttatcagattgaacaaagggaggaggtgctgagtgatgaagcattagtctctattgtgcatgaaatggctcagtttaatcaaactcagttgtcttctatgcaaggaacctttttgcctgaagctaaagaatggactttaatgccaatcatcactaagcatttaggttaa

SEQ ID NO: 301973 - DNA, 1233 bp, Proteus mirabilis
atgtcttataaatataaacgtaaaatttttcttggaaaaaatgtattagaagctgctcaagaacggattaagtggatatttgatacttttgaacaaatttcactctctttttctggaggaaaagattctaccgttctttttcatcttattgctacagaagcacgaaagcgacataaaaagtttaatgtaatgtttcttgattgggaagttcaatattcagcaaccatagagcacattacaaaaatgaaatctatctaccaagattgtacggaacagttttactggatagcactacctatcaccactgaaagtggtgtttctcaatatgaacctacatggacagcgtgggagcctggtaaaaaatgggtaaggcacccccctgaagatgcaataactgatcctcattttttccctttttatcatcctaatatgctttttgaagattttacgccagcttttaatcagtggattacgggggaacatcatagctcagttattttattaggtataagagcggatgaatcattaaaccgctttattgccattagtaataaccgaaagttacgttatgccgatgatattccttggacaacagcatctccagaaggtttttactatatggcctaccctatttatgattggcatgttaaagatatttggacttatattgcgcgtttcaatttaccctataaccctatttatgatctgatgcaccaagcgggcgttagtttaagtcaaatgcgtatttgcgaaccttttgggccagagcaacgcaagggactatggttataccatgttttagaacctgagacgtggagtcttgcttgtgaacgagtgagtggagctgatgccggaatgttatatacgaatcctcgtaataaatcaggtttctatgggcgacatcaaattagcaaaccatcccatcatacgtggaaatcttatgctcactttttattagccagtttaccagagaaaacagcagaacattatcgtaataaaatagcggtctatcttcgctggtatgccgaacgagattacccaaatggcatacctgatgcacaagaaggtgatactagtagtaaacaaatcccttcttggcgacgaatttgtaagaccatcttgcgtaacgatttttggtgtagaacattagcatttagtccaacaaaatcacattgttatgatcgatattttaaacgaatacaagaaaaacgaaaaaactggcaacttatttag

SEQ ID NO: 301974 - DNA, 381 bp, Proteus mirabilis
atgcccgcgtctgcgaccgataaggaacttgagaacttaggaattcagattgcagccggcgtggcagcccaagttatcgtccagattggcggtaaggctgttaaaatgatcctgcgcaaactgaccggcgttccagccccagcagtagttgacggaaacgacccgaccccgcctgaaagcgctggcgatgtgatcggcaccgtttccgacccagaccccgaaggcttattgccagaaggtggtgatgacggcggctacccggaaaacagcggcgaagatggtggcgacggcgaagatggtggcgacggcgacggtggtgatgacggcggctttgaccccgatatccccgatatccccgatgtcttcgaaaagaaagactaa

SEQ ID NO: 301975 - DNA, 1545 bp, Proteus mirabilis
gtgtcagggtctgctattgtctctggcacaggtaccaaatggacagttaataatcccgctattcgctcaggcaccattattttaattaaaaatggtaacgctaattttatttacatggtagatagagttaatagtgatacagaattagttatctcacagccggctacatttaccgtaaaaaacaccagttacagtattaatctcactgagccgaactcatacagcgacgctaataatcgtatgaccgctattgcatcagatacgacgtattttctgcgagcaatggaccaatggatgatgaataacggtgtggtgacagtagagctatctaatgggcaaaaagtaacgttagatagtattaagaagatgcagggggatattgccaataagttggatattaaaacaggaggtaatgtcaccgctagagtatctgcaaatccaatatcagtgactagagatggtaatgactatttaaatatttatccacccaaagtaggggatggtaaggacttaggattctttcagtataatttagataagacatggaatggcgttttacttataccgagggttccagttggaaaaacaagagaattggctgtaaaagagggaaataacatattagtttatggctcacagcactgggcaggcttaaggctatataaagctagcggtgagtatgcgatgttggaaactaattcatcggataatgagattttatctttagcttatagagattctaaaggctctaatgttagtgttcttaggtttcctaggcaagacggtcaggtaatggttcaaggggattatggatttgctggaaatgggagaagtgaaggtttagatgaaagtaaattaacatctaaagtttttgattccaatcattctcaaatatttagatcttcttcagacccaggaaaatttggaacaatttattcccctatcctatttttaactacaggcgatacatgggcgacaatatccactagctacttaacaggaaacgtcactgttgcgtctagtaatcgaaacagatcaaaccctataaaatttaacaatttgtggggcacatctaacactacaactgacagtaatggttttattaaacgagcttctcctgtaattaacatcaatcccgacggtacattcaccactaacgacgaatcagaaggtgctacagttactcgagtagctcagggtgaatatcttatcgaaggtgtactcggctttaactcagatgcaggttggggcggtgtcgatgggggtattgaaattccactcgatgttaataaacagccgttgatatgggtagactctaaagttatggaggacggttctatcctcgtgagaacgtatcatcgaactcaccctaacgcacctaaattcgcccgtaatgatattgatggttacaaagacggcgacccaatagatatccctgatggtcgttttatttccgtgcgtgtacagatgccagagcaatccatctataatgtgagaatgcgtgagatggaagaagcacagaaagcggaagaaaggccccaataa

SEQ ID NO: 301976 - DNA, 483 bp, Proteus mirabilis
atggcttttaaatataaaataacaataatcatatttttgctatcttttattttttttatagtgtatgagttttttattcccgttaaagttatgggagtacataaagatacgtataccacctctattctggttgaggattttccgataactgattatggaaaaataatatggtggaaaaacaatcaagatgttttagataaaaagtataatttatttaaagctaaagatagctccttctatatttatatatggaattacggtgatggatatttagaagaaggaaaatacgatcgattatgttttactgaaattaaaagtaacaaaaaatgtatagaaaaagataaagtgatgtcaataatgtattctttaaatgaagaggaaattaggatcggtaattctgcatatattaaagataaaaatggttcttttataaagaaagacaaggatgctaatacaactatcacagtagtccctaatgcataa

SEQ ID NO: 301977 - DNA, 261 bp, Proteus mirabilis
atggctgttaaaaatggacagctttttgttaaagaagcgtttttagataaggcttctattcgtgaaatggttctttcagagtcaatcagatcagataattatgtgcctggtaaatctggatttattattgacgttaaaaataacaaactggaaatgtatggtggtaatggcggaacaacattaaccaatcaaaatttatatgtaaaagatgaaactgggtataacgttgttattattggtgatatcacaaatgagcgataa

SEQ ID NO: 301978 - DNA, 876 bp, Proteus mirabilis
atgattcttttaaatattaatcaaacagactatttgacaccaataaaagacataccatactacactgatttcatttcaaaatattcctatataacaacagcttgcaatgtattgcaaggtatgatcatccctgtgcataaagatgataaagatgtcttagacgaaaatgtgacagcatttataaatacattaccagaagattccataaaaagaagaaaactatatagagtatatgcaaaaggtgctcatatagatgtgggtgacataattcaagaaaatgaaaaaagaacttttgcatctacttatttcatagaggaagctaacaagaataatatatccccacgtgaattagtattaagaactttaaataacaatgtttttttgcaatattattttttattggaagaaactttaaaaaacatatttttagaaactaacgcatcctatgaccctaaaaaaataacaggctcacaagcaataacactctgtttaaacagaaggttaaatcactttaagaataaagatagatttatcaaatcaatatctgaaagaagcaaattttttataacatggaaaacattaacgttaacctgggatttattaacgcttataagaaacagatgtgttcaccataataatctatacgatactacatcaataaataaattaaaaaaaattatagataaaatacttaaggaattaaaaaaatcagaagggagtgacttaactgcattatatttctcaaactccattgaatctataattagcaatatagaagaaaatggatatatattattcaataatacattagaaaatatggtaagaaatacatctatatttataattgaatcattatatttatgtgaaatagaatga

SEQ ID NO: 301979 - DNA, 360 bp, Proteus mirabilis
atgcaaaaaaacaaatacattaaaaaagaggtatcacgccctaatgaaacatataaatgtaccatatgtgaaattgaatatgataaaggacaaattgactacaattggaaatgccctagttgcggtgaatttattttaatccaatcttatgatgaaaaaacatcaaatactgtagaattcataagaaaaagagcagatcagttagaacacggggattatatttattattttggtgaagaatatcgaattaaaggtattactatccttaatggaaaaaaaacaggaatggtacgaattggtttggaaaatttcggtactaaagaagtagatatcaatgaatgtatgaattgtaacctttga

SEQ ID NO: 301980 - DNA, 480 bp, Proteus mirabilis
atggcgtatccaacatatttagtgttaaaaggtaaaaatcaaggcctgatttctgcagggtgttcaacgtcagactctataggtaatcgttaccaaataggtcatgagaacgaaatacagattattagcttaaactatggttcttttagagaacagaatgcatcatacagacctatcgtatttactaaacccatagataaatcatctccattgttatcagttgctttagatagtaatgaagtattagaagcgacttttatattttatcgaacaagccaaaatgggcaacttgaaaaatattatgagataaaactcacaggggtatctctaattgagatctctgatatttttcctgattcaattaaagataacgaatcaatgccatatcaacgtattcaaatgaaatatgagtctatatcacgtagtcatttaatggcaaatacatcaagctatagtattaatagcgagataattaagtaa

SEQ ID NO: 301981 - DNA, 873 bp, Proteus mirabilis
ttgatcgagaaactcagtcggcgctttagtattaaacaactgtgtaacgtgttcagtgttcatcgcagtagctatcaatattggcgtcatcgctcaaaggtaccatcaacggagcaaatacggcttcgggcgcttgttcgagaagcccatgaaagcagtcgcggttctgcgggtgctcgcactattgctgacattgtatcaaaaacaaaacaggtccctttaacgcgctatcgggcaactaagctaatgaaattacttggtttagagagttgccagacaccaaagcatcgatacaaaaaagcgactcaaaagcacgttgcaataccgaatcatctcgggcggcaatttgcggtcacgaagccaaaccaagtttgggtgggtgatgtgacctatatttggtcaggtaaccgttggatgtatcttgctgttgtgatggatttatttgctcgaaaacccattggttgggcgatgtcattttcacccgatagccaactcacaggaaaagcattatcaatggcttttgaatcaagaggtaagccaagaaatatcctgtttcattcagatcaaggaagtcattatacaagccgccaatatcgccaattattatggcgttatcagataaagcaaagtttatctcggcgaggcaattgctgggataattcgccgatggagcgattctttcgaagtttaaagacagaatgggtacccattttaggctaccgtaattttatagaagcacagaaagaaataacacgatatatcatcgggtattatagtcagcttagaccccatcaatataatggtggcttaacgcccaatgaatcagaacgattatattgggaaaactctaaagcagtgaccaatttttgttga

SEQ ID NO: 301982 - DNA, 864 bp, Proteus mirabilis
atggaaaaatcccgcacaacattagaccaatggatcaccttacaagctgttgttgattacggtggttttgctcaagccgctgatgtattacataggactcaatcatcaattagctatactatcaataagttagaacaaaccttgggtatagaaatactttctttagaaaaaagacgcgcagtattaactactgaaggagaactattgctaacactttctcgagaagtgacagaaaaagcattatctctagaaaaaaaagcaaaaaacatcaaatttaacaataagttaaaaattaacgtactaattgacccaatgtatgtcgctgatctttttttaaataaaatctcacaatttattaagcagaataaacagtatgatattaatatttataggaattctctcagcaaatcagaaattttagcgcaaaaagaatatgatttaattgtgtcaccttattatattaaatcactgcaacctattgttttagaaagcattaaaactaccttagtatcacatccagatagcccattacagaaactacaagatgaggaattattgcaggaattacaaaaacatagctgtatttctctttctcctgattcacccgatactgataatcaagcccaagtcattcaagttggctcggtagagacagcaattagcttaattcagcatggtttaggttatgcacgtctcccccttatttttattcaagatgaattgaataaaaaaacaataaaacaattaataacgcataaaaaagagaaggaatataaattctatttatatttgaataaaaattcatttattaatgaaaacttgcaaagtttattatcaacaattagctattcaacaaatatctaa

SEQ ID NO: 301983 - DNA, 375 bp, Proteus mirabilis
gtgaaaattagtgattgggcgcgttctggtttaactcaacgcggtaaacctaaagttagccaacctaaccaatctggaaaactattagagagtaaagactggttacccaatagcattgttttacgcattggtgattatatcactgtaaatgatgaactgaagcgtgtgacagcgaatgtgatcagtgatgcacaaggaaatgcaacaattcctattgcccccatattgcgttacgcacctgcagtaaatgatttgatagaaaatgaagtaccctacggcatttttaaattaaccagtaatgatcagggaaatttccaacgtaaaccaggcatactgaccagcacttctttatcattcgaggaggcgttaacatga

SEQ ID NO: 301984 - DNA, 438 bp, Proteus mirabilis; identical to SEQ ID NO: 14572

SEQ ID NO: 301985 - DNA, 285 bp, Proteus mirabilis
ttggattatctatctgattattcgattggggctagcatgatttttttattaaaatatgaaggaccaggagggagtgatgaggttaccgaaggtgttttcagttctaccttatcttttgatgcttacgtcactgatgatatcgtcgaagtttccgacggaagagagaccatgcaaagtgatgccgacggaggagagtccatgcaaagtaatgccgacgaaggattcccagcagcagtcctcctaagtggtgccggcttcgaaaacgtaagattcgacgatgaataa

SEQ ID NO: 301986 - DNA, 378 bp, Proteus mirabilis
atgttatatacgaatcctcgtaataaatcaggtttctatgggcgacatcaaattagcaaaccttcccatcatacgtggaaatcttatgctcactttttattagccagtttaccagagaaaacagcagaacattatcgtaataaaatagcggtctatcttcgctggtatgccgaacgagattacccaaatggcatacctgatgcacaagaaggtgatactagtagtaaacaaatcccttcttggcgacgaatctgtaagaccatcttgcgtaacgatttttggtgtagaacattagcatttagtcctactaaatcacactgttatgatcgatatttcaaacggatacaaggaaaacgaaaagactggcaacttatttag

SEQ ID NO: 301987 - DNA, 573 bp, Proteus mirabilis
gtgataaatagtaacactttaggtttatctaatagccgaaacgtaggattgacgcaatgtaatgaagatgacattattatctttactgacaatgatgtatctttttataaagatttcgataagttaatatataatatcttcttgttaagtaataaggacatcgttacttttaaagtaaaaaatatccatgaaaaaccattcaaaaataattatataaataaaaaattcaaacataatttaatttcaataatgaaggtctcatcaattgaaatagccttaaaatataataaaaaaataaaaccatttgataacagttttggattaggaacaagtatacctttaggggaagaaaatatatttctttctgataatataaaagctaatcaacaggtttatttcgaaccagtttatctatgtaaacacatggatgataatcattcaggtgctaattttaataaaaaaactttttatatgcgttggaaaatttttaaacgtatatatggtaaactagttggtagcattatatttcttatatttaacattaaaaatctaagaaaatattttataaagtga

SEQ ID NO: 301988 - DNA, 180 bp, Proteus mirabilis
atggatataaaattaccatctttttcttcactaatatatcccccaacaacagatatattattatttttttccataaaattatattgtatttccaatctatctaatgctgagatgtcatctgaatccattattgcaatatatttagtatttgctcttttaattgcaaaatctcttgcatag

SEQ ID NO: 301989 - DNA, 642 bp, Proteus mirabilis
atgaaaatagataatacttatataactgctgcaaagtttttattagaaattgattctatttttatttctattgatgaactaaaagaaaagttaaatattggttataatcacgcttcggctatattagaagatttagcaacgcgaggtattgttgaccaaggtgaatttattaatgagaaatgggtatttgttattgataaagaaaagttaggcctatttcttttagttaacgatcccatatttaaaacaagagtagatgaaaaatctgagttaacgagtagctcaaatggtttcttatatacccttatttttattttgatagcggcgccattattctatttgtttttaacttttatttttggtgacaagaaaaaagaaatagattattgcaatagtgaagagcgtgcttatttagcatcaacaaatatggttaggaataccttaaaatcgccatcttcggcaaagttcccgcactatactgaagttgaaatttatccagcaggtcaatgctcatttcaaataaaatcgtatgttgatgcaaaaaatgggtttggcgccatgataagaaaaccatacttaacagtcgttacctatgatgaaaaaacacaatcctatctacagaaatcattaaattttgaatga

SEQ ID NO: 301990 - DNA, 384 bp, Proteus mirabilis
atgagagatatacaggaagttttatcgcgttggggagcgtggtcggcagataatacagaattggttcaatggtattcggttgctgcggggtttagtggattaataccaagtaaggttaaggctcgtccccaatgctgtgaagatgatgcaatgattatttctagttgcatggcgcaattgaataaaaagaatagtgatatgcatgacttactgcttgattactatttattcggaatgacatttatgcaactagctaacaagcacaactgttctgatggacacataggtaaaaaattacaaaaagcagaaggaataatagaaggtatgttaatgatgctagatgtctcattagagatggatcgatacgtagaaaaaattacataa

SEQ ID NO: 301991 - DNA, 231 bp, Proteus mirabilis
atggctgaccaaatggctgctactattcgccataatcgggctagagggcaacatcaagtggcggcaatgtcagatatagtcagagatttatcaagattaggttggaatgaccaaaagattggtgatgaattaggtatgtcacaagatgaagtactacgtttaaaacagattagtggcttagctgaattattttcagagcacgacttctcagaagcttggacggttaagtag

SEQ ID NO: 301992 - DNA, 378 bp, Proteus mirabilis
atgttatatacgaatcctcgtaataaatcaggtttctatgggcgacatcaaattagcaaaccttcccatcatacgtggaaatcttatgctcactttttattagccagtttaccagagaaaacagcagaacattatcgtaataaaatagcggtctatcttcgctggtatgccgaacgagattacccaaatggcatacctgatgcacaagaaggtgatactagtagtaaacaaatcccttcttggcgacgaatttgtaagaccatcttgcgtaacgatttttggtgtagaacattagcatttagtcctactaaatcacactgttatgatcgatatttcaaacggatacaaggaaaacgaaaagactggcaacttatttag

SEQ ID NO: 301993 - DNA, 459 bp, Proteus mirabilis
atgagtaaccaatcaataaaacaagttgtgaaagagatgtgtgaggcaacagctggtgggcgtgaagcgatggctggggcgttgggtttatctctgacttcattcaataacaaattgtacgagaaaaacggctgtcgttcgtttgatttaaacgaactattagcgatgcaagatatttctcagaccgttttatttgctgaatttgtcgctcgtgaatcaaaccgcttactcgtggacagaattagccctgcagatttagatcagacagaactattcacattacgtagcaatgttgacgaaatgcagggacgtttagcgttattgatgaaagatagcctggctgatggcgttattgataacgaagaagagcagaaaataaaaatgatgttagatggattaatttcgcagatccgaacatttatgaatgcgtttgtttcgttacatcaaaagagaaattaa

SEQ ID NO: 301994 - DNA, 321 bp, Proteus mirabilis
atgctttctctagaattagtaaaagaacatctcagattagacatagattattgtgacgaagatgcgttattgctcagctatataaaagcagcaaaacggcgcgtagaaacatacactcgcagaacattaataacatcagatgaaagcgtcgagaataaggatactacgctacagtatgggggagatgtggaaatgtctatgttattacttattggcagttggtatgcaaatcgtgagtcggtagttattggtaatgctgttaacgcattacctcaagcttttgaagcactattgcaaccttatgtaaggtacggcatatga

SEQ ID NO: 301995 - DNA, 174 bp, Proteus mirabilis
gtggcggcaatgtcggatatagttagagatttatcaagattaggttggaatgaccaaaagattggtgatgaattaggtatgtcacaagatgaagtactacgtttaaaacagattagtggcttagctgaattattttcagagcacgacttctcagaagcttggacggttaagtag

SEQ ID NO: 301996 - DNA, 297 bp, Proteus mirabilis; identical to SEQ ID NO: 301928

SEQ ID NO: 301997 - DNA, 669 bp, Proteus mirabilis
atgaatgtatcaaaccctcttcgcctgcaattcaccgatgctttcgggaatgtttgctttactgcgttctgctacaacctgaaccagctttcgggcgcggttcaagaagccgcacagcgcgacgcgcagaagttggtttctatcgacgtgatggagccagaaggctctaacactctcagcacctacagttgttcgctaatcgtagggccgaccggcgcagagcagagcaatctgtacaaacaagttctgcaagcggccaaaagcaatctgaactggccgcaaaactacatgcccgcgtctgcgaccgataaggaacttgagaacttaggaattcagattgcagccggcgtggcagcccaagttatcgtccagattggcggtaaggctgttaaaatgatcctgcgcaaactgaccggcgttccagccccagcagtagttgacggaaacgacccgaccccgcctgaaagcgctggcgatgtgatcggcaccgtttccgacccagaccccgaaggcttattgccagaaggtggtgatgacggcggctacccggaaaacagcggcgaagatggtggcgacggcgaagatggtggcgacggcgacggtggtgatgacggcggctttgaccccgatatccccgatatccccgatgtcttcgaaaagaaagactaa

SEQ ID NO: 301998 - DNA, 1098 bp, Proteus mirabilis
gtgactagagatggtaatgactatttaaatatttatccacccaaagtaggggatggtaaggacttaggattctttcagtataatttagataagacatggaatggcgttttacttataccgagggttccagttggaaaaacaagagaattggctgtaaaagagggaaataacatattagtttatggctcacagcactgggcaggcttaaggctatataaagctagcggtgagtatgcgatgttggaaactaattcatcggataatgagattttatctttagcttatagagattctaaaggctctaatgttagtgttcttaggtttcctaggcaagacggtcaggtaatggttcaaggggattatggatttgctggaaatgggagaagtgaaggtttagatgaaagtaaattaacatctaaagtttttgattccaatcattctcaaatatttagatcttcttcagacccaggaaaatttggaacaatttattcccctatcctatttttaactacaggcgatacatgggcgacaatatccactagctacttaacaggaaacgtcactgttgcgtctagtaatcgaaacagatcaaaccctataaaatttaacaatttgtggggcacatctaacactacaactgacagtaatggttttattaaacgagcttctcctgtaattaacatcaatcccgacggtacattcaccactaacgacgaatcagaaggtgctacagttactcgagtagctcagggtgaatatcttatcgaaggtgtactcggctttaactcagatgcaggttggggcggtgtcgatgggggtattgaaattccactcgatgttaataaacagccgttgatatgggtagactctaaagttatggaggacggttctatcctcgtgagaacgtatcatcgaactcaccctaacgcacctaaattcgcccgtaatgatattgatggttacaaagacggcgacccaatagatatccctgatggtcgttttatttccgtgcgtgtacagatgccagagcaatccatctataatgtgagaatgcgtgagatggaagaagcacagaaagcggaagaaaggccccaataa

SEQ ID NO: 301999 - DNA, 381 bp, Proteus mirabilis
gtggcaaggggaacaagtaaagcagtcggttattatcttgaacacttattgtttgcactgggcctgcattgcttttttattaatgattataacttatcagattcgtttacacgtttagtgaatgaagatgacacggttatttttatctctctttcagggggaactaaaaagatcattgaaacggcaaaaattgtgcagttaaaagaggcaaacattatcagtatgacagcctttaataccaatgagttaaccagttatgcgacgcatacgctattttgtttcgcggataatcatgatacgaaaaaagatgataccaagtcacgaattggtttttttattttggttgatttgttaataaatgaaatagaaaacctactttaa

SEQ ID NO: 302000 - DNA, 627 bp, Proteus mirabilis
atgttaagtcggtcaatgaaagacttactgacaatgttaaaacaacacggcatcaatgatgagcgtctgttggaagcgatgagcaaagtaccccgagagctatttattgatgaagcgctctcccataaggcttatgaaaatacggctttacctattggtaatggtcaaactatttcacagccttatattgttgctaaaatgacatcactgcttgaattacaagcaacggattctgtgttagagattggcacaggctctggttatcaaactgcagtattagcaaacttagtgcatcatgtcagttcagttgaacggataaaaatattgcagtggcaggcaaaacgacgctttaaacaccttgatttacataatatttcgactcgtcatggtgatggttgggaaggttgggtatcaaaaggcccctttaatgctattattgttactgcctgtgcaacagaagtaccgcaacgactcttgatgcaattagctgatggtggcaggatgatcattcctgtcggtgaacagcagcagatgcttaagtttattcgtcgtttaggtaatgattttcactatcaatctatcgaggctgtacgctttgtccccctaattgcgggtgagttagcataa

SEQ ID NO: 302001 - DNA, 993 bp, Proteus mirabilis
ttggagcttaggaagagctttaaatggaatagtttatctcaagataaatctcctcagactgtggttctctttttaggagaaacacatcgtggcgattatttatctataaatggatattcaagagaaacgactccagagctagaaaagagaaatgttatttctttttctgatgcaatatctcaaggtgcttataccttacaatcaacaccaatgatcctttctagaaagaatatctatgattcagggttaattccggaatcttcaattataagtgcatttaaagaggctggatttacaacttggtatgtttcttatttgtctcatgctcatattggtgacaatgaaattaatttaattgctaatgaagcagatcattatattcagtctgatgttaatataaatacattagataaaatattgaacgatgatagccagaaaaagttaattgtttataagactgtgggtagccattatttatatcacaatagatatccaaaagaatttaataaatttcaaccttcatttactgataatgattataaaacaccatcatatacagataaggaaaaattagaaaatagttatgctaattctattctttactcaattgactatcaagtatcagagtttatcgatagattaaagaaagaaaaaggattagtttctttatcttttatatctgatcatggtacatcgatttatgatgatggtaagtcattatatggtggaaatacaaaaggaaattataatattgcattatttttttggtttaacaaagaatatatcgataaatacccattggatgtggaatatcttattgaaaataaagataaaaaggtaacatcgtattatttctttgatacattgctacatattggaaaaataaatactaaaaaaataaaaggtaggagcttatttgaatctccgctgtttgaaaaagaaaggttaataaaaaataaagatatttataattatgaggatttgaatccatag

SEQ ID NO: 302002 - DNA, 615 bp, Proteus mirabilis
  misc_feature (560)..(563): n is a, c, g, or t
atgattacaagtaataagttaacgcttttagcgttggctgtcagcttttctttattttcaggaatgggggttgccggggatggtgaaggtaaaaacaggaattattatttcgatccatctaaggatcgaattgattgcggaagtaacggttataacgataacggaagctggggatgcgtgaataatggtttaacgtatttaaacaataaaataaaagacttttcggctgaaaaactcattgaaattaaagaagaagcaattaagtcggggcaagacgcagctaataaagccagacaagacgcaaataattttactgacaataaagtaacggcaagtaatagccgtacggacgatttaatcagtaaagagcagaaagcgcgtaccgatgcgctgaatgcagagaaattggctcgtgaacaaggggatgctgataccctcaaaaatgccaatcagtataccgacaataaagtaacggcaagtaatagccgtacggacgatttaatcagtaaagagcagaaagcgcgtaccgatgcgctgaatgcagagaaattggctcgtgnnnnaagagcagaaagcgcgtaccgatgcgctgaatgcagagaaattggctcgtga

SEQ ID NO: 302003 - DNA, 270 bp, Proteus mirabilis; identical to SEQ ID NO: 301855

SEQ ID NO: 302004 - DNA, 255 bp, Proteus mirabilis
gtgttttatcacattaaatttaatccacctaaagttgaaaaccgtgacgatgtgacaggtgaagagttaacaactcgtaaagatgaccaagaagaaacagtgcgtaaacgtttaatcgaatatcattctcaaacagcacctttagtttcttattaccaaaatgaagctaaagcgggtaacgcgcagtaccacaaaattgatggtacacagaaagtaagcgaaattaatgctgaactgaaaaacatcctcggttaa

SEQ ID NO: 302005 - DNA, 432 bp, Proteus mirabilis
gtgaatgcaagcatcagtggcgaaaccgcatttcaaggtcaaaataggctccctgatttattaaaacagcaccaacctcgttgggttttgattgaactgggtgcaaatgatggcttacaaggctaccctgtagcccaaacgaaagaagcgttgcaaaacatcattacccaagtaaaagaagcgggagcaacgccactctttatgcaaattatgatttcgcctaattatggtaaacgctatacgcaatctttttctgctatttacccacaattggcgaaagacaatgctctggagcttatcccattttatatggagcaaatagcagataaacctgagtggatgcaaaacgacagcattcacccaaatgaagcggctcagccttttattgctcaatggatggataaaaccctatccccttacctaacacgttaa

SEQ ID NO: 302006 - DNA, 2037 bp, Proteus mirabilis
atggttcgttcttttttaatagcattgatgttgatgctattttcattatcttcattagccgccgatacaggttggctaactatgccagacaatgatcatgctcaggttagggctacggctgacaagtcatcgacaggcgatgttaaaatattgcttgaggtgcaattagcgccgggctggaaaacatattggcgctctcccggagaaggtggcgtagcacctgaaattaattggacgcaatctgtgtctgatatgatatggcattggccatcaccttccgcttttgatgtcgcaggtattcatacccaaggttacgataaagaagtcgtcttccccattgaactaaaatctgtcgatagcgataacttaaatggggtattaacactttcaacctgtagtaatgtctgtattttaactgattactcattaaatctggatttaaacgagcctgctcccgctgactttgaatggcaatataatcaagccatggccaaagtaccagtgacaagtggattaatttctgctgtttcatctgattatcgaaatagtcaattaaccctctcattacaacgagaacaaggtgattggcatcaacctaatatttatctcgatccaccacaaggaatgctatatggcattccacagttaacagcaaaaggtgatcatttatctgttactgtcgatgtaaccgatgattggggagacgctgcgggtgacattacaggaaaaccactctcctttgttgtgactgacgatggctattcacgtcaagtcaatgacactataggccaaggcgatagcgtatctctgcctactgctgactcgggggtaggattatggagtattttatcctttgcgctgttagggggcttaattcttaatttaatgccttgtgtgttacctgttttggcgatgaaattgggctcaattcttcatatcgaaaaacgtgatacaggggctattcgtaaacagttttctgtttctgttgtgggaattttagtgtcattctgggccttagcgctgtttatgaccgtattacgctacagccaagaagcaataggttggggcatacagtttcaaagcccttggtttattggctttatggtgctgatcacggctatttttaccgctaatttatttggcctatttgaattacgtttatcaagtaatatgaataccaaaatagcgacagcaggaggccaaggttatagtcgacatttctgggaaggggcttttgctacattgcttgccacaccgtgttctgccccattcttggggactgcggttgcttatgcattgatagcaccattaagtgagttatggttaattttcaccgcattaggtcttggaatgagtttaccatggatcatggttgctatgtttccatcaattgccaaagtgttgccaaaacccggtaaatggatgaatcgcctaagagttgttttaggctttatgatgttgctatcttgtatttggctgatcactttattgatcccccattttggtattggcattgttgcggctatttttgtggctatcgccctgatcttgctttttgctattgctaaacattacggcaaaaaaacgctatttgcttcaatggtgatcacccttattttaggtggtacaagctatctatttattgctcagcctgatactcagaccttggcggggcaagatcatgtaaattggcaaccactctcagaagaggctattcatcaagcgttagctgaaaataaacgagtgtttattgatgttaccgcagattggtgtgttacctgcaaagcaaataaatacaatgtattattacgcgatgatgtgcaaaaggcactttcagagcctgatgttgtcgcattaagaggggattggacgaaaccgtcagaacagatcacccaatttttaaaacagcgcggtcaagtcgccgtgccgtttaaccagatttatggaccatgtaacaaggagggggagatcctaccgcctcttttaaataaagatctaatgttaactattctttcagaggctaaaggagcccaataa

SEQ ID NO: 302007 - DNA, 603 bp, Proteus mirabilis
gtggtttataatccagttgatagaacagataagataattcatcgtccatcaaataagattaagtttctttatattgggagattattgtctaaagaaagtaaaaatcttgaatttatgttctatgcattaggtaaacttaagggaaattgggaactacacttagtgggggatgggaaagatagaagtaaacttttttctctcgcccaaaaactacatattgataaaaaggttatttttcatgggtggcaagataatgcttgggattatgtattaaatcatattaaagaagtcacggcttgtttattgacatctactcatgaaggacttcccatggtcttaattgaagctcaatcttatgggatctattgtgttagctctgactgtttaactgggccttctgatattattgatggagataatggacaattattccctgttaatgatgaattatcatttttaaaaatattaaatgatatcatcaatggtagattagatttacctgaatacagcaaaataaaaaaatcgattaaaaaattttatggagatgtctacataaaaaacatgatagatttttttgaaaaaaagagtaaaaaaatacaatga

SEQ ID NO: 302008 - DNA, 1245 bp, Proteus mirabilis
atgggatcttttgattatatcaaacaggcaataaaaaagaatggctataccttacagcaagttgccgatgaaagtcagatgacaaagggctatcttagccagcttattaataacaaaatcaaaagccccagtgcacaaaaaatgtccgcattacaccaatttttgggattagaatatccattacaacagaaaaccattggggtgatttttggtaaattctatcctcttcatactgggcatatttatttaattcaacgagcttgtagtcaagtggatgaattgcatgtcattttatgtcatgacgaacctcgtgataaagagctatttattaatagtgcgatgtcacaacagccgacggtaagtgataggctgcgctggttattacaaacttttaagtatcagaaaaatattcgtattcatgagtttaatgaacatggtatcgagcctcaaccgcatggttgggaaatgtggagtgagggtatcaaagcttttctacaagaaaaacaaatcgcgccggattttatctataccagtgaacgagaggacgccagtcaatatgaagcatttttaggcattgaaacggtactggtcgatcctgagcgctcgtttatgaatattagcggtagtcaaatccgtcaagcgccatttaaatattgggaatatattcctaccgaagtaaaaccttttttcgtgcgtacagtggctatattaggtggtgaatcgagtggaaaatcgaccttagtaaataagcttgccaatatttttaacacaaccagtgcgtgggaatatggccgtgattatgtcttctctcatttaggaggagacgaaatggcattgcagtattctgattatgataaaatcgctttaggtcatgcccaatatattgattttgcagttaaatatgctaataaagttgcatttatcgatactgattttgtaacaacacaggctttttgtttacgctatgaaggaaaagaacatccttttgtacaggcattgattgatgaatatcgttttgatttagttattctgctagagaacaatacgccatgggttgccgatggtttacgtagtttagggagtgataaagagcgtcgtcgttttcaaacactgttgatagagatgttagataaaaacaatattgaatatgtcaaagtagatcctcctgattatgatgagcgctttcttcgttgtgtcgaattagtcagggaattgctgatgatgcaatcaaagcatatcgaataa

SEQ ID NO: 302009 - DNA, 927 bp, Proteus mirabilis
atgggtgattataattcactgtttaaacagcatacggagtgtaatattcatactattacacttattcgtgattccattttggcatctagtcagaaattacaagaaaagctagcattgctggaagaaatggaacatctctttaatgacatgcttatcaatgcagaatcattagtggtcttttttaatgaaattgatgagcattttactcatagtaatgaagaaattgagaattttgctaaatggctaaataaaataaaagatagcgctaataatattgataaactgtcaaatcaagccaatatattatcaattaattcagcaatagaggcaggacatataggtcatgcaggtgcaggattttctgtattagcacaagagatgaaaagcctttcacaaaagatccaaaatcaggcctcagaaatagcgtctatcaacaataatgtaagtgcccgctttacaccaataaaacaaaatactcagaaaaatcaagaacaattgaagcaaataaaaaatcttgttacggaaggtcatgctaatttatctgcgcttgctcaacaagccaatgatttaaaaaatatctttcagtttatgtcgatacaacaattttttaatactgtgaaaatagatcatgttttatggaaagaagcgatttatattcacttattaaataatgatgatgaaaattgtgttaatcagcatactgaatgtcgtttaggaaaatggtactaccaaggtgaaggacgcaaatttgctggcagtgaagcttttcgtcgtttagaagagcctcataaattggttcatcaaagtgggcgtcttgcattggcggcgaatatggccggtgatcaggatgcggtagtgaagtatattcagcaaatggaacaagcgagtgttgatgtcattaaatatattgatgctttacataattaa

SEQ ID NO: 302010 - DNA, 762 bp, Proteus mirabilis
atggcttggcttaatcaatacgaccactttgtgccagaagaacaccttgcatcagttgtgggtattgccgcagagatgggaaaacatgattcaggttttcactcacatgatagggggcagttactgtttactcaatcgggttgtatgagaattactttagcctctcgtgtatctgttttgccacccatgagaattgcttggatcccgccaaaactggaacatcgagtcgagatgtatgcggctgtaggttatcgttcagtttatattgccgataaatttcatcatcgtttcccaactgaaagcgaaatattaactatttcacctttacttagagagatattagagcgtattgctattgctgattttgacacccagtgggaagtagggcggtatgcaaatttattagctgtttttttagatgaaattcagcaagctaaacgtcaacctaatcatttatcaatgcccaatgatagacggttaagaaaattatctttcgatgaattacctccgccactacaagaattagcgcaatatattggcgctagtgaaaaaactattactcgattattttataaagaaacaggattaagctatcaacaatggcgtcagcaatggcgattaatgaaagcgatagagctattagccacacatcatcgttatttagaagttagtcaattattagggtttgccagcgatagtgcctttatcactttttttaaaaaaatgaccgggcaaacaccacaagagtatttaagaaattga

SEQ ID NO: 302011 - DNA, 225 bp, Proteus mirabilis; identical to SEQ ID NO: 301896

SEQ ID NO: 302012 - DNA, 798 bp, Proteus mirabilis
ttgagacctaaagcttgtaagttaagtcaaaaccctacattgtgtaaaataatcgcagaaaaaatgcatcgaggctggtcacctgagcaaattgctggctggctaaaacgtaattatccagatgctcaggagatgaatgtgtctcacgaaacgatttataaaacactttttatacaaactcggggaactttaaaaaaagagctacagcaatatcttagaagcagaagaacggtacgaaaatctagaaccacatcacttaaaggaaaaggattaggctcaatccctaatgccgttcctataagcgaaagaccatcgactgttgcggatagagcgattccaggccactgggaaggggatctaattcaaggctctaaaaattcttatattgtcactttagtagaacgccattcacgttatgttatgctagctaaaatcagtgataataaaacagcaacggtgatagccgctctcattaaacaggctcagcaattaccctctgaactatataaaacattaacttgggacagaggtgttgaaatgaccaatcatgcagtatttactgtagcgacagatatccaagtctacttctgcgatcctcagtctccgtggcaacgtggttcaaacgaaaatacgaacagattgctcagacaatattttccaaaaggtactgatttatccgttcatagccagcaaagattaaatagcatcgctaaacaactcaacgagaggccaagaaaaacgctaggttatgaatcaccagcagaacgatttaaccagtgtgttgcatccaccggttga

SEQ ID NO: 302013 - DNA, 777 bp, Proteus mirabilis; identical to SEQ ID NO: 301895

SEQ ID NO: 302014 - DNA, 357 bp, Proteus mirabilis
atgataaatacgttaactaagaaacaagcaacaaggactctgctattttcactatttcttggtttatccgtgtcttctttttcttctgttgcagcttcaacaaatgtaaccattaatggcaatggctatgataatgttttagataaagagcaagctcgacaaatgaaagaagattgggatcaaaaacgcgatctccgtaataaaatcaaccaacgcgaaaaaactgagtttaataaaatagataaagctattgatgagcgtgatgcttgtttaaaaagcgccaatatctatgcttactgggagccagaaacacgtcgctgtttagacagtaatactggtcgcccaattaacccttaa

SEQ ID NO: 302015 - DNA, 915 bp, Proteus mirabilis
atgaatatagaacttcgccatttacgttattttattgctgttgctgaagaattacattttggtaaggcagctgagagattaaatatttcccaacctcctttaagtcagcaaatacaagccttagaaagtgagataggggctcgtttactcgaaagaaccaatcgttctgtttcgttaaccccggcaggacaaatgtttttaaaaggatcctatcaaattatggcacaagttaaggcggtagcgacacgagcatcaagaatggaaaaaggagaattaggtgaaatttcaattggttttacctcaacaacaccttttatgcatttggttacgttaagtttgcgtcaatttagggaaaattatcctgaagtcggtattcatatgcatcaaatgaataccaaacagcagatatcaccattattaactggccacatcgatttgggaattatgcgtaatacggtgttacctgataatttgcaccaccagctcctatttcgtgaaccttttattttggcagtttatgaagggcatcctttacttgaatacaaagaaacaggcgtaaatattcaagatattgggcaatatccttttgtattttttgagcgagatgtaggaacggcgctttatgatgaaattattcaattgcttagccttgcgggaattacaccaacgatagcacaggaagccggagaggcgatgaccatcttggggcttgttgctgccggattaggtatttctattgtgacaaaatcatttactcgcatgaaagttgatggtgtgcattatctgcattttgctaattcgaatgctttctctgaagtatggttagtttctcataacaaacgaacgatccccgctgcggccaataggttgactcaattattgctaaaaaatatcttagaagatcaaaaatcttga

SEQ ID NO: 302016 - DNA, 1734 bp, Proteus mirabilis
atggcaatcgtagcagatggaattcagtacgccgaacaggtggtgactggagaaattgttgcgtgcgaactggtacgtttagcgtgccaacggtttttgaatgatttagatcatgggcctgagcgtggcatctatttcattgaagatcgcgcacagcacatactcgatttttacagttttattcctcatgtcaaaggagctttagccggtaagcccattgatttaatgccttggcatgtttttatcttaattaatatttttggctttgttattccgttaattgatgaacaaacgggcaaagaagttgtagatgaagacggtgatgttgtctttgtccgtcgttttcgcacagcttataacgaagttgcacgtaaaaatgcaaaatccacattgtcatcaggtattgggctgtatatgaccggtgctgatggtgagggcggtgccgaagtttactctgcagcaacgacacgtgatcaggctcgtatcgtatttgaagatgcgaagaacatgctgaaaaagtccaaagcgacattgggacgtttatttgagtttaataaactcgctatctatcaagaaagaactgcctctaagtttgaaccgctttccagtgatgccaacaaccttgatggtttaaatattcactgtggcattgttgatgaactgcatgcacacaaaactcgtgatgtgtgggatgtattagaaactgctaccggtgcgcgtctgcagtctcttctttttgggatcaccacggcggggtttaataaagaggggatttgttacgaattacgggattacggtattaaagtgcttcgtggccaagtggatgatgattcgtttttcgccattatttataccttagataaagacgatgatccctttgatgaaaccgtgtggcaaaaagcgaatccggggctgggggtttgtaagcgctgggatgatttacgccgtttagccaagaaagccaaagagcaggtttcggcacggattaacttcttcactaaacacatgaatatttgggttacggctgaatcttcatggatggatatgatgaagtgggatgatgcgcctcaattagcccctaaacaagaattacaaacttatccgttatgggtcggcgttgaccttgccaataaaattgatatttgtgcggctgctaaagtgtggaaacagcccgacaacggtcatgttcatgctgattttaagttttggttacctgaagaccggcttgagcgttgttctaaacaaatggcggagctttaccgtaaatgggctgatatgggatatctcacattaactgatggtgaagttgtcgatcatgctcaaattaaagaagaaattattgaatgggtgacgggtgagaacttaaacgaactgggttttgacccgtggagtgcgacacaatttagtttgtcactcgctgaagaagggctacctcttgttgaggttgctcaaacggttcgtaacttttccgaatccatgaaagagattgaagcactagtttacgcaggtaagtttcatcatagccaacaccctgttatgaactggatgatgtcgaacgtcacggttaaaccagacaaaaacgacaatattttccctaataaatctacacccgaggcaaaaattgacggccctgttgcactatttacaggcatgagtcgattattggtgaatggggggagtgataaacccgatatctcaggatttataaataacccaatcatagtaggtatctaa

SEQ ID NO: 302017 - DNA, 204 bp, Proteus mirabilis
atgacaactgaaccaataatcatagcgccagatggtttcactaatgaagatatcgcaaagtggatgaggtgcaagttgcagtgcatagattacctccctgttttacacggtaagcgagaaagactaatgagcgatgtaaaaaagctagatgccgaaatagcagagtacatcagtaaaagcgctattcagatacaaagtaaatga

SEQ ID NO: 302018 - DNA, 1617 bp, Proteus mirabilis
atgagtcgtaaattaaaactcgcacttgctcagttaaactgggttgttggcgatattgaaggcaactgtgaacgcatgttagccaccgtaaaagcgcaagaagatgccgatctggttttgttttctgaacttgcgttatgcggttactctcctgaagatctactatttcgccctgatttccaacaacgttgtgaagagcaactggttcgtttagaacaagcaagtaagaaaacggccattgtggttgggcatccttggtggcaaaacggtactatctataatgcactgtcatttttctatcaaggtgagttacaggcgcgttacttcaaacaacagctacctaattatggtgtatttgatgaaaaacgttatttccagcaaggaaatgaacgttgtgttgtgccttttaaaggctatcatttaggattattaatttgtgaagatatttggatcaacgagcctattgatgcactaaaacaagcgggtgctgatctggttctttctattaatgcttcaccttatagtcgtgaaaagccgcatattcgtacccaattaattaaagaacattgccaaagaacgcatctgcctgtggtgtatctcaaccaaattggtggtcaggatgaattggtttttgatggatgttctaaagtctttgatgaacgaggaacaatcacccatcgtttagcggcttttgatgagcaagtggccgtggtggagtttgatgagttaactatcgtaccgatgcaagatgcggcacccgagctttctcctttagcgcaagtttatcaagcactagtgctggcaacgcgtgattatgtgacaaaaaatggttttaaaggcgctatattaggattatcagggggcatcgactcaggcttaacagttgcaattgccgttgatgcgttaggtaaagagagcgttcaagcggtaatgatgccatttcgctatacctcagaaatgagtattcacgatgcgaaagagcaagctgatttattaggtgttgagtttgatactgtctctattgagccgatgtttgatgcttttatggatcaactttcgcctatgtttaaaggtagcgctgtcgatactacagaagaaaatctacaagcgcgttgtcgtgcggttattttaatggcgatgtccaataaacgtcgtcggttagtgctcaccacgagtaataaaagtgaatctgccgtaggctactcgaccttatatggtgatatggcggggggctttgatgttttaaaagatgttcctaaaacactggtgtttgaactggctaaatatcgtaatactctttcacccgctattccacaacgtgtgattgataggcccccttcagcagaattagcaccaggacaaacagatcaagataatctgccaccttatgatattttagatgctcttcttgaaggctatgttgagcaagataaatctgtttctgacttggttgcggctggatttgatgaagccattgttcgtaaagtggtaaaattagtcgatattaatgaatataagcgtcgtcaagcaccggtaggaccgcgtattaccagtcgtaattttggtaaagatcgtcgctatccgatcacaagcggttttggtcgccataactggtaa

SEQ ID NO: 302019 - DNA, 921 bp, Proteus mirabilis
atgagcatcccaaaagagcaatataattttaacaaattacaaaaacgcttacgccgtaacgttgggcaagctatcgctgattttaatatgattgaagatggcgataaaatcatggtgtgcctttctggcgggaaagatagctatactctcctatctatcttaatgaatttgcaaaaaagcgcgccaatacaattttccttaattgccgttaatttagatcaaaaacagccgggcttccctgagcatattttacctgaatatcttgagcaactgggtgtagagtataaaattgttgaagagaatacttacggtattgtaaaagagatcattccagaaggtaaaaccacctgttcactttgctctcgcttacgtcgtggtattttataccgtacagccaccgaagttggggcaacaaaaattgctttaggccaccatcgtgatgatattttagaaacgctgtttctgaacatgttttatggtggaaagctaaagggcatgccacctaaattaatgagtgatgacggaaaacatatcgttattcgtccattggcttatgccagagaaaaagacattgagcgttttgctcaagcaaaaaatttccctattattccgtgtaatctttgtggctctcaacctaacttgcaacgccaagtgatcaaagagatgctaagagattgggataaacgttaccctgggcgcattgaaaccatgtttagggcaacccaaaatattgttccctcgcatctatgtgatacccaattatttgactttgctaatatcaaacagggtgatgagattattaacggcggtgatctagcatttgataaggatgatattccaacaagccctattctttccgatgatgaagatgagcgtcctgactttagccaagctagattggatgttgttgaggtaaaataa

SEQ ID NO: 302020 - DNA, 984 bp, Proteus mirabilis
atgaaaagtgtcaataacgctataatcgaagattctgatgctatctatacggctcagcttaatgggcatggcggaattatgccgatcacggctaatagcatagcaagtaatgaaaggcctttttgggttcatctcgattatcgtaaacccaaaagtgatcagtggattaatcagactgagttacttcctcctatcgcaaaagatgtgcttttagctgaaaatgttcgacctaaggcacagcgtatcggggaaggggttattattaatttgcaaacgattaataacaaccccgatgatcggccggatgaactgattgcgtatcgtatttatattaatggtcaaatgattatttcgagccgacatcgtcgtgttaattccgttgattcggtgatccactctttagaagtgggggatggtccagaaaatagtggtagttggttgatcactatggccgatgcagtgacagatgaaataggtgattttgttgaaacacttcatgaccaattaattgagttggaagatatgatcctcgatcagcaaattccggctcgaggtgaattggcattgctacgtaagcaactgattgtgttacgccgttatatggcgccacaacgtgatgtattctctcgactctctatcgaaaaattaccttggatgagcgacagtgatcgcattagtttggttgaaatatcagaacgtctctcgcgtcgattagaagatttagatagtagtatttctcgtacagccgttattgctgatgaaattacttcaatgatggcagatgcgatgaacagacgaacatataccatgtcattgatggcgatgctatttttgcctacgacctttttgacaggactatttggggttaatttaggtgggatccccggtaatgaatttccttatggctttgctatattttgcttttcactgtttttcttgattgtgattgttgcttggtggttaaagcgtagtaggtggttgtga

SEQ ID NO: 302021 - DNA, 639 bp, Proteus mirabilis; identical to SEQ ID NO: 301920

SEQ ID NO: 302022 - DNA, 834 bp, Proteus mirabilis
ttgaaaaagcagggtgttttacgcattgagcaaatcaataaatcgaaccatgaccgtactaattattatgcgattaactacgatcaccatctgctaactgatggggtcaatatgacccaatcgaacagtgataatacatctaatcgagcagttcaaaatgaccttatcgataagcgcaaattgaaaccgtcaaacagttcaaaatgcgctgttctgaacgggtcaaaatggcctgatcttacagagaatacaacagagattacttcagagagtacaacagagactaactcttcttgtcaggttcctactgaacccgacaacgctcctgaaaaattaattttggattatttcaacaaggtgacaaattccaaatatcgtgaaggaaaaacaacaaccgggcatatcaaggcgcgattagcagaaggatttacctctgaagacttgatattaattacggattacctgacagctaaatggcaaaaagatcccaagatgcgtgattacttacgccctaaaacattatttgttcctgaaaactgtattgaataccaagataaagcgatcaaatggcgtgatgcagggcgccctgaatgtgtgaatggtcgttggttaaagcctggagaagtttcagtggaaattaacacggttgaacgcgatgaaacttttagaaaaatgttcacctcaggctggaaacctgaaaatcgtattcaagcattagcagtcgagcaagcaaagaaaaatggtcttggtcgtatgagtgaagttgctggtttagcttcattccgtggtatctggaaacaggcgacagaacaagttgcactggaggctaagtga

SEQ ID NO: 302023 - DNA, 1134 bp, Proteus mirabilis; identical to SEQ ID NO: 301959

SEQ ID NO: 302024 - DNA, 171 bp, Proteus mirabilis; identical to SEQ ID NO: 301943

SEQ ID NO: 302025 - DNA, 150 bp, Proteus mirabilis
atgctatccctaacccagctgcaactagcgctaattgggtctgaatatcttgagattgctgtaataaacgcggagctagtttatgctgttgtaaaaaagcatgtatctgctgatacagttttttccctttttctggagcaagtagaataa

SEQ ID NO: 302026 - DNA, 138 bp, Proteus mirabilis; identical to SEQ ID NO: 301862

SEQ ID NO: 302027 - DNA, 1461 bp, Proteus mirabilis
atgaagaaatataaaataacgagtgaaacaaaagaatataatggtgttactttatatagaattagaagagtgtatacagatagtccaggaggatggatagaaaatgaaagtaatttaagcagagatgataattgttttatttttgataatgtaatggtatttggtaatgctaaagtcacagataatgcaattataagaaataatgtgaagatctacggtaatgcaatagttaagggaaatagtaaagtaaaagacaatgcagagatttatggtaatgtgctagtggaagataatgtgacaatatctgatgatgttgtaatatatgataatgcagttattaaagataatgcgagaatatctgacgatgctgtaatatatgataatgctgttattaaagataatgctaaagtatcagaatatgctattgttcgtggtgatgcaatagttgaaaaaaatggttgggtgactggttatgcgactgttgagggaaatacaattgtatcgaaaggtgaggttattaagagccaatttggctcttgggatgatattaatgaactaagagcattttatatttatattaatagatataacagtacagcgactgcatatgttaatggtagacatcaggtacctattactatttatatagaggctttagataaaaatggtcgtatcataaaaatagccaaagaagatatttatagaaatacacatattgtaaatgaaaaaaatcttcctattgaccgcaatgatatttctttatctgataaagaaaatggatttgtatttccaagcagtaaagaagcaacattgaactcccctgatgcatctacttgtgttatttatctttctgttaataaagtgatagatacctttaggatttgtgcacagactcacattaaaggaaaagagtatactacagcctttaaaaataattacagtgattatttaaattttatcattctggacgttgcaccaaaaaaaatatttacagaagcagatgtagacatagaaccgctggtaaatcctagaatagaaaaagatgtagaaacatcaggtgatgtcttgacgaaatattatctaaggtttaacggtaataatagaacgataactaagagtgtagagtatgaagaaaataaatcttttcattattttcaaaaaggtcattatcagattattagcacatcgactgataaatatattaaaaaaattccattaaagcctcattattacactaaggaattccattttaaaccagatactttaattccggtcacatcagcaaatgatgaggatggggtatgtttctggagctatagtatagaatatggaaaagcgtttacatccagtaggaaagatgaagaaatgaattgtattatatatgatcaatatggtaatgatcttcaagtatcaattaaagcagatgaaaataataaattaaagttttattttgggtcataa

SEQ ID NO: 302028 - DNA, 1023 bp, Proteus mirabilis
atgcaactatttaatgacgacgcactatctgtattaaaaacactacctgataacagtattgatttaatcgccacggatccaccgtatttcagagtgaagtcgtgcgcatgggataatcagtgggataatgttgagtcgtatctgtcttggcttgatgaggtattagctgaattctggcgggtattaaaacccaatggcagtttgtatttattctgtggttctaaattggcgtcagatactgaattgcttgttcgcgggcgatttaatgtattaagtcatattatctgggctaaaccatctgggccatggaaaaaacaaaataaggaaagcctgcgcaccttttttccttcaacagaacgaatactttttgctgaacattatcaaaaaccagtcacagctaaaggttctgagttttcgttaaaatgtaaagagctaaagcaagatgtatttaagccattgattgattattttagaaatgctcgtttagcactgcaggtgagtgcaaaagaaatagaccaagcaacaggtaagcaaatgtgcagtcattggttcagcaatagtcagtggcaattacctagcgaggaagactataaaaagttacaaacactgtttacacacattgctgataaacacgaaaaactatcaccgttatcccgccagtttaccgagttagagcgtgagcaagttacattacaaaaagactaccaagaattaataaaagaatatgggttattaaggcgaccattctttgtaactgcagatgtgccttacactgatgtgtgggcttatccacctgttcagtattatcccggtaaacacccttgcgagaaaccatcagccatgatggaacacattattcgctcaagtagtcgcgaaggggatctagttgctgatttctttatgggatcgggtgcaacactgaaagcagcactaaaacttaatcgaaaggttttaggtgtggagcttgagagagagcgatttgaacataccgaacaagaaataaaagcgctaacttgtaagtaa

SEQ ID NO: 302029 - DNA, 195 bp, Proteus mirabilis; identical to SEQ ID NO: 298769

SEQ ID NO: 302030 - DNA, 126 bp, Proteus mirabilis; identical to SEQ ID NO: 301969

SEQ ID NO: 302031 - DNA, 1746 bp, Proteus mirabilis
atgttttataaaaaattgccatcattaaatcttctagttatctctatttcatttgcttttatgcataatagtgcagtagccaataacgttattgtagatgcaggaaaatctgcaaacacaacagtgagcaagaatggagatggttcagaaactatttatatagataaagcaaacgacattcatttatcagttaactattttgaacaatttaatgttggaaaaaaaggtgttaatattgataatagcgaggtaaaagcaaaagttattcttaacgaagtgacttcaaaaaaaacgagttcattaaagggtaaaatctctgttttaggacaaaatgcagaattgattatcgccaatccaaatgggattgattgctacgggtgtcaattttcaggttcagataaggtaatgttaatttcagggaagttagatagtattacaggaaaaaaaatttatttatcagatggttatgttaatctaaagaatgttaataatttcaatgaagaacaaacaatcaatgttttttctaatcgtattaatatattgggtaaaaataaaatcccagtttttaatgtgatcaatggctatgaaacggttagttttgttgataatgattggaaaggtgaccaaggaaaagagctatctaaagataaccaagaaggtctctctattttagaaaatagttcattaaaaacagatcttttctctctacaaggtggcatttttaatcttgatggggatctaatcactaaaaaaatcaatatcattcgtaataaagaaattaatgctaatgaaaaatcagtattcggaattattaataaaaaaaatgaatttagagcatataatgaattagatctaatgttcatgttagcatctatgaagttaggttttattgataaagatgcaaaaaaatcagctgaaatagcattagaattagaattagaggcattagaattagaggtattagaagaaaaaataatggagttagaacttgataatatatataaagataaaataaatgaattaagagaactagctactgaagctaggagagttgctgatcaacagcaagcagaatataacaagatccagagtgctgttcttaaaatcgatgaagctaaacaagcagaaaaaacaaagttggagactgagggtaaagaaataggatcagcacttcaatatatagaaagtgacaatattaactttaaaggtaaactagctattataaatagcgaagttttgtttaatgcgaaaaatattaatattgatattgataaaaaaatttcttatgccagaaattctggtgtctcatttaatgcccatcaagataataactactcgggtagatttggtctgagaaatagcagtatcagatttttaggttatcgaaatatcccaatggtagatggtaacgacgataatagtttatataaaaataagcttaataatattaatttaaataaactatctatatttggttttggtcaggtttttgcacatggagatagcataaatataacagatgttaaatttaaagaaaagcttttagatgatggattaagcaaaacttatatagatttgatagctgataatgaaattaatattaaaggtcagtttaaaacttctttaattaataaatatagcttatttaagttcgctagcaagataacggagaatgataaggttattttcgatattaatcctgtctcttatacacatctgacgctgccgacgagcgatctagtgtag

SEQ ID NO: 302032 - DNA, 681 bp, Proteus mirabilis
gtggtaggagataaacccggtttttatgtcaatcgaattctcgccccttatattagtgaagccttaacctgtttggttgaaggggaaacgatagagaatattgacaaagcattagttcaatttggctttccagtcggccccattcaacttttagatgaagtgggaattgatattggtactaaaataacgcctattttagtcaatgagtttggtgagcgttttgcatctcctcctgcggtggatgcgattattgcggatgacagaaaagggcgtaaaaacggtcgtggtttttatctctataatcagcatgccttacctttctctttaggaaaaaataaaaagcgtgcagatccgatgatttatcgcttattacaggttaaacctaaaaatcagttatcggcttcagaaataactgaacgttgtttattgcttatgcttaatgaagctgttcgttgtttagatgaaaacattattcaacaacctagggatggtgatattggtgctgttttcggtattggttttcctcccttctttggtggaccattccggtatatagatagtatgggaacaacaaaaatagtcgataagcttaatcaattaactgaaaaatacggtgaaaagttccagccatgtgagcgattagcggcaatggccaagttaaatgaacgattctatagctaa

SEQ ID NO: 302033 - DNA, 942 bp, Proteus mirabilis
atgaatattattttttatcatcctttttttgatgcaaatacatggataagtggaatgaaagcacgacttcctgacgcgcatattcgtgtttgggagcatggtgatgataagcctgctgattatgcaatggtctggcttcctccctatgaaatgttagcaagccgtaaccaattaaaaggtatttttgcacttggtgcgggtgttgatgccattttaaagcaagagcaacaaaaaccaggcacattacccgctggggttccggtaatgcgcttagaagacacgggtatgggtttgcaaatgcaagagtatgccattgctaaagtgatgtattattttcgccgtatggatgattataaacgtcaacaatcacaacgcttatggaaacaactccccgcacatacttatgataattttgttattggtgttttgggtgctggtgcattaggcgcgagtgtagcgactaagcttgctgaacttggttttaacgtgcgttgctggagtcgtagtaaaaagcaaattaatcaggtagagagtttttatggtaacgatcaactgagcgattttgttaaagagtgtcagttgttaatcaatctattaccttatacaccacaaactcatggtattttaaatttctcgctttttgaacagcttaaaccttcttcttatttaattaatttggcaaggggggcacatcttgttgatcaagatctgctagaagctatcgatcaaggttatattgctgatgcctctttagatgtatttagccaagagccattaccgggtatgcatccgttttggactcatcctcgtatctctattacaccgcatattgctgcttttactattccagatattgcaatggatacaattgttgaaaatattcaacgtattgaaaagggcgaaacaccttttggtgttgtggatatgaaaagtggctattaa

SEQ ID NO: 302034 - DNA, 348 bp, Proteus mirabilis
atggtagctgcatatgatattaaaacaggaactattatagtaagaggaagtgttggttctgacattaaaatagaaatgcttcataaagatactgtggttctactaaaaaataaattaggtgatgttaaagttggaacaaaaacagtacattgtgataatattgtaggaggatgcggtgaagtattagccgcagatcagctgattcgaaaaggggtcaaacctcaagatatcagaatttctcaggcatatcgccccagaaaagcttacggatatgatttatctactatgccagaagaagcatttgttgatacatgtaaaaattgtattaaagtttttttagatgaatag

SEQ ID NO: 302035 - DNA, 582 bp, Proteus mirabilis
atgaaatatcatccctttagtaatggcatggttaaggcaattaatgaaggatattatttggttgttgcctctcgtttagatcttaaatcaggtgttgtaagagcacataccggtgtgggtaatatcattattgcaggtgaaatttaccaaggtgttggtcagtttggtgcaattgagtctgtgggggaaaatatgaccacaagcccacaacagcttattatgaaactctcaggttttgattcttcattaattggtgaagttatgaatgagcgagttcgaggtcgaaatgcacagttgatgttagttgcattaaatgaagagggaaaacctacacttgctgaggttttatttgctggccaaatatccacaattggcgtgacaacaggtgaagagaatgaaatagcggtgactgtttctaatcgatttgaacgctggtcttatgggttacctgacagatttactgatgaatcatggtctaaacgtaaaaagggagataggatatttcgttatgtggcgcagatggctgatcgggctatttattggggtagcaagaaaaatgcacctgcgtttatttataaataa

SEQ ID NO: 302036 - DNA, 144 bp, Proteus mirabilis
atggctcttactgatgctaaagtcagggctgccaagcctttggataaatcgtataaattaacagacggtgatggtatgcacttgatggtacataccaacggatcaaaatattggcgtttacagtatcgctttggcggtaagtaa

SEQ ID NO: 302037 - DNA, 204 bp, Proteus mirabilis
atgttagcgctgggtgtttaccctgatatttcactcgcagaagccagagagaaaagagatgccgctagaaagttaattgctaacggatttgatccaagcgaaaaacgcaaagaagtgaaagaagagcaacaaaaggaatttaatacattcgagaaagttgctcgcgattggcacgcgaccaataaggcgcggttttttaactaa

SEQ ID NO: 302038 - DNA, 519 bp, Proteus mirabilis
atgtctgatgaaaaacaggctaacccactttttcgagatgcaatggcaagcttaggtgctgccgttaatattgtcgcaactaatggtgatgcaggatgctgtggtttaacagcaacagcagtatgttcagttaccgatactccaccgacagtgatgatttgcatcaatagtaaaagccaaatgaatagtacgtttcaagaaaatggcaaattaagtatcaatattttaaatcatgaacaagaagagatggcttgccattttgccggtatgacaggtctggcaatggctgatcgctttacccaaccaggatggcaatatggcgcattgcagcaaccgatattaaccaatgcactcgctagcctagaaggtgatatttacgatgtacgccaagtaggtactcactttgtttatatggctgagataaaaaatattgcggttcgagaagatggcgatggcttaatttattttaagcgtcgcttccatcccgttaaacataaattagtcacaaccaccgcttaa

SEQ ID NO: 302039 - DNA, 687 bp, Proteus mirabilis
atgaaaaaattgctatttagtcttgctacgctgattgtaatgtcaacaccagcattagctactccaccaggcgctaacttaaaaataaacggtgatattactccccctacttgcaccgttaatgctggtgataatgatattattattgattatggtgtaatatccccctcttttattcctgctgaggaaaattacgcactaggagctaagagtgccaatatcaaaatatcctgtgatgcaagcaattatttaacacttaaggtatcagatacttataaaacaagttcaacagattcagcgaaaattagcgtttttggattagttaatgcaaaaaatacagaacaagagattggtggatatataattgatgtcattgatatcaaagttgataataaacgagcttatttaggaagagtggcagataagatttggactggatcgtccgcaactatttttaaagataccttaacagcgttaactagtgaacctcaagcccaggttgataaaaacaatttaaaacttatagctggaaaagtgtttaatgcaaaaatacaaataggaacttataacgaaagtaggtatgcgtatattttatcaagaaaaaaattggcacaaaacaatatcgatttaactgatggaattgattatataggtgaagctgtttttacttttaactttggtgtctaa

SEQ ID NO: 302040 - DNA, 297 bp, Proteus mirabilis
atggaagatagaattctattctcatttcaaacagggctcttagtttttgcaacgcctctaatactctatttctcatattatagttttattttaggataccaaaaaaagttacaaaaaatgaataataaagtagctggtatatgcacaggaatagcaatagttggtatcgtttttagctttttcttttcaatttatgtcggtctcgatttaacctctaaaggctattatcgttgttataagtcatctgcttttgcaccaaatgaatatgttattgcaaaagagatgtgtaaaaaatag

SEQ ID NO: 302041 - DNA, 276 bp, Proteus mirabilis
gtgtataagagacagtcattatctcgtgcagttaaaaatatcccagtaggcttagcttatgccacctggtccggaactggtatcttagttgtatctactttaggtatggcattttatggtcaacatcctgatacggctgctattattggtatggcagttattgccagcgggatcgtcattatgaatctgttttcgaaaatgggttccgaagaagagttagaagaaacgacggagttaccgaatataaaacagactgcatcgtcagtgaataaataa

SEQ ID NO: 302042 - DNA, 561 bp, Proteus mirabilis
atgctaatgttagttgcaaaatatttagaacatatgggggatgttggaagaagtcgcaattttattagtaatttaatggcagcattatcaataataaataataaaaattatgatgaatataatttaagacaattaagtcaggaacttgtgtcgtgtcttaatgaattaagtaaaaatcatcatgaaatttctaacaccgtaggaagcgtaaataatgataaacgttcattagattatgttattaataagcttactaataaaaagcttaattcaggtagttgttatctgcaattatatacatcagatcacgttattaccgtttgggctaatttagataaaaataatgataattttggtctttacgatcctaattttggtatggttgagttttcatctaaaagaaaattcatatcttatcttaatcgtttttttaaatctaatgaaatcaatgctggactgctatatggtttagaaaaaaatagtaaaaataattttattttcaaaaaaattagtgacattaatgtctgtctcttatacacatctccgagcccacgagactag

SEQ ID NO: 302043 - DNA, 399 bp, Proteus mirabilis
atgagacaccctcaatggactactcgcctacctgaaaccttgaaaaatgccattaatcgccctttcgtatggggtgaacatgattgttgtttgtttgcttctgactgtgtcatagccgtttgtaatttcgatccctgcgaacgtattcgtgggcgttataaaacaaaaactggcgcattcagagtgttacaaaaagagtttggaacattggacggagccgtgagccgtttttttgatgaaattccaacaaatgaagctggtcgtggtgacattgtgatgttcgagggtgacgaaggggaaacgttaggggtgttatgggcgggtaaattatgggctgtctcaacagatggcgttcgtgtggtgagcaataaaccaataaaagcatggagagtacaataa

SEQ ID NO: 302044 - DNA, 621 bp, Proteus mirabilis
atggatggtgactatgcaaaccctaaaaatattaaatgtgttggtggatatgcttattatgttggtacttcgcgcgaaatttataaacgcgtggatattgggaaatggcagagaattcaacatgggataccaggaggagaaaccaatacagatatggggttcactgatctcgatggtttttctgagcaggatatgtatgccgttggcggtgaaggcgatgtttggcattataatggcgaaatctggatcccctgtggtttttcctctaatgagcaattaagtgcagttttatgcgcccctgatggttatgtgtatattggcggtgaagggggcagtttatggtgtgggcgtgaatatcaatgggaaaaactttatcacggcagttcgactattttactgaatcagttacgctggtttgaagataaagtatgggcatgtgatgactatcgcttacagtgttggaatggtaaagaaatggtccgtcccaaggatggtgataaaaatgttatcgcctcaggtcatatggatgtccgcgatgggattttagttgtagctgatgattataatgttgatctgtatgatggaaccgcttggcataagatagtgagaccttataaataa

SEQ ID NO: 302045 - DNA, 213 bp, Proteus mirabilis
atgtctaatacaatgactggtacagttaaatggtttaacgacgataaaggctttggctttatcacacctaaagatggtagcaaagatgtatttgttcacttttcagcaattcaaagcgatagctttaaatcattgaaagaaggccaagaagtatcattctctattgaaaatggtgcaaaaggtccagcagctgctaatgttatcggtctgtaa

SEQ ID NO: 302046 - DNA, 303 bp, Proteus mirabilis
atgataaaggttattgcagaagattttattaaatcaggatcaatagaaacggtcttaccactttaccaagaattggtgaaagctagccaacaagaagcactttgtattagctatgatttatttgttgatgagaaagatcccggtcactttatttttattgaatcatggccaaataaagaagcactagatattcattgtaatagtgaacattttcgtcgcatcattccgatgattaaacaatatacaaaagcagagtcaaaaatcactttagtcaatagtgtatttgataaaaatatagattaa

SEQ ID NO: 302047 - DNA, 525 bp, Proteus mirabilis
atggttgaaaaaataaatggggagagagttgtattttcacccggtaaagatttagttttaccattaaaaaatatgttagaacaactagatatagctatgagtagttatactgggcagttgttagatattgtgatggaaggattaaatttaagatatttaatagaagttagaaacagtggtattgaaggtgcagaaaattatctaaaatggttaagaaattttgccgatctatataaaactaaacctagtgatcagaatgttggaggattcaaggaaaaaatacaaaaagctatttatgaatataaattgatgcaattaacagaagaaactaaaaatatcatttattttcaggcttatcaacaagaaagaattaatggaataatacatcactataatagttttgatggtcaaattccatataccaaggtattaaaaggtcttggattagaaccagttaataaagaaaataaattcttaaatgaagagttactttttaaaaaaacaagatggaaaaccggtttttga

SEQ ID NO: 302048 - DNA, 342 bp, Proteus mirabilis
atggattgcgttgtcctgttattaacccaacttaaccgtaaattggaagatagggcagataaacggccaactcccgctgatagccgtgatacagggcaaattgagcaagattgtgatgtatggattggtttatatcgtgatgctgtttataacgataatgctgataaatcgctaatggaaattcttctcagattaaatcgtgatggaaatactggtaccgcttatgctcagttggtgaattcttatattaaaaatattagtaagggggaggcggagaagctagcgtttaaaggacaggaaaaaaggaggggctattcacagaaagaaacacaggcgttttaa

SEQ ID NO: 302049 - DNA, 210 bp, Proteus mirabilis
ttggagatcatcgaatcgctatggcgaggaatggaaaaaccgataaaaatcaataaagaaaaaacaatcgttccttctattagcttaggtattgctgaataccctaaggatggcaagacattatctgaactattaaagtcagcagataaacagctttatgcaataaaagagaaaggaggaaataaatacggtttttattcagagtattaa

SEQ ID NO: 302050 - DNA, 213 bp, Proteus mirabilis; identical to SEQ ID NO: 297307

SEQ ID NO: 302051 - DNA, 159 bp, Proteus mirabilis
atgcttcttggattagcaacttatctgatgacacggcgagaacagcgaaaacgaacagcattatttgctgaattggttcatcgaaattgttctagtgatccgcgagaaatcgaaaaaatagtcggtgagatgctgactaaagctaaaaaggacatctaa

SEQ ID NO: 302052 - DNA, 159 bp, Proteus mirabilis
atgcttcttggattagcaacttatctgatgacacggcgagaacaacggaaacgaacagcattatttgctgaattagttcatcgaaattgttctagcgatcctcaagacatagaaaagatagttggtgaaatactgactaaagctaaaaaggacatttga

SEQ ID NO: 302053 - DNA, 180 bp, Proteus mirabilis
atgtctaaaaattattgtctttccccagccactgacatcttagccagatctagattattagccaagcagttagaaaatattggggatgatgcgtttaaactagtacaattgctggcatccgataaaacagctacagtagcagaacaaggtctgtttgcattaaaagatttagctaaatag

SEQ ID NO: 302054 - DNA, 384 bp, Proteus mirabilis
atgcttaatgtcaataaaatgaacataattacacgttcgtcacataaatttttaaacagccaatactgttcctctaaccatatatcttccttctacgatcttcctgacctgctccccaatgaggaattagcaatgtccactctggcgatgagttcaattaatcaatgcaaaacaaaccaccaaattttattgctcacttcactgatcagccatgttaaaatagctgactacttttttagtccacatcacaaaaacatcaaaataaactttaggcccaacaataggcccaaattaaaagttgaattggattttattgatttaaaatcaatgtactacaatcttaattcagactccgccagcccaccaaatttggtgggtcagtga

SEQ ID NO: 302055 - DNA, 615 bp, Proteus mirabilis
atgagaataaacaagttacatttaggagctagaatctcattatttatagtgtcttatttacccctattttttattatgtgctttgttcaaatttataattatagaaactatttacactggaatggatttcatactgaatcagtgttgatctttcttaaatacttcggcacagtgagtgtattgatatcattatctatatttggtgttgttggtttgaaaatatttttaagtaatgtaaagcgtagatgccaaactagcggaagaacagttaaaatactagatatagaaaataaaaataatgagtcaataagttacttgtttacttatataataccctttgtgtttcaagacttatcaataatatctaatgttattcctatcgctattttattaatagtgacaggattaatatatattaattctagtatgatacttataaatcctactataagtatttattatacattatatcagattacttatttggatatagagagcaataaaaaacgaagtggaatgattttaacgaagtctaaatatttagaagaggatgatattttagacattgaagatgttgggcctaaactttattatgctgaactgcaaaaggaatga

SEQ ID NO: 302056 - DNA, 1023 bp, Proteus mirabilis
atgttaaaacttgaagagttattagagtatgctgaacaattaaaaggcagtaagaaagctaagatttctttatattttgtaacaagacatcttaaagcaggtatgaataaaaatgcaaaagtcactgataaatatgacttcaaagtcactaaagcacctatagctcctgatattgctaatttcttcaaacaaacattgtcaaatcaaattatttctcacgcatcaaaagatgatattgaaatgaaaaactatacagtgattgatgatgatattgataataaaatatacacttatgcaatgaataatgctatttcttttgcgaaaataataaatgaggatattaagagtgataaactagatgttctcacatcattaacaaatatacaggatgaattatgggcttactgtattaaagtccaaaaagggtcagagcttacttattcatttcgtaaaataagtaagggtaaggttacaacgaatgaaccacaagacgttgctcaacgtatatttgcattgtttgataaatcggataaagaattaagaacatttgatggtagtgcagtaaactttgacgataaaatagattgtatttatataaaagaacagttttatgttttccataaaaaaagttttgaatctattgttgggttagaagctgaatttacagcagcagcacaaaaaacattaaatactattaaagattttaaccttgttgaaggtctagatattattgaacaggcgattttacataaaccatcattgaggaaaactctagctcatattgcggagaaaggaaatcatactactttagatgagaatggggttaaatcaatcaatggtgttttaaaaatgtttcaaggagaagagtttatttttaatgagaatggaaaaatagtgattgaaaatgagaagcagggacgaaattttctaaaacttctaaatgattactacaaacaaggaatgacaacaaaaaaatattatggtacagatagtggaaatgtagttagtcccgttaagaagtaa

SEQ ID NO: 302057 - DNA, 570 bp, Proteus mirabilis
atggaatatcaattcaaatcatacagtcgggtcaacaagaacaaaacaatgtctatttactggattgttgttccggttgtcatctggatagcattcatgtattggtcactaatattaggctatagaactgttatgtttgaatggtttccaaaatggactatttctattacgtttgctgctattgtaagtgtaattagtggggtttggagcattttacgtcgcccactaaagcatgcatttaaaaactttctctggtctggacttatggctcttgtattcatcgctcctgcgtttgatgtgttggcatatttactaacaaacaaaacaattcactaccaaactgaatatgaaatcacatcaccgggccctagtactagccgatttggtcgatgtgaccacggtatatggataaaggaaacctatactgaacaatggaaattactttgtattagtaatccaaaatcgaaaaccaaagaaaatacagggatggtatgggttacaacaaaaacaggccctatggccgcatacattgttgattaccagttctctacttttaaccctgagcgatga

SEQ ID NO: 302058 - DNA, 1845 bp, Proteus mirabilis
atgaaaaatcacacttttgctaacataatgttaagcgtttatgaaatcttaggactaaactcagaaacagaaactgctttaagcatgaaagatcaacgtaatcttttgagttttgattttcatcagaacttttttggtcgagcagataaaaccgcaaaaagtgatcgtgatgatggaaaaatctataatactcaggatgcgtacaataaaattattaatacgattgacagccaatctatttatagcaaagaagaaagacgcgaatttttctttagatatgaacaattatataacgggcttatttccagaactttaatctctaatttaacaaaagatcaaatcataaaaagatatgttaatgcaataattcctgttattatcgcacttgatatacacaaaacaatgaattcatcaaaaaaaacaaactcatctcatttttacacccatattcatgaatttatcttaagcattcattgccctgaaaatatatacgacccaaaattaatatgccaaggaataaggagctatttaagagagtgtattaagagtctagatttcaaacaaaaagtttatttaaataaaataaatgaaataattaaaaatattagacccggattaaatcaaagatcatttaaaattgagaaagaaatcaatgaatgccaagcactatcaagaaaagacacattgaaatatgatgagcttaaaccagccctgttatctctgaactcactattattattcatgaataaaacagagttacttccattactaataagcagttactttgatataaaaaaaagatatcccagcaagtcagaaaaactattttacttagagctttatatatataacagtcattataatgaaaatttattatatgatttaattgacaatataattggaagtgaaaatataagtttattagaccaagataccaattctgttcctgatgagctttatgatacaatcaatttactcgaagagttgatatttgacgatacacctgcgataagtaaccctaatttcatctacaatctacaccaatgtctaattgataatgaaaaaatcccctcagttgattcttacctaacgttactgaatataattacttccttggctaataacgatattcataacgcgaatgaaatcattaataaagtatcatttgatgaactacctctaggctatttaacatcagctatagccataataaaactttcattgaaaataaaattagaacgagaaaaaataagaaatgggacactaatatcactaataaatcctattttaataagtcaaggtacatatactgaaatgatagcaatttcttctacacctaaaaacatgtcaacttcagcctataatcctttaaataatcctattatcatgaaccctaataacattacgataatgagatcaataatgttatataataaaattatctatcaagtatctaatcatttagaaagagattctaataacatttatccacaggcaatttatggagttcttgataatttagacaatgcattaaaaaaattaagatcatacatatctataaataatgatagcataacgagtgctcaactagctgatgacattcttaataagaatattctaacaaaaaatgaaataacagctaatctaataggaattttaaatgaagcaactctatacaattgtattagctgcctagatatactatataaaaaattaacagcttcaggcgaagttctaggcaatatactattcttcactggcatatccgaaaaaaaccatcgacaaagagagctattacgtcatgcattactaatcgcaagagaaaagatcatgaaaaataagtga

SEQ ID NO: 302059 - DNA, 231 bp, Proteus mirabilis
atgctgaatccaaaagtaaatgtaaatcaatcaaactcatctatacgtatcctgcgaatgactgagttaacggtaatgcttggtatatccagatcaagtatctatgaaaagcttaatcctcgatcgaaatactacgatcaagactttcctaagcctatcaagcttggtgcggcatcggtgggatggcagtacgcatctattgaaaaatggttagtttcacgaattgcttag

SEQ ID NO: 302060 - DNA, 1500 bp, Proteus mirabilis
atgtctaaacaaaaaaaagaactgtgcttcaagctagatgtattaccaaaatactttcaagatttgatcgttgagatccatgctaaaacaggcgcagcagctgaggttatttttcctacaatgttgggcgttatggctcagtcctgtcaggatttgttcgatgtcaaatataaaggtgggataaagcatccagtatctatctttagcatcgtacttgctaggtctggaatgagaaaaacaacagtataccgcttgttgacgaaagagttagggcaaatagataaaaaattagaggaagagtttgatgctgaaaaagccatctatgaacgtgagaatatgatctgggaaagtgctcttagtgtataccagaaaaaataccaaacagccttgaagttaggggacgatgctaatacggctaaaaatgaattggatgaacacatcttaaaaagactagtaaagccagttagaaaacgattaataattaacgatacaacgagtgaagggctcgcaaaggaattaggtttgggatatccagtagtaatgcttatgtcagatgaggcgggggaattatttgagggaagtttatttcgaaaaactccgctgttgaatgctctttggtgtggagaaacaaaaaacgtcactagggcatctagcgacggtttcacaattagagattctcgctttggaatagtgttaatgctacaaccaatgttatttgacaagtatttagatgctaaagggcaaaaaactcgggcgtcaggctttttacctcgctgcttattagttgatttaaataacatttcatctttagcagatatcagtgacctagctcagcctgatgaattagtattcaatgacttctcatccattttagttaaacatttaaaagcaggaattgaacgtagaaaacgaaaggaagagcgtatctgtattacttttgaaccagaagctcaagtaatatgggatgaaaatcaaaaaaagatactaaaagcgatggaaataggaggagaattatactcatatgatgattatgccgcgcggtttatggagcatgcatcaagaatagctgcagtgatgcaaatatttgtaacaccaaattcaacaatagtgactaaggaagtattactgtctgcgttacatattactgagtggtatcttaatcactttattcaaaaagtagattcttttagggaacttagcgatacagaaaaattggtgttatggctagaggaacatttagtgagcaataaatcttatgattttaggcgaaatgatattattaaaaaagggccattttgtcttagacgttcggatcgtttaatacctgctttaaacaagcttgaagataacgatatgattcaacaatttgagtttgaagggaaaagctacatcagatttataggggcaaaaatggaagcaatggagcttgcaaaaagaattaatttacctatagaacaatatgcaggctttggattgagtaagttaaaaagattgatataa

SEQ ID NO: 302061 - DNA, 675 bp, Proteus mirabilis
atgatgccattatatgaattaactaaaactgaattaaataatctgattttagaagctagtaataaatatggctctgagattgatggtgctatcttatgtaaatcgttagcagtgatatatggaagtttaaaaaaacataaccgaatattcgctattcgtacagatctaaggtttgcacaagaccatgttcaagatgaacccgatttacctttatgtttccagcgagtagatgaaaaagcgattactcggtttatagagtcattgaaaagtcagcttcgcgcagaccataaacgttcaggcagagctggcgagccgacactaccagcctacatttgggcaaaggaacgcaaggaaagtgaacattatcactatcatgtagttttgttatttaattgtgatgtatacggccatataggtgactattcacaatacgatgcagataatatggcggtcagaatacaacgtgcgtggtgtagcgccattggcttagattacccagactatgcatcacgagttaactttcctgataaacccatatttcgatttgatagacgagatgctcagagtcgcaattccaattacctttatttcttattacgaataacgtacttggctaaagtgtataccaaggaattcaatactggctatagaaattttggaacaagtcagatttga

SEQ ID NO: 302062 - DNA, 687 bp, Proteus mirabilis
gtgcataaacttgatagaactataacaacaccgcctgacagcttaagtaactacgactatcaaacacaaacttggaaagatttggattccgattgcaaaaaagctttacgagccgcacttgttaaaatgcaaggtatacccgaagtaactactcctgatgctgatgaatacggcctacgatgtgcttactgtgaatgtgctatatacgatgccggtcatattgagcatttcagaagaaaaaatcggtctcattttcccgagctgacttttgtatgggataatctattcttggcatgtggctctcaatcgaattgtgggcattacaaagatcgcaacgctggagcaccttataaccccgatcatcttattaaacctgacactcaagatccagaacagtatctatattttcactcaacgggtcaggtacggcctcagcaaggattgagtgaaaatgataaacactgtgctgaagaaactattcgtgtattcggactcaatagtagtcacctttcaggtgctcgtaggtcatctttaattatctataagaacaaaatcctcgaagaactaaacgagatttcggagtggtcagaaactgacagggtagattatttaatggaagagatcgaagctactagatgggaaccttactccacaacaattaaacatttcctccagaaaatacgctaa

SEQ ID NO: 302063 - DNA, 1329 bp, Proteus mirabilis
atgaaactgtcacgcattacattgcaaaactatcgacgttttgaaaagttcgagattgatttacaccctgaacttaccgtgattgcggcgcgtaatggccaaggaaaaacgactattttagaagctattgctgcagcactagggccttttgtgggagcttttgatttcggtcgttctgaacatatacaccgtacagatgcacgttactctatgttagatagttatgaaaacgaacaaaacttccccgttaccatagattctgagatgaccgagcctgtaatccaatggcaacgagcattaaaaagtgctaagggccgtactactacgaaagaagctgccccactgtctgattggggaaaattgctgcaggagaagctacgtaaaaacttagatgttgctctacctgtattgcgttattacagctccaagcgtttgtgggttagtcataaaaacactgcccgcaaagcgatactaactgaaagccgcactgcaggatatgaagattgcttatcttctctttctagttatgctcaactacaggattgggttaaaaaagcgacgaatgcaatccaacaacaacgagaattgccgggctatgagaaatctaatttagaagccagactaaatggtataaagaaggccgttgatactgtgatgggcgaggaaggctggagccactttcaccatagctacatatatgatgagttagcaatgtaccatccagaccacggagcgttaccaataagcctactcagtgacggggttcgtgccatgatctcattagcagcggatctagccttacgctgcgctcgcctcaacggtttcctaggtgagcgtgctccccttgaaagttcgggtattgtcctgattgatgaggttgatctacacctacatcccgcatggcagcaaaaggtagtgcaagctttacgcaaggcatttcccaaactgcaatttattattagtagtcacagtccccaagtgttatcaactattaaaagtgataatattcgtgtggttttcagaaataatgatgggcattggctggcagagccacctgttcaagaaattctaggtcgtgaaagcgcaattgcccttaactatgtaatgggtgttaatcctatccctccagttgaagaagcaaaacttattgcggcttatactacaattattgaaaatgggaacgatgatagtagcgaaggcctcgcattgcgcagacaattagtaaatatttatggtgaaaagcatcccgtattgttagatgccgataaactaattcgttttcaaaaatttaaattgcgcaagtcctttaaagatggggaacagaactag

SEQ ID NO: 302064 - DNA, 1182 bp, Proteus mirabilis
atgggctcgcaaaaacaagcagaatactcattaccaagaggagtaactgttcgtaataataaaaccaaacaaactattgtcatcacgtttacctataaaggggttctctgtagagagcccttatctagattaacagtcgataataagaacataaaatatgctgaaagactgcttgctgagattcaaaataatattgaaagatctacttttaattatgctaagtatttccctgaatctaaaaaactcccattatttggggttaataataaaataaaaaccattattgattatttagatgagtatctcgttatatgtgagacaagaaatttatcgccatcaactattggtgggtataaaaaatgcaagagcgccttatctgacctacataaattacaagtaacatcattaacacctgcgatcgtgaaaaattggatacaaaaacaatctacatcattaaaaacgatacgaaatcagctttcatttttacggagtgcaatagatgaagcaattactgatggagcaatatctgttaaccctgttagtttagtttcagcttctcggtatcaatcaaaaggtggtaccacagaaagcagttatattgttgatccactatcaccaaaagaagtgtctgctctacttcttgtcgctaaatatgagcaatggaaaaacttatttaggttcgctatcaatacgggattacgaagctctgaactatgcgccttaaagtggagtgatatagatttcattgagcgcacagcccacgttcaatcagcaagtgttgtaggcgttatcaaagaaacaaaaactaaagctggaacaaggaaggttgagctaaacgatgaggccatgaaagcgcttaatgaacaaaaacaatttacgtttatgaaagatggcgtcatttttgaagatcctaaaactaatcaagcttgggctagtgctgatgcaattagaaaaaaagcatgggtaccaacattaaagaaagctggcataaggtatagaaacccctaccaaacaagacatacgttcgccactcgaaatattagccaaggagttaatctattttggctcgcagggcaaatggggcataaaggcccagaaatgctatttagacattatggatcttatctaaaagaatatgacggtaatacaacaaaacaaggaaaatcgattagctctaaatag

SEQ ID NO: 302065 - DNA, 210 bp, Proteus mirabilis
atgctatatgaatgtttacccatttcggcgtattgcaatttatatggagaaacacctgaagccattaacaaacgcttacaaagacaattttggattgaaggtgtgcatgtcttaaaagtggaaggctcaaaagaacgatggatcgatattgcagaggtgaataaatgggctcgcaaaaacaagcagaatactcattaccaagaggagtaa

SEQ ID NO: 302066 - DNA, 324 bp, Proteus mirabilis
atgactacgactgatcctgttttaattaaattaatttcagacaacatggctgatcccagtgatataactgatgccgtctggaaagctggttatcgtaaaacagattttaccactgagcagatcattgatattgcggtaaacatgacaggtgattctatccttttaaaattacctcatgacaccctgcctaagactttagatgacatcagtaaatatcatttaaacgatatcattttcgatgcttattgggataacccgcctgcagttattgcgcgggatattatggagaacgggtataggaagggaggtgatgatgctatatga

SEQ ID NO: 302067 - DNA, 399 bp, Proteus mirabilis
atgctgaagtttgataaagataaccgcttaattttagatgaactaaaaacacttgaagactatctgcgggctttggcttattgcaactcttctattatgcgtatcgatgcggagcttgacagaaaggaagatagataccccgaatgggctactcgcgcaaaaacagcccgtaaatacttgaactggcaacgtcgatatatttgcgatcaactggctattttaaagcgccaacgtaaagaggtcgattattcacgccgaatactcagaaatgaaattttagttgctgaacttaaaaagctcattactcacgaagagtttatgcaacttgttaataaagccgaaacagaagctagcgcgcaattagtctctgtcttggaggtagatcatgactacgactga

SEQ ID NO: 302068 - DNA, 252 bp, Proteus mirabilis
gtgattgagaagaataacactgagcatgaagttaacgaatatgatgatccgcttattaaggtaattcatcattttgatgacgggtgctgttatatcgagccttatcttcatgacttaaattttaggcgatttatccatgacggggtatataagccccgccctaaccctaaacaagttactgagccaaagttaataccgaacattaaaaagaaaaaacgtaaatcgaaaggagctcgccatgctgaagtttga

SEQ ID NO: 302069 - DNA, 228 bp, Proteus mirabilis
atgaaaattgaatatatctccagtggaacaggaagcatggcaaaggtagttattttttcctttatcactgaacgaagaaaaataaatcggttaattgatcgggcattgctttttacccccgttcacgaaagcactatcgggttcttttttcgtgtcaccactctttatggcaaaccgagtcacgtattacgggcttacaagattatttgcaaggaggcaaaccagtga

SEQ ID NO: 302070 - DNA, 534 bp, Proteus mirabilis
atgattattcaaacacatttacttcgtgctgctttagtttgtgtggctaaacatgatcctcgttactacctgcaaggtattcatatcagcaataagtacattgaagcgactaacggacatgttgctgtgcgtatggaacatggcataaaaacacgccgtaacgaaatacttgaattcagaggctctattcctgcaaaggcaaacacaacagaaattaaatttactgaagaaccttttgctattcatcgcgacaaaaacggtcatcgcgtggggttctctgcacttgtttcacataaaggtgcgcgctttcctaatttagatctcgtcatcccgacagaatatgaactttgtttacctcatatgcaggctatctaccttacttatcctgaaaagatgtttagtactagtcgcggatgtcatcctgtctcatttcatccatcaggaatgaccaagccttgcctattaaaatttagtgacgtgataaacgaaaaatacggcaatccgcaattcgttgttatgccatgcagaacttga

SEQ ID NO: 302071 - DNA, 753 bp, Proteus mirabilis
atgaataacttaatcactattaacaacacccaaatgcctattgctgaatataaaggtcagcgcattgttactttctcaatgattgaccttgtacatggtcgaccagacggtaccgctcgcgctgcttttaatcgcaatcgtaaccactttattgaaggtatcgatttcaatgaagtaggttcggacgtaatacgtacggacctacctgaagggatattttctaaatttgctcctagcggcatcgtactgtttgagtctggttatctcatgttaaccaagccattcaatgatgatgttgcatggcaagtacagcgcgaactggttaataattactttcgtcccccccaaaccgctattagcgaattagaaatgattgccaaaatcgccagtcatacagctcagcaacaacgtcaaataaatcgtattgatgagaaggttgaacagatgcatgagactgtcgaacaaattaagcaaggcactattcctgcaggttggattggttactcattagcgaaaaccaaatctggtatgacgattgataaatgcaagacgcttgccaagcaatacagtgtccgaaaagaccaaataaccgttcttaccccagaaggcatgcctaggcctatggctatcattcatgaggctgacttcatggtagcaatgaaacatatgatgggcgaagcagaaaaacgcggtactcgttggtatcacccgaaaatgggactatttcaggcaattggctgggaggataaataa

SEQ ID NO: 302072 - DNA, 486 bp, Proteus mirabilis
atgaaacatgaaaatatggcggtaactcaactaatagaaattctaaaagaaaaaataccagattgtccggcttggatgcttgatgaatctcgtatgaattatgaagcactaacacatcaggaactaatggagttcgctgaatgcgcggttaagcgccagcgttatattcaagccacaaagtaccttatttactgcaaggatcgatttggctttgctccccatgggaattatcagttttcttataaaaactttggagcctacttggatattgaagtgattgaaaccttactaattcatcaaattgagcgacctttattagaggaaaatccagaggaaaaatatattgccgtatggcgtttttatacaaataacgaaactagagaaactgaaaccggtattacatggctatttgacttcatagatgacgtgtttattaaaggctttcaatttttaaatacacctttatcaaataactcagttcactag

SEQ ID NO: 302073 - DNA, 207 bp, Proteus mirabilis
atgacgttttctgaattaatgaaaaaaggtaaggagttagagaataaaggattttatagacgcgcaatagagcaatataacaaagcttttattgttgcagaaccaccaaccaaaggcgcaatgagttatcaacaaaaaataaataatcaatcatctaagcgttgcttaggtaaagcaaaaattaaagtgacggaaagttatttatga

SEQ ID NO: 302074 - DNA, 300 bp, Proteus mirabilis
atgaatattgatgaattaattactcttcctgatttaagtaaattaacagaaggtgaactaggtaacttaagaggtaatttagatttagctattgattctctcattacaggaatgaaattattcggtgattttatgttttggactgatgctaatgaaaattatcccaaagataaagattattttggtgacgtgggattgtttataagccaagtatcattattagtatcaatattaaatgacagacttggtggaattgaatacgaaatatcaaatagaaaaataaaaggaacaaaaaaatga

SEQ ID NO: 302075 - DNA, 180 bp, Proteus mirabilis
atgatcatgacaaaagaaattaagtctgatttaggtaaatacgaagatacattacatagagtgaaatcatttctagaaacggcacaatttctctctcgtaatgaggaagaacgagcaattcaacttagtttgttatcacaagcagaagatgaaattagagaggctctaggttatgaataa

SEQ ID NO: 302076 - DNA, 207 bp, Proteus mirabilis
atggctcacgaactcaacttagaagctgttgcaaaaaaaagtgaccaactaaacgcccttttattccagctcaatgctgaacgcatatcgggtcagcctgaaatagaaagtttaattggactggcttacgaattatcaggcgatatctcagtctggttaatcgaagaaaatgcacagagagataatgatcatgacaaaagaaattaa

SEQ ID NO: 302077 - DNA, 465 bp, Proteus mirabilis
atgaacaattttttaggtttcccattaaacccttatgacgccttgaataacatagaaatcatgttggaagcaggacttctattatccagtactacaaatgatgagataagcgagatggggattgccataattgatcttgcaaaacaatattcggctaaggcttctttaggatttgcaaacaaaacaaatgaagtaaccaaaattgataagtccgagatatcacaccaaaactcattctccgcacgtctgcgcttggctcttacgtactcagggatgactcaggttgaattagcaaaaaaaataggcgtatcgcaaagcacaattagtcaggtgataaacggaaaggtatcaggggtgtgtcgcactaacgtaatagccaaagcattaggtattgatcgtaactggttggcttacggagaaggtaaaatgacaaatttttgcacctcaaaaacagaggagttataa

SEQ ID NO: 302078 - DNA, 534 bp, Proteus mirabilis
atgttaaaagtgataaggctaatttttaagagatggattacatgggtaatcatgatgctaatattattagtgtcaggcatgtcttactttttagcggaaaatataacttataataatgtcactaacatcatgtcggttctgcaaaatgtatcttcaataatttttgctatagtgggagtttgggttgggtacttgtatcccaaactgataacggaaattattaacaacagagaaaatgatttttttgatagtaaaacggaaaccaaaaaaatggagagcctaatcactacaattgccttgtcagctattgttttgattggtgttttagtgttttacttattggttctttttatcaaaggaagcagtttttacattgataactttaattttttcaaaatgttaggcgtaatgtatacatttattttagtttgtatacagatttattgtatttttagtgtgattttaagtaacgtttcctttgtgaataaactttacaaactgcttaatgataaaaaaatggatagtaggctttaa

SEQ ID NO: 302079 - DNA, 1149 bp, Proteus mirabilis
atgtcagaagaacttggaagattaacatactttgatgttgagaagatggggatatatggctgtaatggaggagatattgatcctcgatacacaccgaactactttctttctgagcttatttcatgggttaacgctaatcgatttgaaaacaccctaccaacaaaagatgatactcgattgaggaaaaaaatttattgtaggaatgcctataaatgccccactacaggtgattatttctttgtcttatggaagtccgaggaagatggcaatggcaacatactgggagttgacgttaatagcccagttgatagtgattcagataccgtagccttactaacttctgacggcaaagagggcaaaaagtatatctggggtaagccttgttattattggtacattacgagtttaaataaatttgttgccatcaaatttcctcattcaagtacagacacatacctgtttacatcgtatattaaagattttgttaattatagaatgagcttctctggtaagaaaatatcaaaaaacaaaagagagagcgttggtgggaaagactttatctttgatcgggttactttttcttctgatgacggcaagtttcgaacacagtttttatttgattataagatgttcatgaaaaaagcaaatagggaaacattgcagcggattagggggaatattactcatattgtgtatcgcaatacgataagtacatctgagcgtgatgaaagatcgttttttactaagttatttgatggtttttcaatgacaaaggaagacaagccagccacaacaaaagaaaaaagaattgaacttttaattgaagaaaccccaactcaagctgagctgaatagtattttagagttttatgatgatggattcccaataaagtcatcatgggataatattggatttaaggagggaggtaagcaaagtgaaacaaagtggtttaatgaatatgtgctaagagattcatttactatatcctattcagctgctagtaaaaaacatatatctgctgtctcgctagctaatgaaataagtaagcatagggatagatttatcgctggattaattgaagaccaagattcatcagatgctgctaacgatgatagtgggcgtgcaagaacaagcgcgggagtgggttaa

SEQ ID NO: 302080 - DNA, 699 bp, Proteus mirabilis
atgagcttttcagataggctaaatgttgcaatgaaaaatgcaggatacacacagggcgcgttagccaaggctgtaggtatggcccagtcgagcataaatcaattactcaacaaagcgtctggatctagaaagacagttgagatagcaaaggtattaggagtgagtgccgaatggttagcttctggagaggggcctatgatttctagcgagcagtattctgtagagcagttaactaatacttatgaacataaccatgtaaccaaagattcatatactgttgatttaatggatctagcatatagttgtggaccagggagctacaactccgatttcccagatataatacgctctatatctttagaaccagaattcgcattaagcacttttggaggaaggccttcatcatcagtaaaagcaataaatgcgcaaggtgatagtatgctaggaaccatagatcctgaagatttagtttttattgatatcacagtaaaaaagttcgagggagacggcgtgtatgcattcacttttggaaattcttcacacattaaaagactccaaaaaataaaaaaccaccttgttgtattatcagacaatcctgcttacaaggaatggcaaatagacgaaacagaagaagatcaactttttattgacgggaaggtaatagttagctggccaatgaaattgcgacgtttcgcataa

SEQ ID NO: 302081 - DNA, 258 bp, Proteus mirabilis
atgaaaaataaagcaatagagaaagcgatctcaatcgttggtagtcaacaactcttggcgaagagatgtggacgttctcagcctacggtttgtgattggttgtatggaaaaaacaaggtaccagttgagtgcgtcctaagaattgtttttgcaacagatggcgcagtaaaagcttacgaaatccgtcctgatttacctgacttatttccgcatcctgaaggtaactctcatgcaccaaatcaacatgccgatgcctga

SEQ ID NO: 302082 - DNA, 213 bp, Proteus mirabilis
atgtctaatacaatgactggttcagtaaaatggtttaacgatgataaaggttttggtttcatcacccctaaagatggaagtaaagatgtatttgtacattactctgcaatccaaagtgatgacttcaaatctctgatggaaggccaagaagtttcatttaccattgaaaatggtatgaaaggcccagcagcaggcaacgtggtggctctctaa

SEQ ID NO: 302083 - DNA, 270 bp, Proteus mirabilis
atgcgtatggataaattaaccaatgtaacctatggaacagcaggcctaacggccttttttgccagtctctctttatatgaatggggatttgttatcgggatggcgttcagcatggttctgggtttagccacttattttatgacacgccgagagcaacgaaaacgcactcaattatttgaagagcttgttcgtcatgttgacccacaaaacccaactgaaaccctaaaaagacttgctgaattaatggtgaaagcgccaaaggatatttaa

SEQ ID NO: 302084 - DNA, 471 bp, Proteus mirabilis
atgtctctcaaacagaaaatagcggcgctaacaactgcgggagccacagcaatcgcgttagtagtaatagcccattttgaaggtgtgcgttatgaaccttatcgtgatgtggcaggtgttttgacggtttgttatgggcatacaggaaacgacatcattcaaggtaagacatacacacaacaagagtgtgacgagttactgcagaaagactttatcagaacgcaacagcaagttgacatcctggttaaagtgccggtcgatgataaaacaaaagcttctctatattcctttgcttttaatgtgggtaccacagcttttgcacgttctacattgctaaagaaattaaatgcaggtgatcagaatggcgcttgtgaagaaatgaaacgctgggtttatgctggtggaaaggtgtggcgagggcttgtcagtcgtcgagaagcggagtcagcactatgtcatggaaacctttaa

SEQ ID NO: 302085 - DNA, 159 bp, Proteus mirabilis
atgtcatggaaacctttaatcatcattatcagctttatccttgcattactcattacagtcgctggtggaatttatctcttgattgataacacatgtactaaagaccaagtgagtttagaaaaacgctgtcagattgctctctcacatcatcggtactaa

SEQ ID NO: 302086 - DNA, 462 bp, Proteus mirabilis
atgaagtattggaaattttacattgtcgttgtgatagtgggtattgttgctggtggttgtgcgctgattaatgcacaagcgaaaagaattaacacgctgacagaaaacaacaaagaactgactaccgcactcgaagagcagaaggatatcaatactgactatcaagtacgcatagagcgactaaatcaacttgatacaaggcgcacacaggagcttgttaatgcaaagaatgaaattagtcgcttgcgtgacattagcgagcgtaatccagagcgggtgtacatcaaagccgagtgtcccaaagtcaaaaccactccctccaccagcttggcttatgcaaccaccgcccgacctactgacaccgctatccgaaattattggttactcagagagcgaattgcagagtcagaacagatgattaaagggttgcaggattatatcaaacaagaatgcatggaataa

SEQ ID NO: 302087 - DNA, 582 bp, Proteus mirabilis
atgcaatatcatccattttctgacgccatggtcaacgcgattaatgagggggcttatatcgtcttagccgccagactcgatttaaaatcaggcgtgacctgtgcgcataccggtgttgggcaactgattattgcgggggaaacctatttaggtgtaggaagtttaggcgaaatcagtcagctaaaagaaaataagacaaccagtccaccacaattacagcttaaattggccggttttgataaatcgctggtggggatggtgatgaatgagcaaagtcgagggcgagaagtgcggttgatgatggccgccatcggtgaagagggtaaaccgttgcttgctgaaatcttatttgttggacaaatcacatctatcaatgtggtgtctggcgaagaaaatgccgtatgtgttaatgtttctaatcgattcgaacgatggtcaatcgggttacccgatagattcactgatgaatcttggtcgtcaagaaggcaaggggatcgcatctttcgttatgttgctcaaatggctgaacgagcgatttattggggcagcaagaaagatgcacctgcatttatttataagtaa

SEQ ID NO: 302088 - DNA, 399 bp, Proteus mirabilis
atgaaacaacctaactggacactccagttaccagaaaccataagggtggcgatgagccgccctttttcatggggcaaatttgattgttgtatttttgcctctgaatgtattgacgcacaatgcggtttctcgccaataaagccttatctcaatcactataaaaccaaagccgaagccttcaatcttatcaaatctaaatttggctccttagagaaagccgtttcacgctatttcaaatccattgagattgaacgcgttcagcgtggcgacctcgtattgtttaaaggtgaggacggtgacagcttagcggtggtttgggcggggcattattggggcgtaaccccagaaggcgtgaagccagtgcagattaacccaataaaagcgtggagagtggaataa

SEQ ID NO: 302089 - DNA, 4194 bp, Proteus mirabilis
atgggtgggagtggtggattaatttcaaaagtcttgggtgctggcttaatgattgctgggctgtttaatggtggtgttactgcgggaatagggattgctttaatgtcggctggtgtcgcagttcaaatggcaggctcattgatctttaagcctaaactaccctccatgaattatcgagatacaggtgaacgcaaacagatgttacgttcatcgtctgcccctgaaaccgtaatcatcggaaaaatagtgatatcgggtttgcttttcttcgcagaggaagaaactggcgaacaagatgaaaatgaaaaaatcacattggcattggcacttgctggacaccccatagagaaaattgggaagatttggttgggggatgatctcattgagacatttggtgataaagcctcatgggaattacataacgatagggaagatgccgatccctttatgcttaaaaattgctcgtcatggaaagaggatatgattggtcgaggtctagcgtggttacgtgtgacactcacgtttgaccaagaaaaattcccctatggattacccaatgtgaaatgtgaagtctggggaaaacatctgtttgatcctcgcactgggaaaactgcatggagtaataatggggctttagtcattttggattattatcgccattatttaaaagtgcctgatacggatattgattttgacagctttaaacaggcggccgatttatgtgatgaaaaagtgagtctaccagaaggtggatttgagtcgcgatatacccttaatggtgcctatgacttaaatgagagtccatccagtgtcttggaagcaatgcacaaatgcattaacgcggaaccgacattcaccgcaggaaaacacggtattcaaatcggcgcttattatgggccggcaataaaaaccatcactgaatcacagttgattggcaccgtcacttgtacccctgaaacaggtttaaaagacgcgaccaatgcggtgtatggcacatttattgatgccgaacagttgtacacaaaaaccgacttcacgcctgtgattgtggacgaatgggtgaaagaggatggcttagaaattcgagagaatatcgactatcgttttgtcaccagcccttatcaagcccaacgattagcccgccaatatctccgcaaaaagaaagccggaagacgggttcaactcacgatgaacttagacggctatgcttatcgtccgggggaagttgtgcttttagaactacccgctttgggaattagtgggctggaattccgtattgctgaatggaccttccatgctttagaaggtgtctctctgacattagaagaagatggtgcttatttatatgaagacgtcattgggaaaccttttgttagacccccattcactaaattacccaccggcggtgtagcagcacctattaatcttacctttgttccacttgcagtcagtgacatcgtgcaaggtacgctttcttggcagaatgtggcgtctgatgtgcgctataacacggtcaatattttccagaatggcaaggttatacagtctattcaggtgccgggtgaacgtgttgatattaacggtttaatgagaggcacttatcgtgttgaagtcagagcaacaaatgtggctggtgcgatgtcggcacccgctatcagtgattttgctatccaagcaccgccggctcccattaaggttgatgttacttcgggaatgttcagcctcaccgtctcaccaaaacaaggtgatagtgctgtcttgggttatacctttgaattttggtttagtgaggaaaaactcgccaatctctctgaacatgaggtaatggttcatactcataaagtaggacaggggcattactggacacaagaaaacctgaaaccaggatatacctattatttttatgtccgaactttaaatagctatggtaaatcgccgtttgtggaagcttcaggtgtttgctctgctcaagcgaatttacttcttgatgaattagcggggcaaatcagtcgagatcaactcgcgcaagacttattgggtgaaattaacagtaaagcaaaccaaatcgagattactgaattacatgagttgatgaggctaaatcacgacaagattttatctgagttgatgaggcatggtgcgacaattgaagaaagtgaaaaaaaactggaggaggtagaaaaattactggctgagcggattaaccaagtttcaacggtaacagaggctcaggccgctgcaattaaacaagagcaacaagcacgtattgaggctgataaaactgaagcgcaacaacgacaatccttagccactcaacttcgtggtgattatactggcaatgatttatcgaaagtcaccgcaggacttatctccgccgagaaacaagcgcgtgttataggcgaccaagcggaagccaaagccagacagtcattggaaacacggatgaatgggaatgtttcagcgattaatcaatcactagaaaccctcacctcgaaacagcaagcgcaaacgcaagagatttcaacgctcaattcaactcttaaagggaaagctgatagtagtgcagtaaatgcattaaatacgcgagtatctaatatcgatggcaaagtgacgtccgcaacctctcaggtacaaacgttatccagcaaattagataaagtgaaagccgatttaacggagtctgtggtggtggatttagatttatctaaactcaatgaaaatacctattatccagttattttacctttagtaacctctcgacgttatgcctttaaggtttttaggaccttagggcaatatagagacaataaaccgagctatgcgactcacaataccaaaggttttgccatgattgtggaatggcaagtgagtggttctggatggggaacccagtctgaaaatcgcatcattgataattttgattggaaatggacaaatcaatcccctgtgatgggacccgctcaattaacgaatagctctgtggaatatatttatttacggggaggggcaaaatatcagttaactaaacataaaagtgttaaccatcaaattatcaccagcacttataccaacaacaagcaatcggtggcaccgaaagggtttgtggcgaatgacgtgcctaaatcgagcgaacagaaagccaatgcaacagcgaatgcggtaaatcaacttgaaaccaaagtgacagaggtttcaggtaaagtgacttctaccgcccagcaagtcactcgcctagaaagccaagtgggtacaagttcagccaaaatcgaacaaacgtcgaaagtggtcactgatttaaatggcaaaatctccgcatcatggacaatgaaagtccagcaggatagcaaagggaataaagtcattactggcattggcttaggattcaatgcgcaaggaaatagtcaatttctggttaatgcccaaaactttgcagtgatatcgtcattaaacggtaaagtggtgacaccttttgttattcaaaatggacaagcttttttcaatgatgcgttatttagcaaggctaccattgataagcttttagtggggaaaaaaatcatctccacgaattatcaagcaggaaaacgagggtttaatattgatggaaaaactggcaatgtagaactaaataatgccacgtttagaggacggattgagggggctgatgggcacttcagtggaacagtagatgcgaagaggattttgggagatgtgtattttgcaacgaataaagttatttcgggaacaccattgaacaacaagatatatccaaaaggaaagcttgaaacaggatgggttaaagctattgaaataagttctgataattttgcgcgggtattagatgctagattagcatgtgtttttgaaactaaaccagccagtagaggaggtaatcagtcaacacatgcatttttagtgggggttgatgatgggaaggggggaataaaggttcttgcaagacaagatggcactgagcatcttgttaacggtgtgaaagtaacaataatagttgatgatattccaattccggcaacaggtcgtggaggaagtatatttatctatatgcgggcgtatacagtaaatatgaatcccacccctgttaacactaacaggagtgtgaaatttacattttcaaatacaaagagacttgaaatattcaaggaaggttcaagtttaattaaaccgttaaaccattaa

SEQ ID NO: 302090 - DNA, 339 bp, Proteus mirabilis
gtgaaacctataaataaatgcctactttctataggcttaatcttcataagtagcgatgttttctcacaatcatcattatttagcgactcaaatgaaaactatttagataaaaagattaatgatacattgagtgatgtagctattactgaaaaaatccgcacaactttacagagaacacccaatattaacagtgaatcattggctattcgtaccgaaattggacatgtaattgttactggttttattaatagcgaagaagaagaaattcttattattcaaacaataaagcaaataaatcacgtaaaaagtgtagatttaaatgtaaatagaaaagaatag

SEQ ID NO: 302091 - DNA, 174 bp, Proteus mirabilis
atgagcagagaactcggaataagccagcaacattattctagaatagaaaatggacatacaaaaataacactagaatacttaattaacatagcatctattttaggtgttacaccacaaacattattatccgaagctgattttccaaataaaaccatgataaaagaaaatagataa

SEQ ID NO: 302092 - DNA, 2181 bp, Proteus mirabilis
atgaaatacaaaatattatatacgtctattttatttgctttatattcttgttctgtaaatgcatctctcataactgattctggagtagagcaatcctctatagttgtatcttctaatgatagtgattcagcaacaaatcctctaaatataaaaggatcaaacacgatagcaatcggaaatggcgttcatatcgatattgatcaaaatactactgatgcaagaggggcaagtgatggctctattgctattggctctaatacaaagacaaaatatgaaggaacaacagcaattggtaaaaactctattgccaatggttggagatcaactgcaattggtgttgatgccaaagctactgatgaatcagctaccgcaatgggtaatcaatcattatctacaggttggggttcctctgcctatggtactgcctcaaaggctattcatgcaggctctactgccatcggtaattgggctcagagcactgcaacatatggtacagcgcttggaacatcatccaatgctacagggaattactcaactgcattaggaactttgtcaaaagctaatgaatatggggctataagcataggtttacactcagaaagtttgggtaaaaatagtattgcaaatggaactaattctcaggcatctggtgaaaataacattgctattggacatgatagtactgctgtaaaaggtagcaacagtgttgctattggagcaaattcaaaaataggctatggctctaattctatagcacttggtactaaatctaatgtcgtgggcaataatgcaattgctcttgggaataactcgttaaccaatggttctagtgctattagtctaggtgataacgcaaaagtatctggcggaagtggtattgctattgggaaaaatgcatcacaaggaaaatggcgcgaaaaatttccaactgaaaacccgattagcgttacaggtggtatagcaattggtgattcaagtcaaacaactgatgttgcaagtgttgctctgggaggtaaagccaaggcgaataatgcctatacaacagctataggaaatggggctattgcagaaggcaaaagctcaaccgcattgggttctggtgccagctcacaaagctggggttccgtagcattaggtttggactctgttgcgaatagagtaaaaggtgacgtaggatatttatccgctgaaaaaactgtaggtaatgaatcctccataacagcaaaaatgtctgctcaaacccaagaaagactgaaagaacttaatagcaagataaatgaatatagtaaaatcgttgacccaattgcaaatgcttactattcattaagcaatgaatataatcaaaaactgcaagaagtctatgattcaaacttacagggggaagagtattctaaaaaaataaatgaactacgcgctcaatatcaaagcgaagtagtaaaacgttctgctgctttgaacagtactccggagtatgctgagttacaaaaacttcaagcagaaaaatctggattgcttagtacctatatttcaactaaaggcgcaatttctattggtaatgatgcagtaactaatgaaaatggtgaaattattcagcatgcaaatactcgtcaattaaccaatcttgcagcgggttcgaaagataccgacgcagtgaatgttgcgcaattaaaagatcttcagtctgtaatggaaagtgcagataatgctctttctaaaagaattactgacaataaaactcaaatagatgacaacaagaagaatattgatgaaaactcaaatgcaattaaaaataacacaaactccattgtgaaaaatgagcaaaatattaccaacaatatgaatagtattaataaaatctccaatgagatgaaaaacaataaccagcggtttgatcaactggagagtaaaatcgttagtaatgagcattatattagagatgtggcaaaagaaatgcatcgaggtttagcatcacaagccgcattgaatgggttattccaaccttatggtgttgggaaatttaattttactgcagcagtaggaggatataactctgaaacagcaattgctgttggctctggttatcgtgtaaatgaaagtgttgcattaaaagcaggtattgccactaacactggaaattttgaaggtgttacttacaatgctggtgtgaatttagaatggtaa

SEQ ID NO: 302093 - DNA, 201 bp, Proteus mirabilis
atgtatttaacaagttacttaattattatggatataatgctacgccacatgggttggacagaagccgctgacttaatcattaaaggtatggaaggcgcgatcgaagcgaagaccgttacttatgatttcgaacgtctaatggacggcgctaagttgctaaaatgtagcgagtttggtgacgcgattatcaaacatatgtaa

SEQ ID NO: 302094 - DNA, 723 bp, Proteus mirabilis
atgcctgcttttaattctgactctgttataaaagaatcaatcgaatcagttttaggccaaactcatacaaattttgaactaattatctgtgatgacttatctactgataatactaaagaaatcataaaaaaatatgtagaaatagatcaaagaataaaattagtaaataatatatttaaaaaaggtgctgcaggtgctagaaatagttgtattcaagcatcaacttctagatatatttgttttttagatagtgatgatttatgggctcctgaaaaactagaaaagcaaataaatttcatgaaaaaacataagatagcaatgacacatagtgattatgttatgtttgatgctaaaaataataaaaaaacaatacagagccctaaagtaattagtttttcaaatattataaaaaaatgtgatattggctgtttaactgtaatgttagataaaaaactaattccttatgatatttcatttccttatacaccgaaagaagactatgcattatgggtatacttaatgaagaatggtatcaaatcttataactttggtgaatgtagctcattttatagaaaacaagaacaatcattatcctcatctaaatttaaagaaatacaaaaacaatggtttgttctaaaacacattgcccaattaaatttcataaacagagtaaaatgtatttctttatattcaataaatggatttaaaaaacattttctatag

SEQ ID NO: 302095 - DNA, 669 bp, Proteus mirabilis
atgaatataattagagtatcattttctttttatctttttgcaatatcaatgctacttcacttaaatagaaataacattctatcacttattctttttttacttgcattttttttccataaatcatcaataattgtttttccattattattaattcccaataaaatttatttgtttttttatagacatgttctttttatttatttttttacctttattctatttctatttaatccttttcataacgttgtaaattctattattattgattattttccacattactcttcttatcttgaagatggtaatttcgaaaaacatagcatcatcaatatacttagcaaactatattacatgccgatacagcttctatttatctatgttatacgtaataaaagaattatattctctctcatcgaaaagaaaataattggattatgggttattatttcaaatagttacttattaattgttcactttgatttttttgctcgagtaaatgtttttttaatctttttttatattatacctgcaatttatttattatttttatatagaaaaaatgctataacttttatactaatctcagcttacttaatatttgcttatttattaaaagtattatttttcccaaatgctgaatttttatacaacacatatttatttaactaa

SEQ ID NO: 302096 - DNA, 930 bp, Proteus mirabilis
atgtattatccatatatgagagggaaacagtttgaactagcagcactgaaagaagtagctcctaggcttaatccaaccaaagttagtcccataattgaaccaattaacgataatctagatcggctatccgcgacgattacagtattaaataatcacaatgttatacctcatgttatcgtaaacccacaagtaggtgatttagcaaatgattcacctgatcctattaacactgaattatctaaccgtaccgtatcttttattccatgcataagattgcataaccaaaacatattacacattaatacattactacaaaaattaattagtggtaatattccgtattctctgtatctacaggaagaaatccaatcaaacatcacccactatacaaataattctgttgctaacattatccaaaacctaaacaaatactcacatactttcagaaactccttactaaatagcgtggttgttgaaagctcgtttccatctcaggcaagaaatgcagactacagtagaacacctcaatttttctcagatgctcattcaacgtatataaatcccttaattcagcatcagatcggattcggagattttttaacaattgatgatgtttggtctacaactggtggacctgcttttgttatcgcactccatattacctatataacacaatcaaatagtagcatgtacgttaagcatagcctatctactaaaagtccaaatgatcagagtgacccagcaggtaaatttaaagaagctcttcaggaaatgattaattttgcaaatgtcacacctactcttgatcaaaatacacttgggtttcaagagtatattaatattcataataatgggacgtatcacggtctaggggtacctaaaaaattgagtatgatgcaccatattgagactattaataataatatttaa

SEQ ID NO: 302097 - DNA, 888 bp, Proteus mirabilis
atgaattacaagcaactagcaaagatatttaccagtgtaaatataactaaaatagctcaaggggatttggctcttgtacaagatattgctaatgattttcctacgttaactcatgtgcgaaatctctcagaattatttgaagaagcttacaagctcctttgtaaatactaccctaatgaatacgttataaaaaatatcattgctaataatatattattaggtactcactcaatgaatactgcaagtatgttaagtgagttacggattggcactaacaaagcagactgtgttattatcaatggaatatctacctgctatgaaataaaaactaagtttgacaccttaaagcgccttcctgaacagttaactacttacacatcttcctttgataaaactttcgttgttactcacgaagagcatttaaaatccttaatcaaaattcaaaagaatatgcctagctttggtattttagtattaaacaaaaggaatcagttgagtaagaaaatagaagcacctttaaatcagagctttgacacagaattaatgtttcatactttaagaaaagatgaatacaccgatattgtatataaagtagcaggagcacttcctaactgtcagcaaacagagttatttagcaagtgcaaagaaatcttttgctcactgaataaatccgaagctaataatcacttcaaaagagtacttaaaatataccgtcgaaacgatcacaaattcataaaagacctaccaaaatcaatgaaaaactttggtataagctacaatcttcacaaaaaagataaaaccaatatcatatcatccctactcctaggtaatcagcttaatagcgaggtttttaatgtattatccatatatgagagggaaacagtttga

SEQ ID NO: 302098 - DNA, 609 bp, Proteus mirabilis
atgaatgaggtatcacacttagctaccgataaagatattgttacaatgctgacagcgataattggtgctatttgtttagtaattggtggtgctataggatttttcactaagtatttttatgagagcaaaaaacttaaggaaaataaaaaagcacttcgccagcaaatgataacaaataatatagccccaatgcgtcaagaatggattaatgatttaagaaaatcctgtgcagattacttttctgatatcaatcttataattgtatatacaaattcaaaaaacgatgagtttaagttggaaatgagagaggaatacaaaagcaggatggtttccttaagtaaaaaattcgtatatatagatttattattgccatttaaaagggataacaatgaagaggttgaggctgaggaattcagggattcactaagtgaagttaactcatttttcaattctactgaagataaaccatcgttcaatgatatgaagaaacatattgctgacagtagagaaaaattaaaaaagttactaaaaaaggaatgggaagaaacaaagtcgctaagagaaatagatgataaacccaataaaaagaagaaatggcatttattgtag

SEQ ID NO: 302099 - DNA, 1257 bp, Proteus mirabilis
atgagcgatttagtcaccaaagaaagcaaatcaatacattgtcaggagtgtgaccacctcgtatcacttcctatagacctaaagcgcggcgaagacgcctattgcccacaatgtcaagccaagttagcgacctatcgtgattggtcattaactcggctattaattctttctatcaccatgctgatattcgcgtctatcgcttttactcaacctcttatcaagatccatttattagggaccatgatatcagccaatgttcttgacggtattcgcttaatgtcacaacaaggctctccattaacggcaacaatggttgccttttgtgccgttgccgctcctcttagtctacccattgccattttatatctccatttaggggctcgtttacatctaaatttacgtcccgtgctattaatgttaggtaagctaaaagaatgggtaatgctggatgtttatttaattggccttggtgttgccaccataaaactaggcgattatgccacaatctatattggtcatggcttagttgctttttcagctttaatggttttaagtctattaatgcttattaacattaatatggatcaactatggcaacagttttatccgcaaaaagagataaaaacgagtccagcaacctgtcatgcatgtcattaccattttaaaaagccaccttcgagccattgcccaagatgtaaatcttgctatagtgctcgtcaaccaatgagtttgcaaaaaacctgggcagcactcattacagcgatgatcttgctattaccggcaaatttattacctatctcaatcttttatttaaatggccagcgtaatgaagacactattttttctggtgttctctctttaattaattcaggtaatacacctattgcaattattgtgtttattgccagtatctttgtgcctttctttaagataatcattatgctggggttactattgagcattcattttaactcacgtattcaccctctattgcgcatgaaactttatcgatttgtctcttggatcggccgatggtcaatgctcgacctgtttgtgattgcgctgatgatgtcattaattaatcgagatcagttaatgacattcactatgggacctgcagctttttattttggtacagctgtcattctcactatccttgccgttgaatggtttgatagtcgtttattatgggatacttatgcaacaagaagaaaacaacacacaggcaacccaagccgaaatacgtcgcaaacgtaa

SEQ ID NO: 302100 - DNA, 390 bp, Proteus mirabilis
atgtctaaatcggcaaaaggtacgacagaacggcatggacggaacgtaaaagctaaatctggtttaaaccgctcaatactggagcagggctggtatgaaatgcgccgtcagcttgagtacaagcagctctggcgaggtggtcaggtactggcaataccccctgcctacaccagtcagaagtgcgcttgctgtggtcatacagcaaaggaaaaccgccagtcacaaagtcaattcgagtgccttgaatgtggatatacagcgaatgctgatatcaacggggcacgtaacattttagcggcaggacatgccgtgcttgccagtggagggagggtgcagtcagaccgcccgtcgaagcaggaacccgccgaggtgattcagacatcagtctga

SEQ ID NO: 302101 - DNA, 684 bp, Proteus mirabilis
atggagtttttagaaaataaaaaggagttattagaaattaatcaaatcattaaaagaaaatcatcagaactgattattttatccagtcaagagcaacaatatataaaaaatcgcgatagattagaaaaacaaaaacacctagagtggcatgacaaatttaaacaatatgaaagcgaagtttttatttatcaacaaaatctttttcatgctcagaaacgtcaacaattaaaaattgttcgttctcctgttacaggtacagtacaacaactcgctgttcataccctaggagccgtattgcaaccttcacaagcggtgatggtgatagtgcccgatactcagcataatgttgctgaggtgaatattctcaataaagatattggttttatctatccgggtcaaaaagcggtgattaaaattgatgcttttccttatacccgttatggcaccattgaaggcaccattgtcaatatagcaaaagattccatacaacatgaacaattaggcttagtttatcccgtcctgattgaacttgataagcaagtgatgggtgaagatgaagcacaatataaactggccacaggtatgtctttagttgccgatataaaaattgaaaaacgtcgagtgattgattatttactcagtccaatagaagtttatcaacatgaagcattaagagaaaaataa

SEQ ID NO: 302102 - DNA, 630 bp, Proteus mirabilis
  misc_feature (598)..(607): n is a, c, g, or t
atgatgaaatcaaaaataaaacaaatgattgctcactactttaaaactaaaaaagagcctaaaaactatgatttttaccctaatcatatcgccgtacttgagaaaccgccgacaccttatagtcgtattattgcaataataatttcattaagtgtgattatatttttactctgggcatatataggtaaattagatgtgctttcttcagctataggaaaattagtggtttcaggttattcgcaacaaattcaaatttatgaacatagtcgcttaagcgccattcatgtaaaaaatggccaacaagttaccaaaggagaagcgttattaacacttgatattttaggtgttgatgaggagattaataatctaaaaaataagatagaaaatctattattactaaaaattcgttatcaagcattaggtcaaaacacccgacctgatgcaattgatgattttaatttactaaataaagaaaaaaaagaagcgattctactaagttataaaaaagaaaaggatgaatttgatgctagtattaatcatattaattctgaaatagaaaccaacaataaaaacaagcttcttactcaccaagaaatcnnnnnnnnnncattagtaccatggagtttttag

SEQ ID NO: 302103 - DNA, 171 bp, Proteus mirabilis; identical to SEQ ID NO: 300428

SEQ ID NO: 302104 - DNA, 612 bp, Proteus mirabilis
atgaaagagtatccaattatttttaataccgaaatggtacaggcaattcttgctgggcgtaaaactcaaactcgtcgagttgttaagaatgtaatgcctgataattgtttatggataaaaaaaccgaccaaaataagaaatggtacaactactcatgtattggatgcaccaaaatataatttatgtcctcttggtaaagctggtgatcgcctttgggttcgtgaaacatggcaaggaccattagttgattgtgaaaaagcttacgacttatttaaaggctctactccatatcaaaaagtagaaaattgtgtttacaaagctgatggagtggctgtacctgaatatatcgattgcgatgataattttcggcaaggctggaggccatctatacacatgcctcgttgggcttcacgtataacactagaaattactaatgttcgcgtagagcgactacaggatataagtgaacaagatgctattgctgaaggtatcaccaatatttcggtattgtccaagtatattttttcaacgttgtgggaatcaatttatggttttgacagttggtcatctaatccgtgggtgtgggttattgaatttaaaaaagtgaaataa

SEQ ID NO: 302105 - DNA, 570 bp, Proteus mirabilis
atggaaaaattaccagatgattattttctggatgctgatgatgaccttgtggattttttggaaaagcagggtgaagattgcattcgtgaaattcatcagtccaataccttgaataaagaaaacggtcagaaattattaagtatattgattgcaggggttggttcaactttcttgttattaacccagcgctccacactcgattatctaaccgcgggaatgttagtgtttttagtatattgggcgttgtgtgctgtatatcttgttcgatgcgttatcgtagttagagcacgggctcttgcttcctcgactccttatgcattatgccataaaggctataaggggtttagtgataaggattacgagcagtttgaatcgaaaggattttcagctgagcgttcgacgctgagcatattaaggcgttatcgacttgcggacttaacaagaatggcagaaatgagcaagcgcgaaaatgcaagaataggccgtgaacttgaaagggtcaggatcgctacaatcctcacccccgtttgtgcacttgtaatctcagctcttacctatctttttttctga

SEQ ID NO: 302106 - DNA, 153 bp, Proteus mirabilis
atgagtaaatctaaaaaaccaactgaggaacgtaagccacaaccctctaccgagtcgaagcctgtatcaccggcacctagcgagcggaatctaagaacaggctacacctttgttaccgattctgctgaaaacatcagaaaaaaagataggtaa

SEQ ID NO: 302107 - DNA, 306 bp, Proteus mirabilis
atgccacatagagatccaaataactatagctggttccgcgaggtgcttatcttattgatgaccatgctcggcgtggcagccagctatgcatataaagttttaaacggtgaaaagtttagctggcggacatttattcttcaggcaattgttgctgtattcgcaggcgcaattgtatttctagcatctagttattatcaatgggttccagaaattgcgggtggagctgcaggattcgcaggttggtccggtgctgaactcatcaaaacaattgaaaaacggtttttaaggaaggttagcggtgagtaa

SEQ ID NO: 302108 - DNA, 2010 bp, Proteus mirabilis
atgagcaaagtttttaaactgcattcagaatttaaacccggtggtgatcaacctactgctatcgcttcattatgtgaagggttagaagatggacttgctcaccaaaccttattaggggtaaccggatcaggtaaaaccttcactattgccaatgtgatagctaacctaaatcgtcctactatggtattagcgccaaacaaaacgctagctgcacagctttatagtgaaatgaaagagtttttccctgaaaatgcggtggaatactttgtctcttattatgactactatcaacctgaagcctatgtgccaagctccgatacctttattgaaaaagacgcctctgttaacgaacatattgaacaaatgcgtctatcggctacaaaggcactcttagagcgtaaagacgttattgtggtctcttcagtttcagctatttatggtttgggtgatcctgatagctatttaaaaatgatgctacatttaagcaatggcatgattattgaccaacgtgcgattttacgccgacttgctgatttgcaatatacccgcaatgatcaggcttttcagcgcggtactttccgagtccgtggtgaagtgatcgatatctttccggctgaatctgatgactacgctttacgtgttgaattatttgatgaagaggttgagcgtttatcgctatttgatcctctcacagggcaaattcattacaatgtgccacgtttcaccgtctatcctaaaacccactatgttacgccgcgcgagcgtattctggatgcgatggaaaaaatcaaacaggagctagctgaaagacgtaaggtgctattagccaatgacaaattggttgaagagcagcgagttacccagcgtactcaatttgatttagaaatgatgaatgaattggggtattgctcaggtattgaaaactactcccgctatctttctggccgtgggcctggtgagccaccaccaacgctatttgattatttgcctgctgatgggttattagtgattgacgaatcacacgttactattccgcaaattggcggcatgtataaaggcgaccgctcacgtaaagagacgttagtggaatatggcttccggttgccttctgcgttggataaccgaccattgcgttttgaagagtttgaagcattagcaccacaaaccatttatgtctcagcaacaccgggcaaatatgagctagaaaaatcaggtaatgacattgtagaacaggtggttagacctacaggcttacttgatccggtggttgaagttcgccctgttgccacacaggttgatgatttattatcagaaatacgtatacgagcagctaaaaatgaacgtgtattagtgacaacattaacaaaacgtatggcggaggatttgaccgaatatcttgaagagcatggtgaacgggtacgttatttgcactcagatattgataccgtcgagcgggttgaaattatccgagatttacgtctaggtgaatttgatgtgctggtggggataaacttacttcgtgaagggttagatatgccagaagtctctcttgtggcgattttagatgcagataaagagggattcttacgttcagaacgttcgcttattcagacgattggtcgtgctgctcgtaaccttgaaggtaaagctattttatatggcgataaaataacagattctatggcaaaagccattggtgagacagaacgtcgtcgggaaaaacagcaacaatttaaccttgaacatggcattgtgccaaaaggcttaaataagaaaattggtgatattcttaagattggtcaaccgactcaaggccgtaataagaaaggacataaagcggttgatactcatgaagattatccattactttctacggctgaattagaaaaagaaattcagcgcttagaaacggaaatgtatcaacatgctaaagatcttgaatttgaaaaagcggctcaaacacgggataaattacaaactttgcgtgcgcaatttattgctaattcttaa

SEQ ID NO: 302109 - DNA, 126 bp, Proteus mirabilis
atgagtggttatgtgtatgcagggtttccaagctctgtaggagtcattatcaactgtttaaatattacaactaacaaacagtcaatgatttacaaagataaaaaagacattaaggatagtgaatga

SEQ ID NO: 302110 - DNA, 1776 bp, Proteus mirabilis
atgtcatcaaaatcctactttaccaatgaatcagaatacttaaatgagctgactgaacaagttgccaaagaaaaaccgcaacttgttaatttgctttcgcacaatgttaaagatcctgatacttcgcggattatggatgggctatcttatttatcgggtaatttacgccagcaaatagatagacaatttcctgaattaactaatagtttagccaatatgctttggccaaactacgcacgccctgtgccaagcatgacgattgttgaatatcatcctaattatgctcagtgccaacacgcaacaaaaatttcagcaggacaaccttttagtgccactccactttatgtgcaaagtgaggaaacaaaccacgagacgttatttcaatgtcgatttagtcaaagtcgcgacctctggttaatgccgacaaaaatcagtaacattttgcagcaaacaaccgccattgaaataacatttgagttagcaacaaaacagccacttgccaatattggcttagataaattgtgtttttacttaaatggtgcgccatttactacaaatcagctctattttttattaagccagcatgtgcagagtgcctctttagtcacagatgtacatacgctacctcttactcacttttcagttacgcctgttggttttcaaaagcaggatgccttacttccatacccgaaaaatagctatgatggctatcgtatactgcaagagtttttctgttttcctgaagcctttctctttctagatattcatggtttggatgacattcctttggctatcgaagcagagcaattcaaactggtgatcaattttgatctagaaattcctgatggcgttattctttacgacgacagtattaaacttaattgcacccctattgtgaatttatttcctattgatagtgaagcaataaatttgacggggaaaagtgaggagtatgttttaagtcctaattaccaacttactgaatgttttgatattttttcgattaatgaggttagagggttacgttatcctaatgatgctaaaccttatccgatcacctatacagcatttgaaagtttttatcatcaaaaccatcagactcaaaatcatggctattaccgtttaaagataagtcaaaatgagcagttatacggctattcccatcgactttcttttgttcgtcagcaagagcctcagttacaacagtgtgaagaaaccgtttctgttgcactcaactgtactaaccgctatatcgcttcccagttatcgacgcgttctatcgatttagatagtgcatcaattccttatggggctttatctgctaagaatttattcgcaccaacactgcctttatatccattattagataaaacattatattggtctgaattaactaatttatctttaaattatcagtctttgctcaatcttgattcattaaaaaaaatattacaactctatgatttaccgtctgtttataacacacaggttgcaaggcaatcacaaaaacgcctagatgcattagttgatttacattcagagcatattgagcatatctacaaaggccttcctgttcgcggtctgaagacaacgttagttgttcatcaaaatgcgtttctttccgaaggaagtttattcctattttgtaccgttatcgctcaatttttcaccttatataccagcattaatatgtttcatgagttggaagttattaaccttgataataaggaagtttatcgatggccagcacaaatcaaccagcacatactgaagtaa

SEQ ID NO: 302111 - DNA, 1038 bp, Proteus mirabilis
atggccagcacaaatcaaccagcacatactgaagtaatcgatcgttggctggaacaagctggctcatcggtaacagagtataatttttatcaactcgttgaattgttaaataaaataattcatcaagatgtcaattcgatggaggatgacagcggtattcttcgctttaaatcttattcaaatattgcatttccgacgcgagatgtcatttccattgaaaaaaataatgtcgaacaatatgaattagaagtcgcttttttaggcttacaaggaagtcagtcccccctaccaggctattatctggatgagtttgcttgggaagatgcacaacagatagaaggtatctccgcttttctcgatatcttcaatcatcgtctgatagcgttactttatcggatctggcgcaaatatcgttactacatttgctttgaaaatgaaggtcaggattcattttcacaatatatgttttctctcgttggattaggcaatggagctaatcgcggtcggatcaaaatcaaccatagcaaaatgctcgcttatgctggtcttttggcgagtccaagtcgctcttctgatgtgattagtagtcttatatctcactgtttcgacttagaaaatgtaaaagtaattggttgggagacacgccgtgttcctattcctgaatcacaacaaaacaagttaggtacgatttctcatcaatccggacaaaaatctcgcccacgaatgttattaggggaaaattttagtctgggctcacacatatatgactgcaatggaaaatgcaccatcgaaatcagtgaattaagtttagaacgctatatgcgttttttacctaacggcagtgatttcgcaccattagttgcctttgtttcttacatttttcatgagcaattagcttgggatttacgtcttagcattgctgaaaagcaagccgaagggttccgtttgggtcaccaacaacacaaccaattaggctggcaaagctttttaggtcaacccgcaaagaaaccggatgtcaccattacggtattggaataa

SEQ ID NO: 302112 - DNA, 1269 bp, Proteus mirabilis
atggataaatatcagccaacaatttcttttagcatcaaaaatagtgaacagctagaaagtggttatctgccaaatgcgactttaactcaaagtggcggacagattggtagtggcaatcaatgtgactggaaaatccaagataatgaaggtgctattgccgatcggcaatgtacggtgttttggaaagatcaacacttttgcttaaaagtaaattcaggtcctgtttacattaataatgcgattattccattgcatcttgatgccgtaagactgacccaaggtgatcagataaaagtgggtaaattagttattgccaccaatattagtcttaccggagagccggtacaaaatatgatggcgatgacgcctcagtctattatcgcaaaagatcataatccgctagattcattatttgatgttgatacaacagtcaaaaatgagcggaaagagcctccgtttgtaccaaccgttcagggttcattaacaacagacccactacaggctttagaaaacgaaaatctaagcttaatttctaaaaacacacaagctacttcagacgatcctttattgagtgacccccactcgtattcatctgcctttccgacatcagattatcaagagaatactatggtccaagaatttattgatttacctaaaatcacacctaatgaaaacgaacatatgaccgatgtcgatcatgtggcggttaaccctctgatgaagggattaggtatccaccttaatttaacaaatacacagcatgctaatgattttcttgttgaactgggtaaaaccgtcaaagcggctattgaaggtttactgattttgcaacaacaacaagaaagcttacaagataagcaattacgcccaattgaagataatcctctacgtcttaatagtggctatgaagagacaatgaagttgatgtttaccgatgaacgtagccctgtacatctttcagcacctgcggcagtaacagaaagcttgcacaacatccaattgcattatcaagcgaatcaagaagctatttcaaccgcactatcaaccatgttggcagcattctctcctgaacatttattaaaccgcttttctcagtatcgacgagcttcagataacacaccaatgaatgatggctgggcttgggaaatgtacaacaactattacaaagaactctcttcatctcggcaacagggttttgaaaaattattctatgaagtatacagccacgcttatgacagagcgctgagaaaaggaatagaggaagcttaa

SEQ ID NO: 302113 - DNA, 789 bp, Proteus mirabilis
atgaaagcgagactaaaaaatgcgcttgcactactagaatgtcatgatgtagagacgctagctgttcaatttctaaaatatagcttttttcgtagctcactgagtgggttaattatttcgttaatgaataaagctgaaaataaattggaaagttggaatatcgacttaacacttcaagtgcaaagccattttttagataccgatattaccgatgcagatcaccctttaattcaactgctatttaagggtgaacctgtattttggcaaaacttacaacaaggtagttatattaataatgctgctatgcgcggttttatttcacagcttccggtgaacacaggattgtatagtttgcctatctatgatgttaaccataaagcatgtggcacgattattcttttagggcaagctgaagagctagaaaatatcgagcaaggtattttccctatttattgtgaactatttaatcatcaattaaagcatctttttgaattatcaaatatgcaacaaaaaatctcttacttgcaatatatcaatcaattacaaagggaaaaagaaaccacgcttaatgaaacgttagataaattaaccgcatctgtagcgactattgcacttcctaccatacaaatcaaaggagttaatgatttagaagttgctatagaaaattatgaaaaagaaattttattagataaacagcaagaattgaaaggagatattaacgccatggcagaacagcttagtatttctaaacgagcgttaatatataaattgaagaaatacggagtataa

SEQ ID NO: 302114 - DNA, 222 bp, Proteus mirabilis
atgaccaatgtaagcaataaaaaaagggagtacagaaaagggaaccctagaactcaaaaagattataatgacaaacatagggataagaaattatcaaataataacaaagagttaagagtttttatacccgcagatctaaaggataaattagcaagttattgtaaagagaataatataacacagtctgcgtatctaacttttttgttgagcaattctctttaa

SEQ ID NO: 302115 - DNA, 582 bp, Proteus mirabilis
atgaatataagctttaatttaatggttgctaccatgtgtttaatttttatgccacttaaaacaatagcaaaacctatttttataggagattcattaacttatggtgtggcagttagctattcaaaaatcaatatagttgacgcgaggtatctagttggctcagggctgactaatagcagtaaatttgattggattcattatattgacaatttagatataaaaaaatatgacacgatatatatttttttaggaactaatgattttataaacaaatcagaaattactgtttacagtaataaagtctcaacattaatagaaaaaattaaacgtcaaaaccaaaatgtggtttgggtacttcctccaacattaaaagatgaaagaaaaaatttattattaaataatactcgatatgcgattaaatcggttttatatacaatgaatgttagatatatcgatatgcgtaatgtgttagggaatacctacactgatgaaatagaaggcaaaaaagttagaacgcctgatggcgttcatataactaagtatggttcagatttaatcgctactaagcttttgctaaattga

SEQ ID NO: 302116 - DNA, 405 bp, Proteus mirabilis
atgattgatgcattaccgcctgacaatacagtaatcactgtaccgacttgtatgaaagatgcagctaaacgatttgatataccactaagagtatttgttggtttatggctaacagaaggtggaaaagttggaatgaaaaataaaaatactaacggttccattgattatggtgcgtttcagataaatacagtttgggctaaagaacttgctaaatatggtatcacaacagaacatttaacaaatgatttttgtatatctgcatattcatcagcttatataattagatacagaatcactgaatcaaaaggtaatttttgggacggcataggtcgttatcattcaaaaacaccacatttaaaaaatgcatatataaagagagtatataaaaactctattagtttttga

SEQ ID NO: 302117 - DNA, 1236 bp, Proteus mirabilis
atgaaagcaataccgacagataaactcattatgctgttcttttttttagctattcttctgtctgttcttttttggatttcattaagggattatattataaatgcttatacatttgtaacatatcatttttataatatattcccatcttctaaatttatagtatccactaaagaaatgcttgttagtgctaatagaaatgcaagtaatgtatcattttctgactttctatttattttaaataaaacagcttatccatacgctattttattttcagttacatctatattcattgtattcaaaattaggaagtccattaattacaaatacaatagaaatttaaatgttaatgagttagctaaattaatagtaaagaaaaacccatcgatagctcatattttagctaaatattcagaaataccggaacaactattgaaccatgatgatacagaatcattgtcacctttaactcctgtggagtttgcaaaaaaatatgatttaataaacaaaaaaaataatgcatttagaaaatcaaaagcaagaaaaatatttagacagcaaattaattttgagtcaaaaattaatggacatattgatttaaaatcatatgagaagcccttagcaacagtattttcattagctctttttttcaatgactacgataatgtaagaaatattttaaataaattaaacttatcttgttttgaaactgatgatgcttatccaaactttgaattagtaaaagatgaatgtgagactattctttcaacaaaagaatatctagatttcacgaaaaaatataggagttctagaacgatgttatatgcattattagataatgatctaggtattccaccaagtcatttcagatggctaaagggtttagatagaactctttggatggctcttactagtgtcggtagagctaaaaaatttgtagaaggagctggagttattgcatatagcataactgaaacgtggcttgcgaataatgaaaagtataagtctttaaatttatcaccgacagttagacctgctacgattggattagaaactgaattattaaaggaaggattagtagagaaacgaaaacattatttagccaaaggcgcatttaagtatattaatgaaatagaaactctacgttatggagaaaaaaataacgaagatagctattcacctaatactgatgaaaaagagaataaaatcgaaacatctaactttccaccattattttaa

SEQ ID NO: 302118 - DNA, 912 bp, Proteus mirabilis
atgaaaattaatttttataaaaacaatttagtattttatataaaaggcgacatgaaaaatgaaaaaatactaacaatatcattgaataacgtttgtttttatatagaaaaaaaagaaaaatatgaattaaccataaaaaataacacactagattcatttacattatgtttattcgataatgaatatgaagcaattaaatcccttagactgataaaaagaaaatataagcaatatattctttttggaagaacagctaaatttgcaaaatttattataacccctattttaattatagccttcatattatcagttaatggtgcaataactaatgcatcactaatgttgaacaataaatacattcctagcaattataatgaaaatttctcaattacagatgatggatataacaaagaagaaacacatattaatgatgctcaagaaaagaaatctcaactattagattcgttaaaatcagcaactaatactggtaaattttctgttaaactttcaacaggtcataaaaacaccatttatgttttttctgatcccctctgtccatattgtcaaaaaatagagccatatttagaaaatgcatcaactgaattcaatatcgaaatattacccgtatcagttataggtagagaacaatcagtagctattatagaaaaaatcttaagtaccgataataataatcgtaaggaattatggaaactagccatgaataaagaaaaattacctgatgatattactatcaacgatgatgcaaatatgctattagatgcaaataacatggcgtttgaaatgatggggttcaatggtacaccaacgattatatcagataaaggtttttctatccctcaaagcttattaaaagatttagatgcattaaaacaaaagctatccgtcgagtaa

SEQ ID NO: 302119 - DNA, 2064 bp, Proteus mirabilis
atggcatatgaaatacaaacagcagaagaaagagatcccctaggggatttcttttcaacacccgcctatttgataacatatttaatattatcaagtttgataatttgtattttcccttctttactagtctttctatcacctatcagcattatgtggatagtatcttttttcagtttacctagacgactacctttaagactacccgaagaatcagatagctatgacccatcgacaattagagaaacaacagaggaatccaaagtatttggctttagagttgtaaaaaaaatattcaaaatggagaaagctaaaggaaaaatatttttaggtaatgcaagaaaaaaagagtctggtaaagaactttggatttctgaaacagatctagtgcgtcacgtttcaatgatggggacaacaggctcaggtaaaacagaggtattattaacgttttatctaaatgctgttttaaatggcgctggtaacgtttttatggatggaaaagcgacacttgaactagcatttatacattggtcactcgctcgtcgtttcggtagagaagaggatacttattatgtcaattttatcactggtaatactgatagatttgaacatcttgtttcacataaaaatggagaagccatcacaaataatcctgaattaatatctaactcaatagcgatgtttaattctgcatcacccacattgattatcaatttattgcaaacaatgttaccgaaagtagggggagattcagcatcttggcaagagtcagcaaaatcgtacttagaagctatgctaaatgctttatgttataaaagagcaagaggagaattagaactaaatcaaaatgtaatacgtgaacatttgtcattgcataaaattgttgaactttacaatgaagcaatcgcaaatgattggcataaagaaggttattctgcattagaaacatatctatcaaatctagcaggttttgatctatctctcagaaagaaccctgaaatgtgggctaaagaagcttttgagcaacacaatttccgttctaaccaatttgtaaagctattaaacttcttttctgaaacatatggtcatatattccctgatgattcaggtgatattgatattcaagatattttacataatggaaggttgctgtgcattttgataccagggactgagttgtctgatacagagaaacaaacgattgggggaatgttcataaacttattcagaatgtcagtatcaaaagatttaggtaataaattagatggagataaagaatcactacaatgggctaaaaaacgttattttgggtttccattccaatttatttttgatgaactaggtcagtatttcgcaaggggtatagcttcattttttgcattgatacgagcgttaatgtacagcggtatttttggtacacaagatcttcattcaatgtcaaaagtcgatcaagctgaaacgtatagcgtgctaggcaatactcgtttaaaatattttttagctattgaagatatgggcgaaacattaactactgctgaaaaaaatgcatcaacttcatcagtagctgaaataagtagcatcaaagacaaaggaagttctttatcatcagcttctgaattatctgacacattacaagtacgtgataaagtaaggatagatggaaaggaactaaaaggcttaaaagctggtgaaggcataatcatgcttgaagataatatagttagaagccgttctttttatatagatgataatgataaactatcgaatactcataaactaaaaataaatcgatttataaatgtatcaaaaccaactgtaaaaaacttagttgatacttttcctattctacaagaaaggaaaataattaatatcaaagatgttagaactccattaatcggattatgggaagagttagaaaaaatccataatgaatatactaaaaataatattacagcagaaataacaagcattctactatttgaaaaagcgtatcaattttttaatgaattagattctgtagacgccccttgtttttatgaaaaaaatgatgaatttgaagttctataa

SEQ ID NO: 302120 - DNA, 465 bp, Proteus mirabilis
atgaaaaatttaataaccattactttaattactttttttttaactggttgtaaaaacttacaacagataacagatagattaacattatcaaaaaatggaaatgaaaaaatatcactatttgattgggaaaaaaataatagtgatagcttaacagttaatgaaaaagatatttgctctctattcagaaaaaacccaaataaagcaagggaagaatacataggaaaagagcttattcacaatggggatgtatcttgcataatacaaaacccgttaagctttagtattgataacgtagttagcattcctacagaagattatatgaaatcaaatgtaaaaatatcagttagaaatggttcatatttaaatattagaggtaaaatattacgtatagaaaattatagcacaatagacccaaattcagattgtgagataagtataaaattgtctagcatgaatcagttataa

SEQ ID NO: 302121 - DNA, 660 bp, Proteus mirabilis
atggaactattagcaactaagcaaaatattgtgaaaaaaaatccttggcgttttttttctacattagcgtattcatatctttttttgggattttggaatgtgggcttagttgctatgattcctgcttttcaatttcctaaccgtggtttattagacgaacctattttgcaattagcactcgtcgctaatatattaatgctgttcataataataaaatcaggaatgtataatttaaaaaaattaaaaccattctacactttagaaaaaagtggtttttttaactgtaacggtaatggttggaaagttagtcgtaggaattatcaggtaggctgtgataattcaacaggaattatttgtatttgtttaatcagtccaataaatggaaaatttgatagacatgttagtattattgagtttgagaatataagtagtttttcttttgttcctgtatcacagaatatatacaaagttactttaactacgaatactcaaacgttacctcaattcgttttttattcatcaacaaaaaatgaatctaaatttttaagtacagtaacagctattaataatataagtagagagcagtttaaagtcgcaagaggatcggaatacgataagaaaaagaacttctttgatgaaaaaaaatggttagttaagtaa

SEQ ID NO: 302122 - DNA, 2136 bp, Proteus mirabilis
atgaaaataataaataaattatattttggactattgctattccctactattgcattttccgctgatgaaatgggtgtcgatagtttattagaacatgctagacgttctggtgatttatcaagacaaatattgaagcttatatttggagaagtggttgaaaaccccttgagtttttctgaggatggggggttattaggtaatgttatattttctttcaatgctgttgctatagcgctagctattatatacctaggttttattactatgaaaaaaacaaaccaaggtgctcaattaggacaactgatgcaaggggctactgacacaggaaataaagtagtcatgacggtggcaggatttatttcattagttccaaccaaatcaggctggaatttagcccaactattatttttatggtgtgcgtcattagttggagtcggaggcggtaatgttgttagtgacaaagtagtttctgaattgggtaaaggacagccaatctatacacaacctgtaatgcctgagatggtatcagtcgctaagtctatgtttgaaacaaatttatgtgagataggtataaatcatggtctagcacaacaaaaatcagcaggtgaaggttatgaagcttctgcggaaatgaaagttaaagtaaatacagacaagcttacttatacattagaagttaccaatggttcagctagttgtggcggttttacattaaagcctgtaattattcctgatgctggtactgattttttacctataacaaacactattcaatccgcatcacgagatatgtttgactcaatgagaaaaacagctactgattttagtaatgcatattttgaaaagttaaaaggtgctgatattgaattgcctgatgtagaagttcaaattcagcaatcagctagaaaatatcaatctactgttggtaatgcgattaatatgagaggtatggaagctacacaattacagttgctaacacaggatttagaagaaaagggatggatggcgcttggtgggtactttcgtttgatatcatctgctaatgcaagcttgcaaaacgtagcttcacaccaaccaactgtgtttggtattagagcagaaggagactatgcttctactgactattttcaggggttatttcaagcttatcactcacaactaaaaaatagtaaatatacaccgacattaggtagtaataactccagtattaacgcaatcgaaaatccaagtagtaatgataaagttgatcctagtgatgtttcaggaatttttagtaaagtaattccatgggagaaattttttcaggctaaatggggatcaggtgatggagaaactgaaataactaatcctgttttgaaagttaaagaagttggggactggactatgggattagctgaggtagggctggtaacttggttcggtattaatgttggggaaaaagtagtaactagtaatttgggtggaaagattgtcaattttttcacagggttaggtgatgccgcagatcaaggtctaaatattttaaatggatgggtttatacagcgttgatggttctaattattgttggggggatcatgtctgtatatattcctctgatacctctgataaattggttagtcgcaataacagattggctagttgcaattattacgggttctgttgcatctactatgtggggtttagcacatttgaatatcggagaatcttctgcaaatagaagccacgttggatatatatttttaattgatgtattggttagacccatcttaatggttataggttttttattcgctactttggctgtaatcgcactaggaacgttagtagatgtgtttctagttcctatgtttcgagttgcacaaggaacttcaacgacagggttaataacgttcatatttttcttgttatgttatgcaagaattatgggggggttaattttaagagtatttacattacctgtgagactccctaattgggttattagttggattggtaataaaggttacgattccattcttggtgatatgacgactcatgtagcgggtatttttggtggattatcaagagtcacaagatcaccagtatcaggaagtacaaataaaacgcctgatggcaacggtatggatggtaaataa

SEQ ID NO: 302123 - DNA, 606 bp, Proteus mirabilis
atgtctgacaatgaaaacatcaaaaaagaaaagaagtttaagaaaactaaaaacataatatctattgtttctggctattctgatataaaatactttttttctacattaggtggtgttgcttctgagcaaaagaaaaaactatcaattctaaaaaaccaatttgatgatttaagaaataaaaatgttatttcagatgataatgataaagattattctagtttttcaattaatgaacaaaaagaaaaagaaatattagagaaattatcaaaatcaaaaaaaatatggttggtgttattagctatattttctattgtttccatcgcatctttggttgtttgcatatctacaataatcacatctaacctacctatatttatttatatatatacgtgggttttctttatattaataactttgttcaattcttttattttcataaaagcaatgactaacgaatttttagcatggcaaatagttaataaaaaacactcaataaaagaaggtggggatttttcatcttttaaaaaaaatgattgggtatggcaagttttaaatttcaaagaatgtggaaaaaaggaaattcataattatgaaaataataaataa

SEQ ID NO: 302124 - DNA, 1218 bp, Proteus mirabilis
atgaaaaagcaatttaaaacgctaaaaattagtttcttgttaactacattatcagttgcattttatagtgtacaagctcaagcagtgacttgttatgtaaatggctctgcacctatttcatctcaagttatgccagcgttaggaacggttaacggtaatttaactgctattcaagctactttgataaatataggaactgcaataactcaacaaggagatagaacagctgtattaatagatcaagcgtttaaaaaacaacaagaatttgctatttcacagaaaaaacaagatagacaaaaagaagttgttgataagtataaaattcctgatgatatttgtggttcatctatatcgagtggtatgagtagcgttagtaatactgcaaaatctggttcgggaggaacatctttagcaggttcaagcactaataaagatgttagaaatgcttacttgtcaccactgaaatcagttgatattgatgtcgctaatactgcaacatctcacagaaattattgtagtgaggcggatatggttgcctatggtggtactaaattttgtgaagtgaagtctgacatgcctaatggcgatacatcattagaaagtgtattaattggcgctggtaagcctaataaaaatcctgatttaacatttagtgacgaacaggtagatgccgctttactttatgttaaaaatacaactggtagaagtgcaggcagagcaccatccaaaggagaagtgaaatctgcatctggacgagtttatttaggattgttaaagcaatatgaggcttatagagacgcatcacaacaaccaatgttagaaatgatagcagaaagtaaaccgaatcctcagacaataaaaccagtacaagatgcattaaaagttccaagtatgaaatattactatgaacaaaccatatcaaatacggggaaatctaaaggactctctttgagagaatttcaagattttgaagttaatagacgatattcaaatacagcgtatcaagctgatttagcaacaaaatcagatatagagctaatgaaagaacaagttatgattgctaacttgaataattatcttttattagaaaataatagaaaacttgataagcaaaatattttattagggcagttgctatctttagaagcatatgctcaatataaagatatgctggatggcaaggttaaccaattaaatcaagctgttagtgctaattaa

SEQ ID NO: 302125 - DNA, 3021 bp, Proteus mirabilis
atgagcattttagataagatttcagagaaaattattaaaaaatttgctaacaatgaaagcttaaaatattctgacttatgtacagtggtaggattgaatgctgatgataaaaaagttcatcctgaaattaaaaacccctatatattaacaacggaaaataacgaatatttatctgtttttgaaattcagggggctaaatctgcttttggcaaatcagattatataaattatatagacacattgtctgttaacttatctcaattattttctaaagcagggcacaaacttagttttttctttgaaagagattttttaaaaaacaaagatgatttaagtgaattgtataagccacacatttcagccatgaaaagactgagtatcgatattagctctattataaaagatgaagctaataaattatcagctcattatgcttatgaaaaatgttatggtgttttgtattctagtctttctttacttgataaagatgaagtggacgaagatatgaaaaaactaagtaaagaactagagggaatattacattctgagcgaggtcaaaatccattaatatatgcattatcgggtatgaaaatattacacgatgctattttttggaaaactgtaaacactttaaaaggtgatttaaataacggtctaattattgatgtccttgatgtaaagcaagtaggactcatgcaaaaaagaatgtatcaacctaactcaactcctttaaattgggagatgagaacaatgtttgataaaaacattgcttatgatagaaaatcaaatgttgctgaggactctatttttccatctaaattgaaaatgcaaattttatctaatgatcttgatgttaataattcaattattgaatgtgatggattgttttataaatctgcatttattgatgatatgcctctatataaagtatcttttcaaaagttatttctttcaatacctagagctgttccttttaggattaaatttgatttaataggtggttgtgatttttcatttaaagttaatgtactatctattttaagatttataccgtctttaaaaagaattgcggaagatttggattttcttgttgaaacaaaaaaaacagaaccagttattcgattcgcaattgaatatttaacttggggtacggatacacatcaaacaaaacgtaatatttcaatattaaataaagcagtacaaagttggggggtaactacggtttctgaaagttaccctgatagcgttgttccatttatatcgagcgttcctgcattagctcaacgaacttctgctgagatagcatatacgccacttaaagatgctttgcattttttaccattcgaaagacctgcgagtgtttggaataaagatggaattgttttttatttaacagaggatgggaaattatttccgtggcgaatagctagccatttacaaactaaacatacagaaatgataacaggaactccgggttctggtaaaagtgttttattaaatagaaacaatttagcggttatatacttggcacaaaaaaacttaccttttatgactattgttgataaaggactatcagctaagggaatttatgatttattagtacaaactttgccagagaaaaagaaaaatcagatatctcatttagtgcttgaaaataataaaaaacatcgagttaattttttagaaacacagttaggtagtagatatctaactgatattgaaaaagtattcgttattcaaatgttatctgctttttgtgttgaaccagaaaaagggacaccacctaatgcgaatgatgttaactctatactaagtcgattagttgatatcgtttataaaaaattagaacatgaattcgctaaaaaatttgaatatagtcaacctattgttaatgaagctttagaaaaaattggagttgatgaagaatggctggcagagtctacatggtttgatgttgtagatattttatttgaaaataatgaaatatatgcatcaagtattgcacaccgtcacgctatgccaatattagacgattttcaatcgtatttacaagcacctgaactaaaagcagattatggcgatgttaatgtcgatggctcaaatgaaaatattctcagttatattgggcgctcaattagatcggcatcgagtaaatacccattacttgctgatataactaattatgactatagcgctgaaaccagagtaataattgtcgatgtaatgaatgtattaggctcaaatactccagaagggcaattgcaatcagggattatgtttttatttgcacgacacttagcaactaagaattatttcttaccagcgttaggtgattcttttttacaaagtattcaccctcgttatcgtgactaccataagaaacgtattgatgaattaagtgaagaaactaaacatatttcttatgatgagtgtcataattttagaaaaatacattttattcaagatgcattaaatacatctgatttagaagatcgtaaatttggggtgcgtacagttttctcttctcaatatgtacagcatatgcctgactcggtcgttaagtcagtaaatagtttgtttatgatgcgattagctaatggagataaagaatatctagagtcgctagggatctctattcctgatgatgtaataactaggtttaatcgcttgtcaggtggtgcttcaaaagatggaagtggtacatactttttagctatattcaaaacaacagagggaaatatctgtcatattcttaaaaatacagtaggtgtaaaacaactttgggctttaacttctactatgaaagatagaaagttgagagaatatttgtacaaaagaataggagtcaatgacacagtagatattctggctgaaaaattcccaacatcaacagctgttccatatttcaattcattatctgattcctttgatgaggatgatgaaagtaatattacattaatagaaaaagttgctaatgaattaattaaagaacacgcaaaaaataaagggtatgggtcatga

SEQ ID NO: 302126 - DNA, 477 bp, Proteus mirabilis
atgagtaaaaaccaacagtacgagaaatgttctatatgtggaatacaaacagatgctatttatgaaatagccgatagcgataataataaattattatgtttattatgcttagagcaagaagaaaatattattccatctgattcgactgttggtttttatggtgtcaaaaacaacactagggaaaattttgctctcttaaaaagagcaattattaaagctttagcctgtaaagataataaactagaaaaaaaagcaaaattaatattaaaaaaattagatgaatcatcaaatttagttttgaatttatatggttcaacaaataaagaagatttgaaagtacaaattagccaacaaaaagaactcgttattattaatagtgattctgatgttatagaaaagattcaagaagaagaagatttgtatcctgaattttcagagtgggaaaatatattttcatcatatgagggggataaatga

SEQ ID NO: 302127 - DNA, 393 bp, Proteus mirabilis
atgttttataaatttaataacctaatgtcaaaagttaaagaaattgtggtaagtaaaaaaaaccaactatctacgattttgatcagtatgtttttaatacctacatcagcacgagcagaaggtaatgtttgggatattgttactagctttggggatggtatgaaacaaattagggagccaattttttggggagctggtacagttggtattgtattaattgctgtgggagtgaatatgattaggactattaatgatcctaaaaaacaaggtcaatctcatggtagaggattaggaacagctgtttcttgtattctcgctggtgcatttttagttggtcttgcatcatttattaaaatttcaacaaccacagcaggcgttgaatcatcattataa

SEQ ID NO: 302128 - DNA, 516 bp, Proteus mirabilis
atgaatttagacattgatagcattttaaataatatcggtgaacatgcgcctctgattgtagtaagtatatttgctttggctagtgtagcgggaatattaggtactattaattttattttaactgctaaacgtcaggctattaacatgcattctatccgtatgggcaggatcatgttagggatttttagcgcaacatttttaatcgcattacctgagttcatatcgcaagttggttctggtttgagtttaggatatggggatataaattatggagttccaaatgttgcgtctaaatccatgtatggttatggagcagatgtaataaattctgcgttagccatagctagagtaatcggtgtgatttttgcgtatggaggaattagagagatagcagattctaatttagatggtaatacagatttgtccagtgctaaagcaagaagcaaaggaataattaaatttatttgtggtgtcttgctcgtttttaaccctgaaataatcgaatcacttgaatag

SEQ ID NO: 302129 - DNA, 690 bp, Proteus mirabilis
atgcaaaatcaagatattttttcagatgattttaatgaaggctctgacgctataaaaaatgatcactcaaccagagagtctccattaaagagagaaaataataaaaaagatgtaaaacaaagtcttatatctaagtattggacttatttagttataggtcttgttgttgttggctttattagtattggtttatatgagccatctagtaatagcgaaaagaatgaaactaagtctaatcaaataatagaatcagaacaagacagtctgttttacgatgaacctttcataactaatgagcgattaagtgttgacactgataagatagaacaattatcaaaagttatgcttgatcaaaaaagtgaaatagagtcattaaaaaagcaaaatgagcaatttaaaattgctttgatacaacataaaaatgcaattaatcaattgaaaaatgatatttcactgaaaggcgataacacggaaaataaagttgaaaataaaaatctaatttcaaaagggtcgccaaatgttcaattacagaacatgagtttaaacgatattactgtaaacttagcatggattaaatataaaggtaaaacctatgctgtagcaaaaggcgatagcataggaggggtaactgtcatatctattaatcctattgatagactagtcgttacaaataaaggtcttattaaataa

SEQ ID NO: 302130 - DNA, 1173 bp, Proteus mirabilis
atgtctacaaaatcacaatctataaagaaaatagtgataattggttcagtaatagttgttactggtgttgtgattggttctttatttgtattctcagacgatccatcgagtaagagaatagaacaatcaaaaattgttaacaaacagtctagacctgacagtaactactcagataataaagatgaaagttataagcttttattacaagaatataacgatattaattcgcaaaaagcattcgatacaggaaatagctatgtcggggttcctgttaacgaaaaagttgatgaaaatactaataccgacaagaaatatgattgggaaaaacctcaacagaataaccccgcaacaaacaatactcaatcatcaaataatgataggcaacgagaggagattctaaaaagaaaattagcattattagctaaaatcgaagagaaaagaggggctactagcgaaagtaatgcaattttcgcctccgcatcttatgctacaggaagtggagaagggcagaatcaatgggctactagcttatttcctgaaagtaatcaagaaaacacaaacacaaacacaaatgctgaaatagcacagaaaaaagtcggtgaagttatcgttcaaggtttatctctatttccttctaaagttgaaactagagttgatagtgatagccaaaatatgaaaatgctggcaactattaaagcgggtaaattaaatggagctagattgtattcaaaagatatggctcttgctggagatggtattcaagttcatttttctgaaatgcaatggaacggtagatactacaaaatagatgcatatgcagttaatgcaaatacaaatgaatttgcagtcgcaacaacggtgagtaaccgttatttcagtagaatattattaccagcattagcattcggaataggaaaaacaggtcagctgtataaagacagtaattctaatgtaatagtaactcctaatggtggggaatatagaagtcaaggtcgtccagatggtgaagctatagctggcactataattgggggaataggggaacaaacaggaaaagtgatggctgaggatgctagcaaaattccacctaaacaagctattttagaacgtaatgaaattattggtgttcagtttataaatccagtttataccagtgatgttatagaaaaataa

SEQ ID NO: 302131 - DNA, 1011 bp, Proteus mirabilis
atgaagattagattattagttgctcttattgcctcattagttacagcaggtctaagtgcagaagaatctaaaagtgatattgctgagatattgcctgctacatctatgtcagatgttaataacaatggtaaaaatgaaaatgtagataaacaggatattactaaaagatcaggacataactcacctactgaaactacacctatcgaatctgtagctcaattaccaccattaccagatgaccttcaatccttagttgagccaatctcaccagatgaaattagggcaataaagcaaaagttaggagctgtagaaagtgctgttaatgaagttcaatattcgccagttccaaaaattagtagtcaaactgttagtttgtctgctggttctgctatacctcaagtaagaatatataaagatgttactacttctatcactttttcagatgtgacggggcaaccgtggaagatcagcgctcaaccagttaatgcatctccatcgacgatgaaagttacttatattgaatcgtctccaattatttttgtgcaaccgctgagtaatcatgtaaattctaatgtaacagtcgctttagaagggctaccaacaccaattatattaaatgtagtaactgcaacaccagaccagaataaaaaaacagttaatgttgattatcgtttagatctaagaatacccaaaagaagccctagtacgcctattcgaacacctataccgacacaaaaaatagatctttatagcaaagaactacaggcttttgtcgatggtgttccccctgatagtgcaagaaaaatcaaattgcgtaatgctccatcaaataccgatgcttggttattgggtgatgagttagttgttagaacggacttatatctacgagatgaattcaccagaacattgacatcaatagatggtactcacgtttatgttttagatgttacacctgaaatatcactttctgatatgagtaaaactagacgtgtatctgttgaaattgattaa

SEQ ID NO: 302132 - DNA, 666 bp, Proteus mirabilis
atggataaaagtgatcacagtcaaaatattgtagctgtaataacagaatatattacaaaagaaacgaaaaaaaagctaaataaaacatggttaagtttgtgtttggttttatcgtttgcattgatgatttctattattgggaatgttttgttgagttatcaactagctaacaaagagaaagaatatttcgctacgaatggaggatatttgttccgtatataccctacaaaatatcctgtttatagtgaaagtgatatacaagattttgcatcaaaagtaattagtaaatcattgcaattgaactttgttcaccttgatagtcagttatctgatgttaagtcaaattatactcaagatggttacgattctttttatatggctctagataaaagtggttttttaaaagaaataagagagcaaaaattaagcataaaagcgttattctcaccagggaatttagtcacaaaaggagaaattaaagtaggtaaatataaaggttcttatgcatggcaatataaatttccagcagaaattcagaagtttagtggaaatggaacaagacgttcaatttcttatgatgcattcgtacaaattatacgcattagtacaaaagataatcctagcggtattgctgttaatcaagttattttgactcctgctaactaa

SEQ ID NO: 302133 - DNA, 621 bp, Proteus mirabilis
atgacagatatggtttttaccagacatttaaattttctaagaaaaactcttacagatcctataaaaataaagaagtatttaaaccaattctctgatgatgaattatatcatacaaaacaaaacatgagcaacttgttagatgatataattaaagatagagagtcaaaacatgaggagctacaaaaaacaaaacatagggttattgacttattaaaaaaatcaggagttgatgataatgatatagatcatgtgttaatccaaatagcaacttcacaagatattgattctattgatattgtaggaaaaagaaggaagttcaataaaacgggaaagtttcctgttaaatataaagctatcactaatgacgaagaaggaaaccagatcgcatattcatggactggcgtaggaagacgtcccaagttttttcaaggaatgaatgatgaagagctagaaaaatataatatattacctgaaaaaaatacaaaacttcctgtcatgtatgaagccactgaatacaagaatggtaaaaaaataacgcacaagtggtcaggagttggaaacaaatctaaattcttttctaatttatcaccagaagaaattgaaaaatacagagtaaaatag

SEQ ID NO: 302134 - DNA, 534 bp, Proteus mirabilis
atgtttacaagcaaaaatcatctaaaccaagaccatagaataaagaaaaaacaaaataaaattttatttatattgtttcttctatctatatcatcctattcatttggggctaataattcagttcctaaacatttagattgtcctgctggaaaaatagcacttgcttctcaaaaagctgcaatagaagcagaaatgaaaaaaatagatgatttaagcaatgagagcttagattatatggatgaactatctcaatgcctaggtggattatcagtaaatattaaaataccaacattcccatctattgatgggatattagacaaaatcaaggatgaggcttgtaaggtagctagaaattctatagacgaacatattggcagtaaaataccttcatctattgatccttggaaagatattcagaataaaatatctgacagtaaatatggggaatatataccaaaagctggtactgataatataaatattaatagtaacgaaaagtttaaagatgattcatctttcccgtggtcattatag

SEQ ID NO: 302135 - DNA, 2250 bp, Proteus mirabilis
atgaacaatgaagactcccccgttttatgggtttttgctggaattaatggtgcgggaaaatctaccattcagcaaaatattttagaaaacactaatgtaaaaattataaatgcggatagtttagcatctcaaaagcctctcatgtctagtggcgaccttaatacatttggaggtggtagagatgctataaaacaagttcgacaggctttaaaaaacaaagagtcgtttagtattgagtctacgttgggagggggcagtaacagagatacttatgcattaaagttaatgcaagaagcccaaaaaaaaggctatacagttaaattaatgtatgtggcgctcgattcacctgaaatagcaaaagaacgtatcaaggaacgagttaaaaaaggggggcataacattgatgatagcattattgataggcgttatcctgaaacacttagtcgtttaagcagagctattgaattagctgatgaagcatatgtttttgataatacaaataaatttaaattattagctcaaaaagaaaatgaaaaagttttttactttgatccgcctaagtggataactcagtatttacctgcaagctataaaagtaagaatttagatgcacatgcacagactaatgaaattgatgctgtaaatgatgataaacagaaagaaagtttaaaatcagacgtagttaatggatttatgtttgataatggaggtatggaaaatagtcgattagatttaaacgccttggctcaaggtgttaaaactcatttcgatggtgaaaaaacgcactattactttgaaaatgaactagcattctttgactatggtaagtctctcagaatggctaatgagaatgcatcagagaacgatgctatggttctattagcattacaaacagcatctacgcatcataagagtggttttaaaattgtgggaaatgatgcttttattgaaaaatcattacgtcttatagctgaatatgatctaaaagttatattgactgataaaaaacagaataaagaattggagattataaaagaaaaacttattaaccacactaataatgatgttaataaagataactcaatgcgagtaaaagagagtgcaagcccatatttagttaagccatctgaaaataattcaaatgtttttaatgaaaatttaaaacaaaatactaaatacagtaataaagaaaagtccataaaagatcaatctactgaaaaacgcaaaaataataaggaattcagaggtgagctagtaaaaagtggcagtgctccttttgagtttaaagaaggtgaaaaaattactccatacatagtaataaaaaacacagatagcaatgatgctaagactatatggggtgtcgattttcctagggcattggaggaaaataaagcaagaataggtgatatagttaatgtaaaaaatctaggtaagaaagatgttgaagttaatgtgccagttaaagataaagaaggaaatataaagtcttttaaaaagattaagactataaggaatacatgggaagttacacctgaatatcctaaagccactaatacaaaccctgattgtgtgccacctaaagattataaagcatatgattatcagtcttttattaaagtacaagataaagtatatgatacgctgtactcattgtatgagaaaaatgagcttacgcctttgttgagtaatgacattagcaattataaagaagattatatttggttttatccaaatggaaaagtagtccctgacactgaacctaaaccattaacattacctgagattccagaaaacaatagattaacaggaaaaatgatatttgttcaggaaggaactaaaggggcttcaattaccgatgctatattattttgtggtaaaaatggatttttccaaggtgttattagggatgaaaaaaccgatatttttcatgatgttatagctaagtctaatactattgaaaaggatggaatgagaaaatcctatatttctttagctaagttaaaaaacaatcaatttgaatattttggatatgggaatttgaacgaggatggcacattactaaaatataaaaataatgaagatggtcaattaaaaacaatgaaactatttaatcacgatatcaaatatcaagaatcttttaatgatttatttaataatcataataaagaatttagaaaaaatgaattaaataaacaaaatcaagaggcaacacatgtttacaagcaaaaatcatctaaaccaagaccatag

SEQ ID NO: 302136 - DNA, 216 bp, Proteus mirabilis
atggaaaatgattttaaaaaaccagaaaaaagaataacagacataattgacaatccagacctgatcattaatcagttatttgatagttctgatagtttggtatttagggatgaaaatactccagcaggatgttttactcgtaagtataaaaacgggaaagttgagcactttaagcgagataaaaacggccaagaaattttagttaacaatccataa

SEQ ID NO: 302137 - DNA, 258 bp, Proteus mirabilis
atggaaatgaataaatggaggaatgcatctaaaccgttacaaattcaaggaattagttggggatggtatcttcttatttttacttggttttttcatatgactgtaagttatttacttttcattattttttggttgatgtttttagctttcctaagttacaaaaaaacgtctctcagtttgttaatcggtaaagttcggatctggttaagaggaaataacttaactggtcgtccttggtgggttagaaataacaaataa

SEQ ID NO: 302138 - DNA, 1206 bp, Proteus mirabilis
atggaaaccaacgatcaaatagagcagagcgtattagatgatttaattattaaaaatcaacctgatagtgatgaattaaaagagttttttgttaaatgtagtaaacataatgtttcagatattttattacaaggcggttctaaaatatgggttgaaagatatggacgacaaatttgtgtttctaaaaacataaggttgttaaaaaataaaatggaagcattagtctctgagctgtggggggatcatgtgagaggtgctctacgtcagggaaaaatatttaatacaacctttcaaatgagaggtcaagaaaaagacccatacggtttagagcgcaaccaaatatttagagcacgaactaattttactcaagcaacagtaaacaaagaaagtgagactatcacagcaacattacgaatattaaatagtgttattccagatttactgagtttaaaaatagaaaaagagttatttgaaaatctattaccatcatcagggttaggtattatcggaggttctacaggctcaggtaaaactacgttacaagcatctacattacagtattgtggtgaacattttattgatagaaaagtaattacgttcgaatgtccagttgaatacctgttaggtggtatgaaatggatttctcctgaaccagcacaatcagaagttggtatagacgttcccagtttcgcagaaggtattgccttatctgctttacgtagagcacctaaaattataagtgttggggagttattagagcctaaagcgatggaagccgctattacagctggtgaatcagggcatttttgtataggaacagagcacattagtagtgttggtgaagtatttcctagaacattattcatgtttccaactgagtatagagaagcaatagcattttcttttttaaagacactccgttatgtcgttgttcaacgtttagtcaaaactctggatggaaaacgtgaagcagtaagagaatttttcatctttgatcaagaagttaaaaactttttattatcaaagccctactttgaatgggggcggttaatcgataagaaaattgcaaatattggtcagagtatacctcaaaaaagttatgaactattcaaaaatgacattatttcctttgaggaaatgttacaagtcgcaggtactacacttgattatgaaaaaataaagagaggtacttatggaaatgaataa

SEQ ID NO: 302139 - DNA, 789 bp, Proteus mirabilis
atgaatattaataagttattgattttattgcctgtattatttagttcgtatgcattttctaacgaacaaaacaatttacctagtcctccaaaattagatgaatatctaaaccctagctcatcttctaatgatgtagatagtgttacttattcaatgttgaaagaattggctgaaactacaggttttagaggagggaaagctgaacgttcaatagaactgttgaatgcgatcgacaattattcatcaacattagatctgatgtatcgatttgaacccttagtcaatgctcaaggttatatccctcctgtaattgttgaatctaaagatgtagctcatataactgatgaacagatgagaaagggaacaatagtttatgaaatattaaaacctgcgcgatttgtcagtaatcccccatcttggaggtcttacttgagaacaggtttatatagcagtgctatcgaacctttagatagtgctgttttacctaaaaattcaaaagaattagatgtttggaaagaagggattaaatctggttggattaaaggcagagagaatgctgataatattttaactgcgaatttcaaccgtttaactagagattataacggtatgcttagatattctacgttattacagcaaaacatgattaaaccccctgttgtatctcaaaaaattctcactgtaactggttctgatcaacgaatgatattaggtgatgaactcaaaactattgaaagtaatgcaacattggagttaaacaaaggaaaatggaaaccaacgatcaaatag

SEQ ID NO: 302140 - DNA, 480 bp, Proteus mirabilis
atgcttttaaaaaaaaacatcttaatttttagtatattaatcattagtgggtgtgttacacataaagaatcaagccaagttgatgctaacaagtttgtttatgatgaattaacaaaacaagctatttcaataaaattagcacaaaacgagctataccaagctggtgcaatcaatagaactaatttcaaaattcctactgttattaataaagactctcaagggctaactgttaattggaatggtgatgcaagagagttactttctcaattagcaaaacaaagtaacaaaaaattctcgacatcaggagtctctttacctttacctgttagtattaatgtgtcgggtgcatcatattattctttaatcaatttaattcaatcacaaatcggttatcgaggtgtaattgaaagtaatatcaatgaagtcattttaaattataaaggtgacagtaaaagagaaactaaagctatttggaaataa

SEQ ID NO: 302141 - DNA, 1950 bp, Proteus mirabilis
atgatacctaagattataaaaaacaagcgacaatcaaagggattggaaggtataagcaaactgatatcatatatcagcactaagaatactgatcagtcagaaagcctgagtgatcagtattcttttgttgataattcagctgaaaagctagtgaattatatatctagaaatgctagtgaaatcctagatatagaaacatattttgatgatataactctgctagatgttgatggtatatctatgattcacaatttagattgtgactttcataatatagctaaatccatgcaagctacagctttacaggctgttaactgtaaaagcccgataatgcattacgttttatcatggcagagtcaagaaaccccatcggataaagaaatttttcaatcagcaattttcactctaaaaagcctaggaatggatgagcatcagtttatggcgggtatacatagagatactgataatacccatattcatatagccgttaatcgtgtaaatcctaggacaggaagagtaaatacatgcagttattcacaagaaatattacataaaagctgtagattgttagagttaaaatatggttttaaacatgatgtaggttcgttcattgttaatgataaaaatcaggtagttagaaataaaaataaaagcaataggctacctgaaaaagcttataagaaggaaagatatacaggtaatagatctctatataattacttagaaaatgaaaaagtaaagcattttgacggctctaaattatctttaaaagatgtattagaatttcatataaataagtctaattcgtgggatgatttgcacctaatttttgcaaaagcaggtctaagtattgagaaaagtagtcatgctaaagggttaataatatcaacaaataatcttaaaaatgatgttgttaaagttagttgggggaatgtctttactagtgataatttgaaattttccaatttagtaaatcgattgggtagctttaaacaatgttctcaagacttgggttctgttcctataaatctgggagttggctattcaccatacttagatattagagattatgatgaacgtactttaaatagaattataagatttgaagataggcttttgttaagaggtcagtatgagtcttataaacttcacttacctatgtatcagtatgataaggatttgtataaagaacaaataaatagcatcaatgctcatactagaatgctaaaagcaaaagtaagatcgttatataaaaatcctctgatacgtaggcagttctataatgtttgtgaattcgaaaaatatcaaaaaataactcatttacgtaatgtggagaaggataaaagaaatggattttatgcagataatccaagacttacttatagacaatgggttgaaaaagaagctttctctggaaatgcatcagcgttgagtcaattaagaggttggtattactcccaaagtaaaaaagaatctcatcaaaatagtatacttgataagtttggtgaaaatagaaaaacggcagttaatgcaatcatatgtaaaggtagaaaagatgttcttataacagaatcggcttcattctctttacgttctaatatgcttaaagatggttctgtaatatatgaaaatatagataatgaacgaccaactttgctggatagaggtaaaattatttttacaagatcttctatggataaaaaggacattctatctgctgtagcattagcttttaacggtggaacagaagaaataaaatttgttggtaatagtgattttgttaaagcttgtactgagtatgcaaagctttacaaaacccattatgaacagttttctgatgtttctatttatagtgatgtaagtaatcaaaacatggttgccaacgttcaaaaaaatgaaaacgaacaattgcaaaagattaataatggtgtacatttaaggcataagtaa

SEQ ID NO: 302142 - DNA, 321 bp, Proteus mirabilis
atgagttcgagtgaaagcagaaaaacagactcagtgatagtgattcgctgtaataaagaaacgaaaaaactgattaaagataaggctgagttagcaggagtttcgatgagttcttttatgcttagtacagctttatcaaaaaagataaagaacagaagtgattacaaggcgttaggtgaaatcaatcgtattgctgcattacaaaagcatttgtttaatgaaggtaaaagagttggagataaggagttttcagaggtcttagttaaacttaaagaggtatctcaactgctaattgaagagatagaaaaaaatgatacctaa

SEQ ID NO: 302143 - DNA, 357 bp, Proteus mirabilis
atgcttaacattactgataaacttaataaaataacgtggggtactaaaatgaatactgaagctggattttattcaattgaaaaattagaagaaatcgagaacaaattaaatgagcttcccgatctctcaaaaaaacggtttaacaaatcagattcattagagatcttaaaagatagtataaaaacattgaaaaatgaaaagggctatacaataagtgagatcatagatgttctaaaaaatttaggatttgaaacaattacacaaaaagaaataaaaaatattgtagaaacgaaaaaaagaactagaaaagtaaaaacaaataaatctacagataaacccacaaattatagtgaataa

SEQ ID NO: 302144 - DNA, 4716 bp, Proteus mirabilis
atgggaaatgaatttttcgcagccaagcaaggcgataaattaatgcactcgtcaatcttcgccgatatcgtgtgtggtgtggttaaaggggcggtttatgccgcgatagggacggccgctgtggcgctgaccattgggacaggcggtatggcaacggccgccggtgcggccatttttgccggtgcagggctggcggcgggctttactatcggtggattgattgatgatgccgctgattgggtcgcggatgggatcgatagcttgttcgggctaagtaaccctgatggtgaaatcgatactggctcgaaaaatgtacgtgtcaaaggcaagggagccgctcgcgcagcgggaaaattaccgtcacccgtactattagcctcaattgcggcagataataccccaccgaaagaagaaaaaggcaccgagattgccttacgcgtattgaaaaataccgccatgatggcgactggggcattttctttattggctggtaaggtgctagggagccaaaccaacaatgcggcacccatagcgctcgatccctccgagtttcccgaatacccctcaccggagcaaggcttttttgacagtattctttccccagtaaaagctgcgaaacacccgaatgctgaacctatgcctttggataccatcacgtgcgataaatggcattgtgctagcgccccttactttttagccgaagggtcgaaaaaagtccaaattaatagccaaccggcgtgtcgtaacggtgatagaagcacttgtgaagccaaaatcagtgatacgcaagaaaaagggattgtgcgtattggcggtggcagtgtggtggtacgcgatattatgagtgggcgtaacccctttgccgaaatgtttggtgaaattctcggtggccttgctgttggcgcggcgtctaccctgtttcgcagagggggactcaaggcgataaaacagtgtttgaatagtgtaggctgtactttggtgagtgaaatcgccagtaccgcggtgggcagtatggtagtcgcctcggtgacccaagcctttaatagtgtgcgtcaccccgtgcatgcggctacgggggcgaaagtcctaaatggagaggatgacaccgattttattattgatggtgtgtacccgttagtctggtcgcgtatttaccaaagtcgtaatacgggtgaaaatcgtttaggatgcggttgggcgatgccgtttgatgtctttttgacaattgacgacacaggtaaagggcttgagaatgaaaacatttattatcatgacatgtcggggaggcgtttagcgttaggaaaaatcgcccttggtcagaaagtgttctatcaagatgaaggctttaccgtctatcgcacgacaaacaatcttttccttgttgaatcggcggaaggtgattatcaatttttcgaagccaatccacataaaatcaatacactgcgcttaatgaaaagtgctgatcgtcataataacgctttacactaccgctatgctaatgacggtgaattggtacaaattcatgatgatgcgtatctgaccgatatccggttacattatgatgaaatcacccaacgcttacagtcggtgacccgccaccaaggacaagaagaaaaaacgctggtcacttatacttatgatgcacaacagcgtttagtgcaagtcactaatgcggataagcgagtgactcgtcgttttggctgggatgatgaatcgggtttaatggccatgcaccaatatgccacaggggtcagtagtcattatcgttggcaacgttttgatgcctttaccattgaagacaatgaacctgagtggcgagtggttgagcactggcttaaagacggtaaacgctgtttagagcataccgaactgacctatgatttagctcaacgaaccctcaccaccgtggaaacggggggcgaaaccaccttccgtcgctggaatgaacaacagcaaattatcgaatacactaatgcattgaatgaaacgtggtggtttgaatgggataccagccgcttattaacgaaagcaatagccccagatggcagtgaatgggggtatacctatgatgagcgcggtaatttaacccaatcgaccgatccggaacaacaatcgacttgctatgattgggacaaagattttgcgtttcccacggcacaaactttgccaaatggggcggcttggcattgggagtacaatgagcacggcgatattcgtcgtgtgattgacccgcttggccatatcacgcgcttggcgtgggatgaccaaggcctgtgtctggggcaagtggatgctaagggcaatgaaacccagtatcgctataatgcccgcggtcagttaatcgagcaacgggactgttcgggttatcccaccaccttgacctacgatgattggggacaacttcgctcgttgaccaatgcacagaatgaaaccacgacttacacctttagtgaagcggggttgttgttaacagagtgcttaccggatgggacagaaaaccgttatgactatgatgccaccgggcaattagtgggaataacggatgccggagagcgccatattctgttgcgccgtaaccgtcgtggacaagtaatagcccgacgcgatccggcagggcattggttgcattttcactatgatactttcgggcgtatgcaggcgctggagaatgaacagggcgagcagtaccgctttggctatgatgcgttacaccgtttaaccgatgaacacgatttaatcggacaacaaaagcactatcagtacgatgtgatggggaatgtcacccagataaaaaccactccggggccttgcgttgatacgccgatacccttatccccgcaggtgaccaccttcggttacgataaagtgggacggttgctgtttcgagaaaacgccgattatcgcacggaatacctttatcaacctttgagtgtgacattacgccgagtccccatggcgatatggcatgaagccgaacgcaccggcaccaccacccgcgtagagtatcaagacgccctgacctttacctacgataaagtggggcagttggttcgagaagccagtgctcgcggtgattatcagcatcactatgatgtgctgggtaatatcactcgcaccgagttgccccatcaacgggcatttgaatacctgtattacggctctgggcatttacaacaaacgcaatggcgagataatgcgcaattgacggtattggcggaatatcaacgagaccgtttacaccgagaaacgttacgcaccagtggcgccttagacaatgaaacgggctatgactgtcggggacgtattacgcaccaagtggcgcgccaaatgaatgcctcacagtttgtgaccccggtgatagaccgtcgttatcgttgggataaacgcaatcaacttatcgagcgcagtgtcagttatggtcaaacgggtgaggtttttaccgccggacattggtactaccacagttatcagtacgacccactggggcagttgacggcgcatttagggtcggtacaaaccgaacactttctgtatgatgcagcagccaatttactgactcgtccgcacaccgaagcaccgcataaccaagtacaaggcagtgataaatttgattatcgttacgacggttttggtcgcatggtatcgcgctatgaaaaaggcagtagctcgggacaacgttatcactatgacagtgaccaccgcattatcgcggtggatatcgaccaagggcccttagggtatcagcgagcggaataccgctacgatatcttaggacgtcggattgaaaaacggttatggaaagccagtgcgattgccaacacagtcacctatcatcaacatgagccggatgaagtgtacagctttggctgggtagggatgcgactggtatctgagcacagcagcgcagcgccccataccacggtttatcatgcttacaatgaccaaagttatacgcctctagcccgcattgaatgtacggataacccgcttaatccgcaacgggcgatttattatacgcacagcagtttaagtggcttaccggaagcgttgaccaacagtgagggtgaaatcgtttggcaagggcaatacagtgcttgggggcatttacagcgtcaaacccgccccacaagcacgtttaaccgtgaacagaacctgcgttttcaagggcagtatttcgacaaagagacgggcctgcattataatacgttcaggtactatgccccggatttaggccgttttacccaacaagacccaatagggttggtaggggggataaatttatatgtttatgcgccaaatccattgacatgggtggatccgtggggttggagttgttttaattcatcaaaacggtttgataaaagaaataatataacaagtcgctttattaatctattaacaggcaaaacacctagtgatgttgagcattatttaaagaataaaggatggactgtgacatatccacaaagtgctacaccagcaaaaactcagcatgtcgtttttgtaaaaacaacaaagtcgggagaagtatatcatttagattataatccagcaggtaaaactcatgggagtgattattggaaagtgataaaacctaatgatcctatagaaaaagtatatggtcgtataggccatggaaatttttctcattatgataaaataaaaaattcacctgtttatattgatggtgttttgatgaatccttggagtaagtaa

SEQ ID NO: 302145 - DNA, 363 bp, Proteus mirabilis
gtgtctgagcacagcagcgcagcgccccataccacggtttatcatgcttacaatgaccaaagttataccccactagcccgcattgaatgcacggataacccgcttaatccgcaacgggggatttattatacgcacagcagtttaagtggcttaccggaagcgctgaccaacagtgagggtgaaatagtttggcaagggcaatacagtgcttggggacatttacagcgtcaaacccgccccacaagcacgtttaatcgtgaacagaacctgcgttttcaagggcagtatttcgacaaagacaaatttgtcgggaacaaatttgaacagcgcttgcgctggcccgtagggcgagtatcaggatga

SEQ ID NO: 302146 - DNA, 411 bp, Proteus mirabilis
atgaaattgattaccattagtgcgggttatattgatagcttttgggctccaatatgtgaaggaagaatcatccctaatgaatttataggattaaatctgaataattatgagagtgcacaaaaattaattggagaatatttaattccaaaagcgatgaaatacaaatcaaaatcatggcattattattttaaagaaacattaagatatgcaattaacttttggagtaatgagcgattgtataatatttatatgggggtattacctgaaatatctccacctcaaagtaagtatattaaaatgaaagatttttatttgttaatttggacaggaatgtaccctaatgaagaatgtgttgtatatacacctgaactttataaagaagttccttccatagaaataagatcattctag

SEQ ID NO: 302147 - DNA, 126 bp, Proteus mirabilis
atggctttaaaaaacgatgggctattaatgcgtttaacgctaattctgctcgcgactcagaaggcatatcaatctggcggatttgctcatcatatccataataaagagcagcatcatcaacagtaa

SEQ ID NO: 302148 - DNA, 990 bp, Proteus mirabilis
atgcgttttaatgtaaaagagtggaatgctgtttctgagttatttacaggaagtttattattaggaaatggttcatcaattgctatagatcctaattttaattactctaatttgttttccaatgctaagttaccggaaaatgtgaaaagtatttttgattcttttcactctcaagattttgaatatatcttaagaaaatttacccaagctacagtaataaataatatcttcgatattgattgtaatgatattcatcaggctcatagtcaagtaaaaaaaaccttaattaatacagttaaaggtattcacccttgcattgataaagttagagataaaattaataattgtgctagttttattaagcaatttgacacaatattcagtttgaattatgacattatgctttattgggctatcatgcaagttaatgataatcacccatatccactttttaaagattgttttaatcgcagtagtttttatgaagattttgaagaataccgagaatataaaggtaatcgttccagtcttgttttttatcctcatggcaatcttattcttgcaaaggatgaaaatgatgaggagttaaaattaagtattcagggtgacaattatcttatcgatcaaattagtcaaaattgggatgaccataattattctccgctgtttatctctgaaggtacaagtgaagaaaaattaaaaactatacgttccagtaactatttaacacgtatttatcatgaagcgattccaacaattaatgatagtttactcattttaggctggagtatgggaacacaagatgaacatatattaaaacaaattccttttaataaaattaggcatcttgggatcgtggtttttatgaatgataattatgaagatacatgtaataatttttattctcgtattcgtcaatttattgatccagacaaaattagtatttattttattgctcataatagcaaagcattatgggctaatgactaa

SEQ ID NO: 302149 - DNA, 1473 bp, Proteus mirabilis
atgataaaatcggccattaatcataaaaaatatattctatcatcgtggttaagtttattacttgttggatgtattgatactagcgattatgggaaatactcagcacaacaaccgatgccttataataatacaaactatatggcagcttctgagcaatacctcgccacacctcagcaagagcaaaccactaaaacgagctatggattggccgagcttatcgatcttggtcagcaaaataatcctgaaacacggattgcttggttattagcgaaaaaatcagccaccgatattggtatggtagaaagcacttatttgccgattattaccgcaacggcattggcaggctatcaaagaggaaaagtagatttacccgccaatccaattgttgatgatattaaaacatcaaacagtgcttttattccagcgttaacctttagatggcttatttttgacttcggcaaacgaggagctttagccgatgccgctaaacatgcttctttggcaacaaaccttaattttaatctgatgcatcaaaaaataattcatgatgtttctgttgcctattttagttatggtgcggcccttaaaaaagtcactcttacccaagaggcactgcaaagaagcaaagatattttatatgccatagagcaaaaacgtgcgcggggattagcaaccgtattagatgttgctttagccaaacaacaagttgcccaagtagaattacaacatgtgttagctaaaggtcatgaaaaagatcagtatcagttattactgtctgcaataggtgtctctccctttgaaaagataaaagtgaattatgataatgacgcgcgcttacctgatgatatttccccattgactcacgatgtgataaaaaaagcgttatcacaacgccctgatattttagctcactatgaattagagcaagcggcattaaaaacggcacgctctgttgaatctgactattttcctaaagtgtatctcgccggtgctcttgctggtggttcggggcattttgatgttcaggggttacctgaaattagccaacgaacttcatcgtcgaatattttaattggcgtgagtattcccttatatgaagggggcatgcgtcagtcgcgaatgagcaatgctcaatcagatatccaattagcacaagaaaatttgcgcaaaagtcaagatacggcaatcaaagagatctctctcagtgagaatgcgttaagatcggcccttgaagcaaacaaagcggctaaaaatctcgttgataccgcacaattaagttataccgccagtgtcgatttttttaacaatggattaggtacagtaacggagattaatactgcagaaattgcactattaaatgcgcaactctcacatatagatgcttatacaggttcattaattgccgcagtagatttagcctttgctttaggggatattgatcagggcttacctaatatacaccttgataaatag

SEQ ID NO: 302150 - DNA, 1962 bp, Proteus mirabilis
atgaaaatagagaagataagactacagaactttcgttgttttgggcatgaggtagtagaactcaatattgaagaagtactgacaacgcttgttggtggaaatggaacaggaaagactgcagtactgcaggctgtatctcggttgtttggtacatcatcagcacaacgctcggtgcagcgtcgtgattttcacatacctattgaacagcaggaattgcagtccggagatagcctctttgtcgaagctgtactagctttccccgaactagcagagcaagacggttctcctcttgatgcggttcctgagtttttcaatcagatggcggcttccggtgtgggggagcctcttaaggctaggatacgactacaagctacatggatggatgacgggacaccggaaggggcgattgaagaggatattcgctggataaaagccttggatgataattttgattgggatgattgttccagagtccaatctgtagagcgctcttcgatccagtttatctatttgccagccaatcgtgatgcgacaacgcaggtaactgctcttcttaaaggacggttatggcaggcagccaaatggtcaactgcattcagagatgcaagttctgattatgcaggtcaaatccagacctgcttcgagacggaagagccattgcagattttattagagtctctttcaacacggtggcaacaggttcatgaagctgatacagacagtcagccccgattaaggctcatagaaaatcgttttgaagagcttattcgtaaggctgaatttaactttgcgtctgatagagaaggtcaggagcgtcggttgtctgagctcagtgacgggcagcgttctctattccatattgcccttacagcggcaacactggaaaccgaacgggaagctttcgccttacctcccgatgacagttcatttgaacaggataaattacgccgtgttcacctaacaatcttagccatcgaagagcctgaaaatagcctttcaccgttctttttgtcacgaattatcaaacaagcgagggagattggcgaattgccttccgcacaggttttgttatctagccattcaccggctatcctgagcaggatagaaccaacggaagtgcgatattttcgtatggaccgggatatccggtgctcatcgatccgtgagctgaccttaccagaagataataatgaggcaagcgtttacgttagactggcagtaaaagcataccccgaactttattttgctcgatttgtgatcttggctgagggggactccgagcgtgttgtcattccaaaaattgcggaagagatgggtatatcccttgatccatcgttcgttccagtcgtccctcttggtgggcgattcgttgagcatttctggcggctacttaatgatcttgagattccatatgccacattactcgatctagatttagggcgtaagcatggtggagctaacaccatgaggtgttgtctccagaatctagtcgatatcggaaataattttggtaacgctaaccgtactaatgtggttcagattaccaaccaacagctttatgatgaaggcccacaaggtcaatggattgaagctttcaggggggaaggtgttttcttttcctatcctattgatctagattttgccatgttgcttgcgtttccagctgcttaccagattgccaatcctggtggacatggacctcgaagtagcgctgcagctattcaggaaaaaaaggtcagcacactgaaaactggcggtactcctgacttgtacgctgctgactataatgacgcttttaaatggtatccgtatttgttcctcagtcgcagtaagcctgagacgcacttatcggcgttttcccgtatcccagacagcgatattgctagattagctccttatgagcttagggcactcattgaacatgtaagccagaagcttaacctgctgggagaggatgcatga

SEQ ID NO: 302151 - DNA, 1866 bp, Proteus mirabilis
atgactcgcgtgaacaaagatgattgggtacctcagggggttagtagtcttgaaaacagagcttgggatgccttacgtgaaaatgaaagtagcgttctcgtgacggctggtgctggtgctggaaaaacagagtttctggcacagaaggcaacctatctactacaaacaggtatttgtccagcctccaaacgtattctggccatcagctttaagaaggatgccgcccaaaatcttgctgagcgggttgcaaaacgttgtcctagggatcaggcaaggcggtttgattcaatgacttttgatgcctttactaagggacttctagatcggtttcatccttctattccagagccgttcaatgcgcttggtgcttatcagattgttaatccttctcataaggattatggtgactttcttgagcgttatggttatcaaggtgtgagtgctcaacaacttgagggaagattgcctttgacaaacctgccaattgatttgttaaatggctctgaaatacaccgtgcgttagcagattactggcatgaacaatttttcaggcgcgaggaaatatctttatccttcccgatgataaaccgacttgtaaaactgttgttgcaggaaaattcatatatcagtagggccttacaggcgacttatcctatcgtttttcttgatgaataccaagacactacctacgctcagtacgacatgctgctaacggcgttcgatggtagcgatactgttttcactgcagtcggcgatgacaagcaacgtattatgggatgggcgggagccatggacgatgctttcgctcagtttgaaaaagactttggtgctaaacgtatatcactgctatcaaactggcggtcgcatgaagatctcgttcgtattcagcacgaaatagcccgccagatagacggtgatgtggaagaggtgcaagcacaaggagttcgagaaatagaaggggaagtctctactatttggcaattccgaagcacacatgacgagaataattatttagctgaatgggttaatcgtgaggtgctgtcagggcgagtcgagccacatgatgttgcaattttgatcaggatgcgggcagaccaggttgagcaggaaatagcccccgcttttgcggcacgaggcctgcgcatcagaaatgcagcccggtcagttggtgaaattcagattcaggatcttcttggagaagaactaacgggtatattcattcctttgcttcggctaggctcaacagaccgaagtccaggaaactgggcattagctcagcagaattatttgtttctagaggctgccgatccagataacgatctcacgcaagaactattgcaggttaagcttgaaacatttgtccgccaattaaggacggaactaacgcatcgacagcctgattcagattcggcgaaagtaatatcagagatgattcttgaatttgttggttctcagacgttgcggcaatcctttcccgcttatcaacggaaaagggattttgatagggtatggaatggatttgtcgcattgatgaaagagtgcgcagaacatagcagtagctggaccaaagcactggatgaatttgagggtgttgatcaagtagctttgatgaccgtacataaaagcaaaggtcttgagttccataccatgatattttacgggctcgataatcagacttggtggagccttacgccgcaacgaagcgaagagttaaataccttttttgtcgcttttacacgagcaaagcagcgtgcatttttctctcagtgtgttgagcgaggtcgtgctattagttggatacagcaattgctggctcctgtgggagtggagactatagacggtacaaccatattggacgctacttaa

SEQ ID NO: 302152 - DNA, 462 bp, Proteus mirabilis; identical to SEQ ID NO: 298454

SEQ ID NO: 302153 - DNA, 621 bp, Proteus mirabilis
atgcaaaaatataacgtcaatatccaaaaaggaaaaattggtgataacggtctggccagcgtgacaggatgggttaagtgttatcttgctaatcctgtaacacgcgaatacatgggatcaactatggaatatgtcatgtttgatgtttcattatctgcgggtgcttatttagatgagccaccattacccgaaaaagaaaatcaagccgttaggcgtagagaagatggcagtgcgtgggaaattgttgacgattaccgagatttaaccgcctacaatacgcaaacaaagcaacctatcatcattgattttatgggggcattgcctgaatctctcacattgttaaaaccgaatagtgagtttgataaatgggatggtaagaaatggattgttgacacagaagcccaaaaagcggcactcattacacagattgagcaggagaagtcacgacgcttagatgaagcaggtaatacaatcgcgtatttgcaagaagctgttgatgttgatctagccacagaagaagaggttgtcgcactgcaaaaatggaaaaaataccgagttctgttaaatcgtgttgatgcttccagcactactgatatcgaatggcctcaaaagccagaataa

SEQ ID NO: 302154 - DNA, 846 bp, Proteus mirabilis
atggcaacacttaacgaatccgctgtctgggaagacggtatttatcagcttgaagtctcagacccggtattaggtgggccgggaggtatcgccaaccggcaggcagaacaactggccaaccggacgaattatttaaaaaaacaggctgaaggtcagaaaaatgagctgtcagagcatctcaaagcggctaatccgcatacacagtatgcccggaaaggagagtcatatactaaagaagagtctgacggtaaattcccggataaaaacagtgtcgcttacctgacacatgtgaggcatcaggattttcagggaagtatcggcgttaaaacactgctttctgttcgtggtgccgataatgaggcagggctgacactcaaacccggcatagacaaatccctagcattaaaacataacaataaatggaactattacagctttccggacaagtcgggcaccgttgtgttagcctcagatgctgagtgtgttgataattatcctgtcggctcacctataccctggccatcacctacagcaccttctggttatctaatttgtcaagggcaaacctttaataaggcaacatacccaaaacttgccgttgcgtatcctttaggaaaattacccgatttacgcggtgaatttattcgtggctgggataatggtcgtggtgtggatacaggcagacgtattctcagtcagcaattcggtaatacccctatagtaaattatgaatatccggtaggcagtggtttttcggtaacgattagcactgcaagtaatgatgaaggtgctaatgaaacgcgtccgcgaaatatcgcttttttatatatcgtgagggctaaataa

SEQ ID NO: 302155 - DNA, 2778 bp, Proteus mirabilis
ttggccggtaatttttctgtgggtgttgtcatcggcggcatcgttggcagcacgttccgttccgcgatgagtggtacccgccgtgcccttgactccctgggggagacttcacgtcgtctgcaggagcgtcagaacgccttaacccgggccactgagcgttacggtcagttaggtggtgcccggatgcagcagcttaaccgtgagctgttacgggtaggccgcacgatggaacagattgagcgtcagcagcgccgcctttctgccgtatccgcaaccggcgatgcactgaaagccaaccgtatggcactttatggtcagggcgttgaaacctatgccatggctcaaacgctttatcatacaatctttccggcagttcagcagtctatgtcttttgaagacaagatgattgatatgtcaatcaccgcaaaatatgacactgatactcagaatcatctcgccgcacagataaaaggatgggcattaaaatacaatcagaatcaggatgagatgcaggaggcggtaggttcactcatcagtaataatatcgacagcctgtctgatatcagatactacatgcctgatattgcccgtgcggcaacagccacacgcacagcgggggccgactgggccaaagtcgccgctgtctggcaaacgtccctgaaaggagcggcagaagacttcggggctgtacaaaatattatggcttatgccggtgatcagggttcatttgaaatccctgatcaggtcaaatggatgcagtctcttgcccctatgatggaaggtgtcgccagcggtaaagatgccgtggctgaaatcggtgccagcctgcagattgcaaaaatcggggcaggttcaaccgatgaggcggcgaataactttaaaaattttctgaccaaaatttttgcccgggatacccaaaagcaatttacggatttggggattgaccttcaggcgtctcttgaaagttacaaatccgccggtatatcccccatcgaaggcatgatgagtatcattgaacgatacctgaatgccaaaagtcccgaggcactggcaggttttaaatctgccatgaaaatagaaaatgataccgccagagacgaagcgcttcaggcgctggctaaaaatttcggtttgggggagatgtttgcagatcagcaggtcatggcatttatccgcccgatgctggcgaatatggatcgatatcgtgaaatacgggccggtgcacttaaagcggcagataatgatcttctgggaacagcttatgaccggcgtctacaatccccgctcgaagccaccaaagcactgatgatcaatagtcgtgatcttgctatcacactgggagatcaacttgcaccgtcttttgtttctcttgtgcaggaattgcttccgcttatacaaaagacgaaaaactggatcacacttcatcctgagctggtcagcggtgcaatacagattgtgggtgcgctgctggccttcaaagcctcaaccattgccctgaaactggggctgaatcttctgctctccccctttgtcagtgtctggaaaaatctcgttttactccgggcaaactggttacgtctgacacaggcattcggtgaaggcggaaaattgcgctggctggcaaccgggctgagccgtgtcggtaaaggtgcagccagcctgggcaaaatactggccggaggcttactcaaaggattaacgctcgccggtaaagccatcctctgggtgggaaaagccttactgatgaatcccatcggtctgattattaccggtattgcggtcgccgcgtatctgctgtaccgctactgggggccggtctccgcattttttaaacgcttatgggcgcaggtcacctctgcattcagtcgtgcatggcagagtattactgccgtctggcagggcatttcaggctggttttccggtctctggactgaaattaagaccgcttttgacggcgggattgccggtgtcggccagctggttctcaactggtcgccgctgggattatttcataaggcttttgctggtgtactgtcatggtttggtatcgatatgccaaaaagttttaccgatttcggtaaaaacctgattacggggctggtcgacgggatcagtaatcagctgaccgccgcaaaagaaacgattgtgaatttcggcagttctgtctcttcctggtttaaagaaactctggggattaattcgcccagccgggtctttatgggattcggtgataacatcgtgcagggtgcggccatcggtttgcaacgcaccacaccactggcagcaaaagccagccagcaactggcagatcagatggtgccctcattaccggtaattcgccctgataatctgatcgggcaactggttaacgatgttcgtcagaaaattaccgctgttaaaaaccggctgaccggcacaggggcttcacttttcgcccggttatctgacaccttcccgtcattttccgtaatgccgtcaggcatatcgcctgtcgttcctccggtcttaccggggttgcatattgcagagtcaatgtcacccgccgcaccgcgtattccctctgacgaggtgatggctgcggggtatgccggacaacgtgccggtaagactgactcggccccggcaattcaggtcagttttaatccgcagttttttctcaataacaaagaaacaaccgtacctgacacactgtccggtgcgctgaatatgagtctgcatgaactggaaaaaatgctggcacgtctgctggctcagaaacaacgcagggagtacgaataa

SEQ ID NO: 302156 - DNA, 351 bp, Proteus mirabilis
atgaaatacctcaaatcgtttttttcttcggttaaaaaacctcgtttaggtggctggttactgatggctgttctgttgcttggcattatcggcatggtttccccgcaacagctaccggtggtgatttataaactgtcactgatcaccttagctgccgtactgggttactggcttgaccgttcgctgttccccaaagcccgccccggtcagtatctgttacacgataaaacactgatggcagaaggccgctatcctgtccagaccggacgccatctggtgttcgctgccgcattaatccgccgtgcgctgattgtcgctgcagtctgtctggccgtcgcgacagggctgtaa

SEQ ID NO: 302157 - DNA, 258 bp, Proteus mirabilis
atgacttcagcaactactaaacacagttcactctgtctgatggggattacctgcgatgaatatgacaccgcagaaaaaatttacaccctcagcgtcaatgctgacaaccttgaggaatcgataagagagatacgctccgcacttgaacagatagatagtatgcttagtccaatcctggaagatgagctgaacggaatacttatcggacagataaaattgacgattagtgctaatccaaaaagcagatcgccttactag

SEQ ID NO: 302158 - DNA, 561 bp, Proteus mirabilis
ttggaaaagtattacacgctagattctgcaaatagtctgtttccatttcatgtaataacactgcgtcaccataccccaaaacagccagaattggccggtttccttaatcaaatatatcccgaggggttgtcgaagcatggctataactacctctataatcctgctcttttcgatgataaccatcaaagagataaagcctttttgattgggctgatatttgaactggttcggcgtagcgacttccctgagaaaccatcccgatatcaatcgctgtttgcctgtcgggaaatcagtgaggttaaacaattcagggaattgctggcccgcgaacgtggtgatgatggaatacggatagcgccgatatatgaagtcaggaacgaaaaaccggttcaccttggtgatatgagactgcttgacagtaatggcccaattctggatatatatcgccaggcgtatctgtactggtcaggtgaaagtcttgcatatacaaatggtgaagagccattctgggagatattgatcccacttccggcaaaaacaggccgacgggtaagtgaatga

SEQ ID NO: 302159 - DNA, 771 bp, Proteus mirabilis
atgaaagaacgcactttacccatcgtcccctggataggggggaaacgtcgtctggcgaaacatattttaccgttattcccgtcccatacctgttatgtggaacccttctgtggagctgctgcactttattttttaaaaacgcccagtaaaacagagattattaatgatattaacggtgagctgattaacctttaccgggtggtgaaacaccatctggaagaatttatccgccagttcaaatgggcactggtcagccgccagatgtataaatggctgcagaacaccccggaagaaatactcacggatattcagcgggcggcacggttttattatcttcagaagcaggcttttggtggcaaagtcgcagagcacagcttcggaacgtccaccaccagcccgccacgttttaacctgctgcgtattgaagaagagctttctctggcgcatctgaggttatccagaacgatcattgaacatctggactggcgtcagtgtattgaacgctatgatcggccacacacgctgttttactgtgacccgccttactggggaacggaaggttatggtgtggattttccgatcggaaactatgtccatatagctgagctggcacggagtatcaaaggcaggatgattatttcggtaaacgatataccagaaatgcggcaggcgtttcaggggctgacgattcaggtggttgatatcagctacaacctgaaggtcaccggaaaagcagcccgcaagaaggagttgattatttgcaatttctag

SEQ ID NO: 302160 - DNA, 348 bp, Proteus mirabilis
atgtcacttggatcacgattaagagaagaacgaaaccgcctgggatttagtcaatctgagtttgccgaattggtaggggcatcctataaaagccaattacggtgggaaaaagacgaatcatcccctggggctgatgctctagctatttgggctactttaggacttgatgtgctttacgttgttacgggacagagaggaactttgatttccagcgttatcccaaaaatgtccccagacaagcaaaaactaatggacgcatttgatgaaatgacaccggagcaacaacgctcatttcttgaggttgggcgattctatacacagcccaaaccgggtaaatgtgccggataa

SEQ ID NO: 302161 - DNA, 549 bp, Proteus mirabilis
atgcttgcaaatccttcaaaacacgatgtgccgtttattacccgtctggctgaactggctggtgaagatattgccagtcagctctgccacgaatatggcgctacatcggtttatttacccttcagggtatggctacctccccaatccgtcgaagcgatcgggaacgcatttaccggtgacaactttgcggcactggccaaacagttcagcacaaacattaatgctgtttactgggctgttcagcagcatcagaaacaacagataaaacaggtgtttctggcgccccggaaagacggggaaaacgacgtacaagttcatcaggtaatcccggtgacgcaattgggtctccctgacctgctagaagttgtgcttcaagctgtaaaaaaggccacaacgcaggcgaaccagtatcagcctcacattgcgtttttatctctgcgtgaagggcattcagtaactgctgacgctcaactgtctgaagttgtgtcagaagaaaaccaatcaggcaattcagtccatcctgatattcagcctgatcactcagcgtag

SEQ ID NO: 302162 - DNA, 189 bp, Proteus mirabilis
atgactccagaacagattaaaaatcgcttccgtcaacgcgggatcacttttacccagtgggcagaagaaaatggttattcccgcaatgaggtttaccgtgttctcaacggccagaccaaagcacgttacggcaaagctcatgaaattgccgtaaaactcggtttaaaacctgccgcaaatgcggcgtaa

SEQ ID NO: 302163 - DNA, 309 bp, Proteus mirabilis
atgagtaaacccaatgtctccagttctggctcccgaattctgcgggtattgaaagcattacgtggacatgcattaaacggtatttcaaacggggaactggcatcggcacttaatgaatcaccggccaacattaacagagcactgaatacccttattgaagaagggctggccctgaaactggataacggacgttttgctcccggtattcaattgatacagattgccatggcgcacagtaacgaaatggcacgggcacaggatcgtattaatgaaattaaccagcgtgttatttcaggtagccgttattaa

SEQ ID NO: 302164 - DNA, 909 bp, Proteus mirabilis
atgggacgaacaaaatcacaacatgttgaactggaaacagatgtagcgttgcccggcgatatgaatgtcagcctgaatgccatgactgaacaccgcctcgaaatcatgcagcagtttggtgacggcctgccatatgaacgtgatcgcattgttcacgaagcccgcttttatatggcccagagtgctgaagccatgctggaagcaggtaaaagactgattattctgaaagaaaatgaacctcacggagaatttgttgcaattgtagaagaacaattggggttacatgttcgggctgcacaaagaatgatgaaagcatcattgaaatatctttctccgaaacttgaaccaaaagcgacaacgttgtcgcttttgggaaaagctaaattgtttgaactagtagctgaagatgatgaagaactatctgaattagcggatggaggcactgtcgcaggcctgacacttgatgatgttgatcgcatgtctgtccgtgaattacggcaggctctgcgcgaagcccgcgaaaccaacgctgcacaacaacgcgtactcgctgacaaaaacgaaaaaatcgactcgctttccaccagactggagaagaaatcccgcatccagccgcccaagcctgacgaagaagtgaagaagctacgcgcagaagtgacggcattagcggtagaggcggaatctgctatcgctgttcaattatccggtgcctttgagaccctgtgcgcatattgtgctgaaaacatgattgatacacccagagacttcatggcgggtctggtctgtcaactggaaagcaccgcgcgtagcctgcgctccacatttgacctgccggacgaaccgactggcaacgttgccccctcctggctgacagacccgatacctgaaattaacgggcgggaggaataa

SEQ ID NO: 302165 - DNA, 162 bp, Proteus mirabilis
atgaaagtactgatgacaaaactctggtttatgacaataaaagaaacccggaaaatcctggatattatcagttcattaatggggtattttcttttgtcggtagccattggtgccggactgacttttggttttttatcggtttttgtcatttacgggagttaa

SEQ ID NO: 302166 - DNA, 510 bp, Proteus mirabilis
atgaaagagataaatttatataaccgctcaacactttaccgcacagcactgaaaaccttcggcccggaagcgcagttactgaaactgacagaagaagccgctgaactggccgcagcggcagcccgtaatatgaacggggcaggcagtgaggtggatttggccggtgagctggctgatgtggaaataatgactgaacaatgccgtctcaacggtatgggaaaactcattgactttcagaagcagaaaaagctggcgagactggccgaacgattgggggtgacttacacccctgaaactgaaaaggcaccagccgtcttttacccgccacaattaacagcattagcgcaaaaattgccttcccgtgaactgctggaagactggtgtggtgctgtaccaaacagcgccttcatcggtgccacggacgaagaaattgcggatatggcgcgttttattctttgtgctatgcccctgcttgatgttcacggaggctgtgatgactcagcaaaatga

SEQ ID NO: 302167 - DNA, 651 bp, Proteus mirabilis
atgtttgacgcatcgttactcaatttgccatgggcaacactcgtgacgctgaccagtggctatatcggctattttattgcaaacgtaggtctgaaagagcatcacaaacctatagaggtgacattttcctcgctgattttcggtctgttatcaatgatggtttatcaggctgtgatgtggtctggtctgaatgcgtggctggcaacgccacccgcacttctgtgtgcttttatctgtggcgtgttctggcgcagatatgggcgcaaatggatgtacaaatttcttcgggataaagatatttcatggtctgataatacgcattcagcctggcaacgtatgtttgatcaacatggatattatatcagtgaagggtatgtgtatcttaaagacggtactgttcttctttctgaacatcccggacactttgaggggcagccgggaggggcatttgtcctgggggctgaaaaggatgtgttgatgtacgtcacccatgaaaaaaaaccgggaaatgataagtggctcaaaaaagaagttgcaaataaaaactggggagtgatggcaacctatattccagccgatcagattgccatgataaggataagacgaaccagaaaccgcatcatcaattcacgaagtgatgaaacagattaa

SEQ ID NO: 302168 - DNA, 153 bp, Proteus mirabilis
atgccagacaaaaataataattcaacaactgacttttctgaagacttaaaagggtgcgtcacctttgagtccgataactctgcacaaacaaatgattcatctgagcatcaatcgactcattctgatgatgacgcacctccgtcacgggattaa

SEQ ID NO: 302169 - DNA, 1338 bp, Proteus mirabilis
atggaaccgacactatgggtactaggtactctgattataagtatcttgctcattgtttttactataataaaacttaagtttcatccatttttagcactactacttgccagtttttttgtcggtatggcaatgaaaatgaacccattagaaatggtcagtgcaattgaaaatgggattgggggaacgctgggatttttagccgccattattggtttgggtactattctcggtaaaatgatggaaatatcgggggcggcggagcgcatcggtatcaccttacaaaaatgccgttggttatcaccggatgttattatggtattggtgggactgatttgtggtattaccctgtttgttgaagtaggggtagtgctacttattccattagcattctctattgctaaaaaaacaaacacctcattattaaaactcgccatccctttatgtactgcattaatggccgtgcattgtattgttcctccacaccctgcagcgctttttgtcactaatgagttaggggccgatatgggaacggtgatcgttgccggtcttgctgttggattattagcctcattagtgggcgggcctcttttcttaaaagtattgggtgagcgcttaccttttaaaaccgtaccagaagcattttctgatatggaaattcgtcaagaaaaagatttaccttcacttggggcgacattatttacggttttattacctattgttctgatgctgattaagaccgccgcagagcttaatatggaaaaaggcacttcggtttatattgcattacaatttattggtaacccgattacggcaatgtttattgctgcttttgttgcttactatattttaggtattcgccgtaatatgggcatgagtaccctattgaaaaaaacagaagatagttttagctctattgccaatattttgttaattattggtgctgggggcgcatttaacggcattttaaaagggagtggtttaagcgattcattggcggtgatcctctctaatttggatatgcatcctattttattagcttggctagtagcgattattctgcatgcagcagtaggatcagcaacggttgctatgatgggggcgaccgctatcgttgcaccattaatgccaatgtatccagatattagccctgaaattattacattggcaattggctctggggctattggctgtacgattgtcacagactccctattttggttagtaaaacagtattgtaatgccacattaagcgaaactttccgtttttatagtatcgcgacctttattgcttcatttgtggcattagggggcacttttatgctttcttttgtcatataa

SEQ ID NO: 302170 - DNA, 540 bp, Proteus mirabilis
atgtttatcggcaacaatatgtgtgcggttatcgctaaacactggctggtggataaagcctgtaatatgcccgcgcgtgatgcgatacgtcagggttacgatattgattgtgataacgacgatgatcgtgctatcagtaaaaagcatcgcaaacgagataaaaaataccgcattacacatcagcttaaagagcaggttcactttgggcatgtatacggtgatcgtttagcattattcgttgtggagacatcaaatccgaaagagtggtatgaaaacccgtttaatatcgatggcgtgaccaaaggcatgtacaaggggattaaacagattgatccacaatgggtaacacctgatttaacggacgccaatgttcaagatcctgccagcatggatttctacgaaccaacctattatgtgattggtgggcgcaagtatcacaaatctcactttattaagtttgtaccgtttcctgtgccgaatgtcttgaaaccaatgtacaactactttggtgtttctgttcctgagcgcatttatgagtga

SEQ ID NO: 302171 - DNA, 1566 bp, Proteus mirabilis
atgacacatattttgaaggcaaaaatcaaaaactttaagaaatttcgagagtatgagattcattttgatcccaaaagaaatattctggttggggataatgaagcaggaaagagcactatattgacggctattgaacttgtcttgagtggtagtagaagcaaggtagagagcttgggtatcgaagctttgcttaatgccagtgttgtttcagaatttctagctggtgagaagaatatagaccgtcttccgagtcttcatattgagttatttctaaacgaagcagataacccagatctcaacggtagaaataatagtgatggaacttatgctgatgggcttcaattgatctgtgagccgaacgaagagttaagcacggagatacggcaagttttggatactgaaggtgataactttccattcgaattttacgttgccaagtttattacattcaatggggacgtatactcgaattatcggaaatttttgcgctttttatctattgatagcactcaaattaacaacgagtacgcaaacagtcagtatgtaaaagccatgtatgaagcgactgtagagcaacctgtccgttacagtctaatgaatgaatatagacagcaaaaaaatgccttcagggatactcaactaaatgtgattaatgataatttagagggatacgattttgctattcgttctggctcaaagttcaatttggaaactgacctaaccctaacagaggaaggcattccaattgaaaatcgtggtaaaggaagacagtgctttataaaaactgcgtttgcattgagagagcgtgatgaaggcaagagaatcgatgtcttgttactagaagaacctgaaaaccaccttagtcacaccaacatgtataagctaattgatcaggtagaaaaagctcatagcaatcaggtgataattacaactcatagtagtctaattagctctagattagatttaagaaagtcgatcttactgaatagtgcagcaacaagacctgctagcttgacggacctcacgagggataccgctaagttttttgcaaaagctcctaaccataacatcttagagcatgtcctttctgaaaaagtaattcttgttgagggtgatgcggaatatattctgatggaatgcttatacgagcgaactaaaggtcatccaccaagcgaggatggggttcatataatttcagttggtggtactagctttaaacgatatatggaagtttctaagttattgaatattaggacagtggtgatccgtgataatgatagtgattatcagaaaaactgtatagataattatcatgattaccaggcagattgtataactgtattcgctgacaaaaataacacaagaacaacttttgaaatatgcatgtatcaagacaataaagaaatctgcgacgacttattttcaggcggagggatccaattaacaccgcaacagtatatgttgaataacaaaacaaccgcagcatttagattacttgacgagaaggcaaatgaaatcactgtacctccatacattagagaggccattgaatggataagcgagtag

SEQ ID NO: 302172 - DNA, 1038 bp, Proteus mirabilis
atggataagcgagtagtgctagcagttgcaggagcgggaaaaacacagcatataattgataaattagacataaatagtcgtgcgctgattgttacttacactgtaaataatactactaacctgaagaaacgtattttaaacaaatttggggtaatacctaaaggtattcgtgtttacacctatttttcattcctaatgtcgttctgcgtgcgaccaatcattggtaacgacataaagataaagggaattagctatagtgatccgcctaaatttgctaaacgcaacactcatgcacattacataagtcaaggagaccgactttaccataaccgcatttcgaagatgatgatggattgtgatggaatatctgacatctccaagcgtattgaaaagtattttgatttcttctgcgtagatgaagttcaagatttcgcagctaatgattttaatttactttgtcagttgtcgataatggatgtggagatattattcgttggtgactttttccaacatacttttgatactagcagagatggtaatattcaaaaaaacttacataacaactatgaaatatatcttaccaagctcaaagattctggatacacaatcgacttagatacactctcccacagctatagatgtagccctacagtttgtaggtttgttaccgaacaaattggcatcacaataagctcccatcgacaagatgaggtcagtattgccctaattgacgataatgagcatattaagagactattctccgacgactccatcgttaaattgttttttaaagaaagctacaagtatcttggaaggactgataattggggaaatacaaaaggcttggatgatttcgctgacatttgcatagttctaaacccaaccacattcacagcctataaaaaaggacggttggctacgttggcaccctcgacgttaaataagctatacgtagcttgtacaagagctaaaggtaatgtgtattttgtttcacaacgcttgttagacgagtataaatgtaaaccaagaatacagtaa

SEQ ID NO: 302173 - DNA, 1113 bp, Proteus mirabilis
atggatgtcaataaacttagagagatgctcatcgagcataatggtcttcaaaatactgatgaagtctatacattttattatgatgagacgaataatatccgaaaattatatttaaaagattctggctttaatgttaacaaagcagataattttatccttgcaggcattctgcataaagggcgaaacactagctgtgattattcgaccctatttcagatgcttaatcttcaaaaaagcacccatgagctaaagctcaagcatgttgctaagggtagttttttgaatatgcttaaatctgataagattttaattattctaaactggctcatcgaaaataaattctacatccattattttaatcttaatatcgtatactggtctgttattgatattattgattctattattgatgagttacatcatcctttttatattgtgaatcacatgtcacttaagagcgatttctatgagcttgctaatagcaattctgcagttttccttaatgctctatatgagtttaactacccagatattccagaagaaaaaattcatgtgttttgcagatggcttattgattttacatgcatgtacagttgtatgctgccaaatgttcaagctagtgtactcgaaaatttggttaaagaatcactgaaagtcgaagatctaccgtttatatcgggatctcatggtcgagaactgatcgatagctttatggtgttttatttaagaaacttatttttatttaaaaattccattcatatctttgatgaagaaaaaagcattcaaggtgatgttaaaaatttcccgttaactgacaatgatatgccaatacataatcatgagttcgttaaatcccacaactcagaggctattcaactatctgacgttatcgccggatttttgggtaagtatttttcttacttaaaagatgtaaatgatgaacaattagcgcttgataaggtaaatttaactagtcagcaatttaagactctttccgcattaaaacgcattgttgatatttctgatgatgtaagcagaggattttttaatgtagttagcagtgagggagagcggcgaagaaataacttgttcttacatggtgtaaaattataa

SEQ ID NO: 302174 - DNA, 708 bp, Proteus mirabilis
atgaaaaaattattacttagccttactatgctggcgataatatctacgccagtgttggctaaatcccctgtagctaacttaaaaatcaacggtgatattaagcccccaacttgtactattaatggagcaacacaaagtgatgtaattttcgattacggagtcataagcccaacacttatccctcaatcgaaaatttattcttatcctgccagtatggttcaaaatacagttacagttgaatgtgatgcaaaaacatatttaacctttgttgcgtctgatacttatgataatacagaattaagcgttaataatacgtcagactggtttcatttagtagataaagcaaatcctgaaactgcggttggagcagcttattttgtatgggataatgtgactgttgatggcaaaccagcgtatatttcacgagcaaacgatgctgctatcacagggactaactactataatgtcctatataaagggccaaccaatggttggacatcaaaacaacagacagaatcggttgataaaggctctctggctctaatttcaggtgaaattttccaagcaaatttcagacagggaattgaaagtaatcctactcaaacctttattttatctagagatgaattaagtaaaaaaggaatagatttatctaatggtttagattttatcggggaggctgttctcacttttaattttggtgtctaa

SEQ ID NO: 302175 - DNA, 819 bp, Proteus mirabilis
atgctagcgctcgctaatgtctatttaaaaccaaatagtagtttttataattttgaaaaagcacttaagctggtagagagagcatataacatacagccatctcctgaaagtaaattattattggctaaattatattctaatagtgagagggttcatcagaatattagaaaagcagttagttttctgcaagaaaacataactaatgataaattgacaggtaaaagccaaagagaattagtaaaaatatattttgattttggtgcttctgattatcttaaaaaagaagagattgtgaatattttaagagagagtgtaattaaaaataaatcagctggtacatttaatcaaaactatagcttagctcatttttatgcagatcttcttttagaagaaaatgtcgacaataatgaagaatatgctttttcattatatcaaaaagcacgaggttatacctatgaagctacttttcatcaagcaattgcgactattaaatataaaaatataatagatgatcaagctcttattaatattgtttcagaattgaaagatgatttagaaagcagaaggttgaccgaaaaaaaacgacaggaaggatatagtattcttttccgatatggaatggattcacagtatgtaattgattttattgtggaacgttcgctatatgatgataaaataagaaaggctattcaaccattattaagtcaaaatacaaatcttgcatttcaatatacaataaagaatataatacatgagaactcagctaacaatattaatgaagataatttaaaaaatattataaggatatatttaaattag

SEQ ID NO: 302176 - DNA, 1704 bp, Proteus mirabilis
atgtacgaatttgatttaattttgctgttattacagcaaatgtgcgtttatctcattattgcgtggtttctcagcaaaacgccgctatttacgcctcttttacaagtgactatcaaacttccacataaattaatgtgctatgtgattttctccattttctgcattatgggcacctattttggattgcatattaatgactctattgctaatacccgtgctattggctccgtattaggcggattattaggtggcccgtatgtaggctttctcgttggcttcacgggtggcttacaccgctattccctcggcggaatgacagcgttaagttgtatggtatccactatcgcagaaggattaattggtggattagttcatcgttattatgtaaaacatggacaaatgcaccgcatatttaatccttggacagcggctaccgtcaccttttttgccgaaataatacagatgagtattattttattactcgctcgtccttttgatgaagcactttctttagtaaaaaatattgccgctcctatgattgtagcaaatacaataggtgctgcgatgtttattaggatattacaagatagacgtgccatttttgaaaaatataccagtgctttctccgctcaagcattaaaaattgcggtttgtactgaaggtattttacgtaaaggctttaaccaagataatagtactcgtgttgcaaaagttatctaccaagaattaaaagtcagtgctgtcgccattacggatagagataaactactcgcttttattggtattggcgctgatcatcatttgccaggtacaccgatttcctcagaacaatccaaacaagccattaataataacgaagtcgtgtatgcggacggcaatgagacaccttatcgatgtaccctttctccaaattgtaaattaggctcgacactggttattcctttacgaggagaaaataatcgcgttattggcaccataaaactctatgaagcaaagaatcgcttatttagctccattaatagaaccttaggagaagggatcgccagtctattatcagcacaaattcttgccggacaatacgaaagaaataaacaatcactattagaatcagaaattaaattactacacgcacaagtcaatccccactttttatttaatgcattaaatacattacaagccgttattcgtcgtgatagtgatcaagcaaaacagttagtgcaatttctgtcggcttttttccgtaagaatttaaaaagacccgaagcgatagtgacactcagtgatgaaattgaacacgtcacggcttatttacaaattgaaaaagcgcgctttcaagaaagtttacagatagatattcagatacctgaacatttagccactgcgcgccttcctgcattttcgcttcagcctatggttgaaaatgcaattaaacatggaacatcacagttattaggtatcggaaagattacaattagagcacatcaagaagaccacttaatagtgatcgaaattagtgataatgcagggctttatcattcgcaaggcgcatcacatcagctcggtttaggaatgagacttgtcgataagcggcttaaattacgctatggtgatctatatggtgtactcgtggagtgtcagcctgataactataccaaaataaaaatctgtttacccttagaaaaaaatatggataacgcagcataa

SEQ ID NO: 302177 - DNA, 303 bp, Proteus mirabilis
atgataaaggttattgcagaagattttattaaatcagcatcaatagaaacggtcttaccactttaccaagaattggtgaaagctagccaacaagaagcactttgtattagctatgatttatttgttgatgagaaagatcccggtcactttatttttattgaatcatggccaaataaagaagcactagatattcattgtaatagtgaacattttcgtcgcatcattccgatgattaaacaatatacaaaagcagagtcaaaaatcactttagtcaatagtgtatttgataaaaatatagattaa

SEQ ID NO: 302178 - DNA, 273 bp, Proteus mirabilis
atgaagttacaaaaacctgatttacaaaaagataatgataatattgaaagtatttctcaatttataagggaaggtgatgaacgtccgacaatctcaactaagttaatatcatctacatttagaatacctgaaaatattgttaatcagatcaatattgagtctaaaaaactaggtcaaagtaaaactacgttgataaaaaccgcgtggctagcttattgccaattagacgagaatgaaagaaatagaattttacttgaatcatttaaagtataa

SEQ ID NO: 302179 - DNA, 666 bp, Proteus mirabilis
atgatattagtttttgtttctgacaagggcggtgtaggcaaaacaactacagttattaatactgcggtctatttaatgagaaaaaatgtcaatgttatcattgttaaagcggatagaaacaatgatttgtttgcgtggcgtgatttgcgtaacgatgctggattcaaatctattcctatatatgaggcatatggcgacattagtacatcattaaataaattgaaaaaattatgtgacgtgcttcttgttgactgtgcagggcatgatagttctgaatttagaagttcgttaacaatcgctgataccgtaataacaactgtaaaaccatcatcaatgttggaaaggaacactctaacagcggttactgaaaaaatcagaaaagcccaatcaaaacatggaaatcctaatatgcaggcatatgtactaatgacccgagtctcaagtagaaaattatcgtcagctgtcgcactagataacgaattgagatctgatgaaatatggctacaaccgctaaaaactagaatatcagaattcgatgttttcgaaaatgctatcaatgcaggtgtgggcgttcacgaagtagaaaaggctagtagtttgaatagtgcaaaagcacaaatagaattatttgcacatgagataggactattaaaacaacttaattaa

SEQ ID NO: 302180 - DNA, 243 bp, Proteus mirabilis
atgcgcctaatttttttgttaataccatttatgtttttaattggctgtaccgagcaaatgagtgtcggaattggcacttctagaacgcataatataggatatccggtttgttcaacattagtttgtggaaagaatacgcgaacagttgaagaacaaaaggcaattaatgaagcggtgcatgaacagcaaagagctattatgcgaggagaaaaaccagatttaaaaattattgcctcatattaa

SEQ ID NO: 302181 - DNA, 252 bp, Proteus mirabilis
atgattaagcttgaaatcaataacgctgaatatattgctcaattagaagaagctcgcttatctgcagataaccctcgtggctatctgtttatggatattttcttttctgatccaaggtttgataagaatacgtttgaaatgaagaatgttcgtagggaaccgatgaggacgtatatgacggaggctgtggcaagggatttgtttgataagttggagaggtatttttatggtaaatcaattataaaaagttaa

SEQ ID NO: 302182 - DNA, 570 bp, Proteus mirabilis; identical to SEQ ID NO: 297306

SEQ ID NO: 302183 - DNA, 792 bp, Proteus mirabilis
atgatacctaaaaaaatacactatgtttggataggtgataaacctaaacctaaatttgttctagaatgcattgatacttggaaaaaataccttcctgactatcagataattgaatggaataacgaaagcataaaagagattaaaaacaattatatggaagaagctataaaaaataaaaagtgggcttttgcttctgactatataagacttcacgctctttacaatgaaggaggaatatatttagacactgatattgaagttacaaactcattcaatgagtttttagaacttgatttttttacatgccatgaactatatgataatgaagtacttccaattacttcggcagtaattggaagtaaaaaaaatggtaatatagtcaaagatctcttagatatatatatgaatattaagttccaaaatggcaataatttagatctcactccaaacacggcaagaatcacaaactattttaaatttaaatttaatattcaacctccttataataaaaacaatactattgaattatctagaaatagtaaaatttatccatatttctacttctgctatccagagcagaataacaaaaattatgctattcaccacttttctggttcatggcttccatcacattcaagaaaagataaattgaatatttttgataaactaattctaactaggcttatcagaatcagaaacaaaggagatgaaccaattttacataatgaaagaaaattatttagtacaaaagaaaaaaataataaatcttatatcttactcctaagaaaataa

SEQ ID NO: 302184 - DNA, 540 bp, Proteus mirabilis; identical to SEQ ID NO: 302170

SEQ ID NO: 302185 - DNA, 135 bp, Proteus mirabilis
atgtcagaaaatatgttaacagtagcgaaacaatttgcaagaggtaaaaaatctacatttccaataatgacgtttaaacagctaggtatttttttagatgttttaaaaagagagcgtgaaagtttaagagcataa

SEQ ID NO: 302186 - DNA, 237 bp, Proteus mirabilis
atgaatattctagatttaaaaaaaagagatactgattatcaaataattagcattttcgaatattcagggttttatacttatcatgtaaaaaagaaagatgaaattgatcaagtaattgagtttgatagtgaagggaatgttcataaaacatcttttgaaaaaaattctaaggaggaaaaagaagctattaattttatcagagaaacaagaaaaaatttaatatgttcgactgtttaa

SEQ ID NO: 302187 - DNA, 333 bp, Proteus mirabilis
atgaaattattccatattttattaaatgtaactaacgcagattggactaaaaaaggagaagtaaaaaatttttatgaggtagccaaaaataaaactgaaattaaagaaaaattcactctttttaataatgcatcaataatatcaattgatgaatatgatttctttttaaatccggttgtagttaaattttatatgtctgcatataacattaataacgaagtgattttttgtgagtctcaacctactatagttaacaatacatttgatttgattgaaaatataaaatcttatcatgaaaaagattatctcacagtagattgggaaattatataa

SEQ ID NO: 302188 - DNA, 471 bp, Proteus mirabilis
atgagttgtttcttggttaataataaaacagcgtcagctatagtaactgctttaattgaagtggaatatattcatgaaagtgaagctcaatcatttttatatttaatgatgcaattaaattatttatcagtgaataaccgttatttagaaaataatgaaatgaaagagtatttttttgaaaagcaaaatattattttcaatgattctagtgtagaagatgaagaaaaaatttatcgttcagtcatgcaaatgatagtaaatatccaattttataaatatcagtcttgtgaagttgagttttttgataaaactttagtttataaaacactagagaaacttaatgatgaactgctgagtcaatttaaatcatggcttgttcggtcaggttatgaaccttgggtatctgtaaaaaataaaccttatcataaattaagatttagtgacgaatgttcatggggattagatgattaa

SEQ ID NO: 302189 - DNA, 249 bp, Proteus mirabilis
atgattaagcttgaaatcaataatgcggaatatattgctcagttagaagaggctcgtttatctgcagataaccctcgtggctatctgtttatggacattgtcttttctgatccaaggtttgataagaatacatttgaaatgaagaatgttcgtagggaaccgatgaggacgtatatgacggaagctgtggcaagggatttgtttgataagttggagaggtatttttatgaaaaatcaagaaaaaattaa

SEQ ID NO: 302190 - DNA, 237 bp, Proteus mirabilis
atgaacttattaaaattatctctagtcatacatatatcaatatcatcatcccaaggtatgaaaccactatgccggactgcaccaagtaatgttcccgcatcaatccaatactctatatcatgcaaggagcataatctatctatttcaattaatgcagttaacattttcaattgggcacttcttaataaagggttatctttttttgtaattaacataaaatatacttattctatatag

SEQ ID NO: 302191 - DNA, 507 bp, Proteus mirabilis
atgcaccaagttgctatatatggtgcagcagagcaattatataaagcaggagtaatggttatttcatcaatatcaacaccattaacaccatatatggctagaactaagaattttagcaccttttttaagattacatttctgagtatttgcatgacacttttaggtgcaagtattggttttttttggggggataaaattatttctataatttatagtgatgaacttatagaagcatttcccgttttaaaaatatttatgattacaattattgtgagtatactaggtattcattttggttatcctgcattaatacctttaaataaggaaaaatgtgcaaattacagtgtcttatatgcaggtttatttcaattacttgctatttccgtcttctacctattaaatataaatataacagctgtcttaatagctatatcatatttattatgtgatagtttaatgtttctatatagaataagtatattttatgttaattacaaaaaaagataa

SEQ ID NO: 302192 - DNA, 399 bp, Proteus mirabilis
atgagtgatagtgaaataactgatagttatatgattaattacacaggtgtaattaatgttgcactttcgtcttatcagtatttaaaagaaacccaaggtatgctaattaactttacctccagttcatttactcgaggaaggcctaattatagtatttactcatcaacaaaagctgctattgttaattttactcaagctatagctgaagaatggttacctttaggtattaaagtaaactgtattaatcctgaaaggacagatacaccgatgaggcgtagtaattttgggattgaaccacctaattcactacttagtgcagaggctgttgcaaaattcactctatcagcaatgtcatttgaacatacagggcaagtatttagcataaagaatgatttatag

SEQ ID NO: 302193 - DNA, 657 bp, Proteus mirabilis; identical to SEQ ID NO: 300894

SEQ ID NO: 302194 - DNA, 234 bp, Proteus mirabilis
atgaataatagaagaactaattacgtgtatagcgcaggtattgaaactccttttcatagagcagtttttactgaagaagaaattttcccattaaaaaaaattagttttgaaggttatctttttagttgtcctaataatatagaccaataccttactaaaatgttcggtgctaattatatgtcattaccaccaatagagaatagaatctctcattatcattcaataaaaatttaa

SEQ ID NO: 302195 - DNA, 522 bp, Proteus mirabilis
atgataagcttaacaataattattccaacatttaatagaccagataaactaaatagaacattaaatcttctaaacagaaacaatcataaagttaatattatagttgttgatgatggttcatctttagcaaatagaaataaaaatagcaaaatttgtcaaaattttatcaatgttgcctattattggcaaaataactctgggccatcacgagctagacaattaggcttattaaaatctcaaactaaatatatttcttttcttgactgtgatgactatatttctatcgactgtattaatgaaatatattctcttcttgaaaaagaagataaatatgactatgtaacaattaaaagtcagtatgttaatgatattgagaaaagcttattattaacatgtgcgcagcaagaaacaatatctaaagaaattaataatagtttattaaatacaataattgaattgatcggccttcctattagatctatatcctgtctcttatacacatctgacgctgccgacgaatag

SEQ ID NO: 302196 - DNA, 498 bp, Proteus mirabilis
gtgctctatggtgatgatggagatgatatgcttattgattattatggtgctaatatgttagatggtggtaagggtaatgatcggatctgtgtagcctcaatggatagagggctccctggcagaaatatcattctagggggagaaggtgatgatgaaatatatttgggcacgggaactcatcgtataacaggtggacaaggaaatgatacctttaattttttctgctatgagagcgttgaaagcaatagttcaatttgggattttgaaaaaaacaaggataaaataacgttgatcactagggattatagaaaaatagatatatcaaaaatgaaaaaagttgataaattatcaggagataaaaatgaattttcattaaatcataacaaaccagccaacaaaaccatcatagacgtttcaacatcttctaacgatgataagtccattgtacatatagagattgtcggtatatttaaccatgatgaactctttgcagtataa

SEQ ID NO: 302197 - DNA, 471 bp, Proteus mirabilis
atgcttatcgattattatggtgctaatatgttagatggtggtaagggtaatgatcggatctgtgtagcctcaacagatagagggcttccaggtagaaatatcattcaagggggagaaggtgatgatgaaatatatttgggcacgggaactcatcgtataacaggtggacaaggaaatgatacctttaattttttctgctatgagagcgttgaaagcaatagttcaatttgggattttgaaaaaaacaaggataaaataacgttgatcactagggattatagaaaaatagatatatcaaaaatgaaaaaagttgataaattatcaggagataaaaatgaattttcattaaatcataacaaaccagccaacaaaaccatcatagacgtttcaacatcttctaacgatgataagtccattgtacatatagagattgtcggtatatttaaccatgatgaactctttgcagtataa

SEQ ID NO: 302198 - DNA, 246 bp, Proteus mirabilis
atggacactttaagagaaaatagaaacatacatcttaataatctcgctaatatcttacatttaaaatcaatttttttatctcaagaatctaaatcaataattaaaaatattattgaagaactaaaaaaagaaatcatagatgatgaaacatgggatgaatatgttgctaaatcaacaaaatcttttagccattataaaagtattctaattctttcagctgaaaaggaactttctatactaggataa

SEQ ID NO: 302199 - DNA, 1662 bp, Proteus mirabilis
atgaacgcatgggagcagtacgcaagcgacatcaaaacaggcaaaatccccgcctgtcagcggttaaagcaagccgttgaacgttactataatgacttaaataacccgctttacacctttgataatgagatcgtagcgcgttttatcgggttctcccgcgtttgctcgcatgttaaagggcacttgcgaggtaagccgatagagcttgagccgtggcaacaatttgcctttgctaatctccttggtttcaagatgacctcaacagggaaaaggaaataccgtagcgcttatattcaggttccccgcaaaaatgcgaaatccaccgttgcggcaattctagctaattggttcttggtgatggaaaacgggcaacaagatatttataccgccgcagtgagccgagatcaggcgcgtattgtctttgatgatgcccgtcaaatgtgtgtgttgtctaaaccacttaaaaaacgggtggtcatacagcaacataaagttattaatccgaaacgtaatagcttattgaaacctcttgccgctaaagccgcgactattgagggaaccaatcccagtttagcgattgttgatgaatatcacttacaccctgataatgcggtttattctgcccttgaattagggatgggggcacgtcctgaagggattttatttgcgatcacaacggcaggcagtaatgtcatttcagcctgtaaacaacattatgattattgttgtcaaatccttgcaggtgaagaacaaaatgaatcgttatttgctttgatttatgaactcgatgacgaaaaagaaattgacgatgaacgtctgtggataaaggcgaatcccaatcttaatgtgtcagttgatggtgatgctttatatgacacgatacaaaaggcacgaggcattccctctcaatggacggaaatgttaactaaacgctttaatatctggtgtcagggtgagactccttggatgggggaaggggcatggttagcgtgtaaaatggactataccgaaactgatctacgaggcttggagtgttatgctgggatggatctatcttctacgggggatattaccagtgtctgctatacctttcctgttgataatgaattgttgttattgactcgccactatatccccgaagcgcagttacagaactcggccaataagaacagggcgatttaccgtcaatgggttaagtcaggttggcttcgtaccactcctggtgattgtattgattatgatcgcattcgtgatgatgtgcttagagacagccaacaatttaatatcaaattgacaggttttgatacatggaacgctacccatttaaggacacagctacaaggtgcggggttagatgttgagccattccctcaaacttacatgaagtttagccctgtggcgaaatcagccgaggtattcgttaatcgtaaaatcattcgtcacaatggcgatccggtgcttgcgtgggcgatggctaatgtcgtaatggaaacggacgcaaacgccaatattaagcccaataaaaagaaatcagccaacaagattgaccctgcaattgctttccttatgagctttggcacatggcagattgaacatgaagattttgccttcaacttaacgggtgaacagaaagcccttttagactcttttaatggggtataa

SEQ ID NO: 302200 - DNA, 354 bp, Proteus mirabilis
atggcaagagcacctaaaccccccgtttatcttaatgagatagcctctaaagagtggaaagcaaaagccaaaatattggcagaacgtgacgatctgacgttagccgattggaataatttagaattgtattgcgtcaattatgcaatgtaccgtaaagcggttgaggacttagataaccgaggatttagcattatcaatagccaaggcagtgagagccgtaatccctcattgagtgccaaggctgacgctgaaaaaatcatgattaaaatgtcttccttactggggttcgatcccgtttctcgtcgtaaaaatccgattgaaactgaggaagaggacgaattagatcgcctatga

SEQ ID NO: 302201 - DNA, 165 bp, Proteus mirabilis
atgcgtgaagatgaagtaaatcaattggttaaagggcttcttaagcacagtgaaccgtatcgacaacgacaactaaaaatgcctacaacgcacacagcaaggcgcacaacacaacgtgatagggagcttatggaatgtttccgaaatcgttatagaagcgcatag

SEQ ID NO: 302202 - DNA, 447 bp, Proteus mirabilis
atgccatggcaaccactaaagcgttgtagctatccaagctgtaataagcgtgtgaagtctgggcgatgtgatgaacataaacgagaagccagacgacaacaggactgtcagcgaggaacacgaaccgagcgaggttatagcaatcgatggggtcagtatcgcttgcagtatctcaagttaaatccgttatgcgtgcattgcctcaggaaagggatatatacccctgcaactattgttgaccacattatccctattaatggtgatagtgatgtgttgttttgggtggattttaaccatcaagcgttatgccacagttgccataataccaaaacctttaagcatgatcctcttactaaacaaaagcgtaaaaatggggaatatcgagagttagaggaaaaggcgacacgacataataattggcgagatgagtataaccgtaatgcgtga

SEQ ID NO: 302203 - DNA, 318 bp, Proteus mirabilis
gtgtgggggcagaacgtgacgacaactaagccagaaattggtcttgatgaagtgaagttacattgccgtattgatgggagtgatgaagacaaactgattgagtcttatatcacggcagcattagaagtctgtcaacaacatattggcaaacgatttgaagcaggactggactttactcccgcgataaagattggctgtttaatgtatatctcattgctgtatgagaaccgaggttttatcagtgaaggtgagataaaagaaatcccgtttacgattaaatcattgtggtcagtttatcgcgatgtgggagtgtattag

SEQ ID NO: 302204 - DNA, 342 bp, Proteus mirabilis
atgaaagcagggcgcatgaatcaacgggtgactattcaacgctcaaaactaaaaccagatgccctcagtggtaatgaggtgatgtggtttgatattgcgacagtctgggcagaggtaaaaggcattcgagggcgggaatatttcagtagtcaacagacacaaagtgaaaccaccgtgagagtttggttgcgttattttcctgatgtgactaccgcggatcagttgatgtttcactacgcaggtacggacggcaagtattgggatattaaaagtattgtggccgataaagccaagggcagtatggaaatgatttgtgtgggggcagaacgtgacgacaactaa

SEQ ID NO: 302205 - DNA, 1221 bp, Proteus mirabilis
atgtggccattcaaacgtaaagcctccgaatcccgtagtctaagtattgatgagtttctttctctggcagggatatctaacacaaactcaggggaacacgttagctcgtcaacagcggagggcttacctgccgtgatgaatgcggtgacggtcattagtgaagctattgcctccatgccctgttttctgtatcgagtacacaatgataaagggcgagaatcaagagagtggttaagtgatcatcctgttgattatcttctcaatgaaaacccgaatgactgtcagaccgcttttcaatttaagcgcacgttaatgcgtcattgtttgctcaatggtaacgcctatgcggtgattgcatggggcaaagatggacaacctaaatcaatacatccttatccacccagtgcggtagtgattaatcgacttggggagcatcgatacagttataccgtgactgaaccgtatagcggtaaggtgaaaacttacctacaagaagaaattttgcatttacgttatgcgaccgatgacggttttttaggacgctcacccgttacgatttgccgtgaaacattaggcttaggattagctcaacaacgacacggtgcgagtatcatgaaagacggtatgatggcatctggcattattaaatcgggtgaatggctcgatagcctcaaaggaactaaggcattagaagccctagaacgctacaaaggggcacgtaatgcagggaaaacccccattcttgagggtggcatggaatatgaacaattaggcatgagtaaccaagatgcggaatggttagcctcaaggcgttttaccattgaagatattgcccgtatgttcaacattagccctatctttttacaagagtattccaacagtacctacagtaactttagtgaggcaagtcgtgccttactgaccatcactatgcgcccgtggttagctaactttgagcaacaaattaaatcggcgctgttactcacgtcacccacaccaaatattcgttatcaagtggaatttgatacggcagatttactccgcgctaatcctaccgaacgtttccgcagttatgaaaccgcgattaagtcaggggttatgtgtccgaatgaagcccgtgagcgtgaggggttgccgcctcgtgaaggcggtgatgaatttagtcaggcatggaaacagaccgtcgaggtcaagaaaggtgctgacaaggaggatgaatga

SEQ ID NO: 302206 - DNA, 555 bp, Proteus mirabilis
atgaaaaatattgagttagaaatccgtaccgccacgctgtcagtcaatgataaaaagctggtgggttatgtcattaaatggggcttacgttctcatgtactttgggatgagtttgttgagcagtttgccctaaatgcgttcagtaacagcttatcaaaggggagtgatgtcagggcgttatacgaacatgattacactaacctattgggacgcacgacttctggcacattacagcttaccgaagatgaaatagggttacgttttgaactcactccgcctgatacgcaactagggcgtgatgttctcaccttggttgaacgaggtgatatttcaggcatgagctttggttttcgaacgattaaagatcagtgggatattggtcaagagccgtatatcagaaccgtattagaagccgaactccatgaaatcaccatcaccagtttacccgcttatcctgatagcggcgtagaaattgctaaacgctccttaacactcagtaaaccgcaagcggtaaaagattttgaccgctggttacaattagctgaggtggaataa

SEQ ID NO: 302207 - DNA, 1152 bp, Proteus mirabilis
atgaaaagacttctcgaattgcgccaacaaaaagcaactctcaccgagcaaatgcgctcattgctcactaaagcagaaaacgaaaaacgttctctcactgacgatgaggccaaaagctttgatgagttacgtcatcagtcggaatccctgaatactgaaattgcccgctatgaagcgatggcagaggaagaacgcagtcaaacaggtaagcacgtattaggtgataaagccgtcagtaatgatgaattacgtcattatatcctgacaggggaaacccgcactttatcgacaggggttccggctgacggtggctataccgttattcctgaactgaataaacaaattatgcagcaattaaccgatgattcggtgatgcgtaaaatttgtaccatcaaaacgactcacagcaacgaatataaacaactggtttctgtgggtggggcaaaggtcaatcacggtgaagaaggtcaagcccgcaccgaaactggcacaccgaaattagaagaagtcagtatcaaattattccctatctacgcctaccccaaaactacacaagaaattattgattttagtgatgtggatattcttagctggttaaccactgaaattggcgacacgtttgttgataccgaagaaaccgatcttgtcacgggagatggtttgaaaaaagcaaaaggttttttagcttatcctcgtgaagccaaagatgacaaaacgcgcgcttttggcaaattagaaaaactggaagcaacgacactgacagcggatagcctgattgatttgaaatttaagcttagagcgaaataccgcaaaaatgccgtttgggtgatgaattccaatactgccgctaaagtgcagaagctgaaaaatggcaatggggattatatctggcgtgatcgtttacagtctggcgatcctgataccttattaggcttacccgttcattacctcgaaaacatgcctgatgatgtgattgcattaggtgattttaaacgcggttacttcattgtggatcatgaaacggggacacgtactcgtcctgacaatattacagaaccgggctttatcaaagttcacaccgataaatatttagggggtgggctggtggattctaacgcgattaaagtgttagaagtgaaagctgcgggttaa

SEQ ID NO: 302208 - DNA, 531 bp, Proteus mirabilis
atgtctttaaattatttaaatctagataatgttactaggcagtttatgcgcgaagaaatagactttgacaatgagaaaaataatttttatctcagcaattacctttctccacaaggtaaacagcaatggccaactttattagaagaatccatccaacatgatgattcatggttagaacgtgagataatacgacgagggcttcttgctcaatatcatactcgacgcacccctagtggtggaacaacccaagctagagtacctgtaacagcagcgcaaactttagcagagggagaatttaatcgcctttatgtccgcggattaagtgcgcgagctatggcttctggtattgaatatttagaagcataccgtgctcgctcctcacaaaatccgagaccaggatctcaagctataattggtagacattttttagcccaaagtattttacaagacttgagagcaaattctggtgttgaatcggcattaggtgttcctcctggtcctaattctggaatttcagtcaaactgccataa

SEQ ID NO: 302209 - DNA, 2328 bp, Proteus mirabilis
atgactaatattgagttgatccgggaagtaaaacgtaatgcgaccaatcattgggatagtttattacctctgtgtggggttaatgtacctgaacgaggtaaacatggcgcatgccctgtatgtgggggaactgaccgctttcactttattgatgatcaccataacggcaattggttttgtcgccaatgtgatgagcctaatcacggtgacggattggatttaattgccaaagtaaaaggtatctctatttatgaggcggccaaagaagtctcacaagctttgtcattgcccttacctgaaccagccagaaaggaggctccaaaatcagagtctcaacctataacagaaaaggtacaaaagctggtggctcaaacgacggtaggcaaatcagcgtacctgactcaaaaggggcatgagtgccccgtaaaattacttgctgatggttcgatgctgttaattattcagcgtggtagtgaggtgacaggggcgcaaattatcaagcctaatggtgaaaagcgtctgatatcagggacaaagaaaaaggggagttttatcctcttatctgaattaccagaaactaccgagacagtattgattgccgaagggtatgcaaccgccttaacagtgagtcaactacatagtggtttggtgttggctgcgattgatgaaggtaatttattatccgtcactgaatgggctagaaagcattatcccaaggcaaagataattatagccgcggataatgatattaagattggtcagccaaatgtgggtaaaatttcagcagaaaaagccgctaaaacggttaatggttgggtaactttaccgcccacagaagataaagccgattgggatgattaccgtcagcaatttgggattaagaaagcaaaacaggcatttaatgagggaatgtaccaaatggataatttagccacagtaacagttattcatgcggataaaaaatgggcgaacaccaatctctcacaaatggcggccagtcaacgaggcgcattactcgcagaacgttacggaaaactcgctattattccagatagtgaaatggtttatcactatgtcgatggggtatggaataaagtatctgatagtgatttacaacgggcaatggtagcgatttttgatgaatatgaaacaccttatagcccaacgggggttaaaaatgcgattggtgcgttgaaattacaaattccagttttaggtgagcaaaagcgagagttaattggttttagtaatggtgtgtatgatttatcgactcaacaatttaagcctcatgcaccagaaaactggttacttaatcataatgggatcgtattcactgcgcctgaatctaatgagaatttaaaacaacatgcccctagtttttataagtggttatctcattcggcgggcaacgatgaagaaaagatgaaccgtattaatgcgggcttatttatgattttagctaatcggtatgattggcaattatttatcgaggtgacgggtgagggagggagtggtaaaagtgtttttacctctatcgcgactttacttgcaggggcacacaataccgccagtggcaatatgaaagcgttagatgaggcgagagggcgttatcaatttgtgggtaaaagtctcattactttacctgaccaagtaaaatacgttggagagggggcaggcattaaagccattacaggcggtgatttaatcgaggttgatggtaagtatgagaaacaattctcaactattattaaagcggttgttttggcgacgaataacgaaccaatgagctttactgaacgtaacggagggatagcgcgtagacgggttattttctcttttaatacccccgttaaagagaatgataaagatccattgttacctgagaagataagcaaagagttacccgttattattcgtcatttattgaaattatttacctgccaagataaggctaaattattactgcaagaacagagagattcaggcgaagctttagccgtcaaaagtaactcagatcccttgtatagcttttgtgcttatttggtttcattgggcgaagagttagggatgaagatggggaataagaatatttatcctcgtgcgccgaggatctatctctatcatgcttatttatcatttatggaagcctacgggtttgatagaccgttaacattaaccaagtttggggattcattacctaaggtgatgcaagagtataaaaaagactatcgaaagtttaaaacgaaacggggttattactataacgttgatttaactgatgaagctaacgagtggcttcctgcagtacctgaattaagaaaaagttag

SEQ ID NO: 302210 - DNA, 321 bp, Proteus mirabilis
atgtctgatatctatgactatcttgtaaaggctgatttggactccatgagcacagaagaactacgaaaatttagaagtgtttcctctgacacttgtgacgggttgatatcgacattacgagtcatgggagagtgtgctttttgggcttgtgcaaataaagattaccatgaaagccaagctaaaaatgatttacggcgtatcggtgagtcattgatgtatttaccgcgattaattgatgccatgcgttttaatgagcaagaagcggaatttaaaatttatcaacgtgagggctttccttatacggaggtaggcaatgactaa

SEQ ID NO: 302211 - DNA, 195 bp, Proteus mirabilis
atgaaaaacaatgaattagcattattactcgatagcccgattatggatatttacaagttagagactctcttaacgatatggcttgaagctgaggataatcaagatgttgctaacatgattagcatctcactcgactatacaaaaaatgttcgtgatgctttaagtcatacggtggggagtgaaaataatgtctga

SEQ ID NO: 302212 - DNA, 198 bp, Proteus mirabilis
atgcttaataccatttgtattgatacagcaaaatataaagcaggtttagccagctctctatatagcgtcattcttgaaaaagcatcggatgaatgctctcaagagttattagacttgatttcaattgcttgtgatttaaaccaacaaattagccaatcattacgtgataacaacggggtaaacggggtatcagcatga

SEQ ID NO: 302213 - DNA, 867 bp, Proteus mirabilis
atgatcgacattgcaaaatttaactctgccattggctgggttaagaactatacaaaaatttttagggagtacttggtcaaattgcgagtaactaatcgttacgcacaaaagaaaaaagacagcgtgcaggctgtcttaattcaacttcattcagtagagctagttacgaacaataactcattaagagttttagttacgaacttaccatctttaagaggggaagtttcaaggctacccaatagtattgggctacccgattgtatcgagttggttcaatatttcctatcctccgttggtggatgggatttgatgtatgtacgtaatacgtacgcagttcagccttttggctcgatgcctaatcgctctaactcttttcgcccaagagttttaagccagttagctaaactcatgtttgattcttttgcagcagcttcgaattgttctttcaactctggagttatgcgcattctaaattgtggcgactgtccgtcacctttggggcttttatctcgttttacagttgacaagtggtcacctattgaattaacctcaatttatataggtggtcaccttaacacggtaaagcccataaaatcaacgccccctaataatgctaccaacactattagagggctaatcaccaacgatagagtaattatcgaggtaactatgagtaagcatatcacacccgtaacagggcggaacagtttcaccccaaatactaaattcctatggcgttttttctcatgccagcaatctaaatatttttccgttgaagccagcaacgagaaagaagctcgttctatgcttccagattctccttgcctattctctgctcgtattcgtcaggagggagatcatgcttaa

SEQ ID NO: 302214 - DNA, 282 bp, Proteus mirabilis
atgcaaaatcaattttcaacaccaacaccagaattgcgccgttctatccttgccgagtatggcgaacagtatgatcgcctcgttcgcgagaaagaacgccgacgcatcacatcaatttcacgcacaacagcttacacactcgaaaaagaagggcgtttccctacgcgtaaaacattagggcgtaattcttgcgcgtggctattaagtgatttattgctatgggttcgtaacccgcccgccgtggaaaatattaataatccatatagccgtaaaaccaattaa

SEQ ID NO: 302215 - DNA, 834 bp, Proteus mirabilis
atgaaagaatatcctgaatatgtagataataccataattaagtggtatgagtctgatataatatcagattttaaaatgcctattcctgatgaaaataaagatgatttagataaagctggttgtttttttgattcgaatgtttggaatgaaacattatcagaaaaagaagtagtacagactttaatatttaatgatgatatgcgttttatatggtcttctttatcaaaaagagctaatgaatttcgtattccatatatattttattacattttgactcataagataattgatgcttatagtggcccgaatgattgggaattgttaacacaaaaacaaaaagaagaaaaaatggcaaagataaaaaaattatcttttgaactttgtaaggaaatctcaaatacgccattagatttatcagtaatgagttttgctaattataaatcattctttgaaaaatttaatatgatagtaaaaaatgacattcaaaaaaatttagagtgttttttaaatagatattgtgaaattaaaaattcacattatattcccaaaaatggagatgatggagtaataggtgccgcatgggcaggtgtaggtgtaatgtctccatcaattggctctgtgctccaaactttaagtgaaaaagcagattcatttaaatgtgaatcaatcttgaaaagaaaaaatcaagttagaagagtattctttattagaaaactatcgatgttttttacagagacgtttggaacgccccttcataatataacagcaactattagtggtgtttttttaaaggaagatatttcaatagaagaagtaagatctgtaatacgctaa

SEQ ID NO: 302216 - DNA, 1221 bp, Proteus mirabilis
atggcaaatgaactgaataaattgagcgataaaaaggttaaagccctttatggtaagcctgtatctaaaattgagttcgtagctgatggggcagggcttagcgctaaggtatctgttgctggtggtgtgagttgggtttttacttatagactagatgggaaaaagctaaatcgcctaacactagggcgatatcctgatatgagtttaaaagaagccagagaactccgtgataagtgtcgtaactggctggcattaggcaaagatccaaagctacaactaaacatagagattcaatcgtcattaaagcctgtcactgtgagagatgctttagagtattgggttgaaaattacgggaaagataaccgagttaatatagttaggcatgtggctcaattagaaaagcatatttacccttatattggtgaaatggctttaagcgattgtgaaactcgttattggctaaaatgttttgatcgagcaagaaaagaatcacctgttgcgactggttatgtatttcaaatgtgtaaacaggcattaaaattttgcagagttaggcgatatgctgttagtagtgctcttgatgatttaactattcctgatgttggtaagaaacagaataaaagggatcgggtacttactgataaagaactaggggaattatggcaatcactcaatgggaataaacatattccttattataagcatttaattaaaattcttattatttttggatgtcgttcgcatgaagctagattatcagagtggaaagaatgggactttgataattggatttggactgtaccaaaggaacatacaaaaacaaatgagaaaattattcgtccaatacctatttatataagagatttcattaaagaattatattcaataaataaaaagacaggttatttattgggtgaattaaaaaaatctgaggcagtttctcaatacggtcgtaaattatgggaaagatttaatcattctgagccttggacattacacgatttaaggcggacatttgcaacaaagttaaatgacatgggaattctccctcatattgtagagcaattactaggtcatgctttgccaggagtaatggctatttataatcgtagccaatatttacatgaaaaattagatacacttaataaatggtgtgagcgattagacttattggcagagaataataaaaatgtagttactttaaatgtgaggttaagatga

SEQ ID NO: 302217 - DNA, 561 bp, Proteus mirabilis
gtgaataaggatattaatgaacttaataaagatattaatattgtcggattacattggattgaacgctggcgagtgaataatggaaaacatcagtcttatgttattcctttcgcaacaacctatcctattaatattgtttatcacggtaaaagcgaatttaaatatgggcagtatggcattcatcttggccagcaagatacactcacctttttaggtgataaaaaacaaaagatactggctaaatttattgattgtcgtaaaaactcaccgacatttaaatcagaattaagtttggagataaccccatcatccgcaagaacacttattattcccccaggagttgctcatactttttcccatctagaaaatgtttttaccttaaatagctactctctttttttacctactatcgagcaattagcaagtgaaacattaaattggtcacctaataatgatgtgataaatctgccggaagatatcgatattaatgagattgaaggctatgagccgatgacagaagaagcttcggcgctggtctactatcgagttgctgagatataa

SEQ ID NO: 302218 - DNA, 123 bp, Proteus mirabilis; identical to SEQ ID NO: 299974

SEQ ID NO: 302219 - DNA, 1302 bp, Proteus mirabilis; identical to SEQ ID NO: 301215

SEQ ID NO: 302220 - DNA, 417 bp, Proteus mirabilis
gtgctggataacggtaaagcagcggaagtctttgctcgtatggttgcagcccaaaatggtcctacagattttgttgaaaactacaataaatacctgccaacggcggtattaagtaagcctgtatttgctgagaaagccggttttgtcacagaaatggatacccgagctttaggtatgtcagttgtgactttaggcggtggtcgccgtaaagcaactgatgctattgattacagtgttggattaagtgaaatcgcggcactaggaacagaaatcaatacagatacaccactcgcgatgatccatgccaatagtgaaaaatcatggcaagaagctgcggcagaagtccgtaaagcgatggtaattggtgagacaaaacgtgaaacgtcaccaatggtgtatcgccaagtcagcgaataa

SEQ ID NO: 302221 - DNA, 6495 bp, Proteus mirabilis
ttgttaattccattatatgaacaaaaagaaaagctgatctttgctcaaactaactatcatcgcaaagatcttcgtagccaatttaattatggtattggttatcgctattttactgaaaaatttatggtcggcattaatggcttttatgatcatgatttaacgcatcatcataatcgtttgggaattggcgccgaaatttggcgagactatttcaaattaagttctaaccattatcaccgtctatcaagttggcgagcctctaataatatcttagattatagtgaacgccctgcgaatggttgggacattcgaacagaaggctattttccagcttatccacaattaggcactaaattaatctttgaacaatactacggtaaagaagttggtctatttggcaaagataaacgggacaaaaatccacatacctacacattagggattaattatactccgataccattagtcacattaaatgccgagcgtcgtattggcttacatgatcgtgctgataataacttgaatatcaacttgtcctaccgcataggagaatcactcgcttcacaacttaatcctgataatgtcaaagcaatacgtacattagcaggaagtcgttatgactttgttaatcgtaataacgatatgattttagaatataaaaaggaaactttagttttcctttctatggttgattcaataaatggttatgctaaagaggagcgcgatttacaagttcaagtaaaaacaaaatatccgttagccaatattgaatggtccgcaagtaagttaaatgcccaaggcgggcaaataaaacatcatggtggaactcactacaccgtgattttgcctcaatatcaaattggtgcaattgagaaaaatagctatatcattagtgctgttgccattgatacccatggcaatcgttcagcgcctgttcaaacaacggttattgtagataaatcgttaatcaatacgcgtaatagcctattttcacctaaacagagccaactattcgctaacggtgaagcaacccaaaagttaatattatccatcgttgataatgataatttacccgttgatattgatagtaaagaaattactttacagcaacagtctgatacagaaaaaggcaatagccgtatttctactttctctcgtttagctgctgggaaatatcaattaacggttacagcaggaagcataccggaaaaattaaccctaacccccgtattccgtgataataccttcaactcagcaaccgtgacacttattgccgataatcaaactgcccatattgcaaaaggcaacctaacggttacaaaagataacgcgccagccgacggtaaaagtcaaaataaaatcaaagtacgagtcactgatagcaaccacaatccattggctcattatccagtcaactttactgccagtaatggtgctaatgtcattagctcaagaaaaacggatgaacaaggtgagattattgcttcagtgactaatactcaagtagggagttcgcagattggtgtacaagtaaaagggataacctattcgactgaagtccattttagtgtggataatgatagcgcctatattccacaacaaaacttcacgatcacaccaccactttctctagccgatggtaaaacagaaaaaaccatttcattacaagttgttgataagcaaaataatccgatacccgctactcatgtgacattatcggcagataaccaagcacaattaaaacaaaccatattaaccacagacgagcaaggtaaggcgaccaccactatgataagtaaagtcgccggtacggtcaccgtgagggccaaaataaacgacaagatgactcacgcgacaacccaatttatcgccaaccaagctaagggggttattgtctccataaccgcatcctctacaactcatgtcgcagatggtcaaacccctgtcttccttactgcattagtacaagatcagtttggtaagccgctccctcatgcacaaattagctgggaaactgagcacgataaaagtattgttaacattgaacataccacaatgactaatgagcaagggatcaccaccaacaagttaaccagtacacaagcactcagtgtgcgggtaactgcgcgtataaataacaatgcctttactgctgagccaattacttttattgctaatgggcaacaagctttgattagtgaattattggttaataaaaatcagattgttgcagataagcaagatcccgcagaacttactgcaatagtaacagataaactgggtaatcaacttcctgatactattgttaattggcaagggagtgctggtactcaatttgctcagcaacaaactaagaccgatgctcaaggtatcgccaaaaatacgctaacaacatcacaatcaggtatcacaaccatcaccgcgcgattaaataatggtcaacatgcacaaactaacttagttgccgttgcagatctcaaaagtgccactctcacattaacgacattaaataataagcaatctgccatagcagataaccaagatagcattaccgtagtagcaaacttaactgatgcttatcataacccattgaaaaatatccctgtctattggcaatcaagtattaatcatattgatgaaactactactcaaacagatgaaaaaggcagaacgcaagttgtcatttcaggaaccaaagcacagccaacaacaattaccgcctatttatcaaataaagagaaaaaaagcattcaggtaacctttgttgcgggagcgccagtgcaacaaaatagttatttgacgattgaaccacaatctatcattgccgatggtaatgcctttgctgtgggtaaaatagacctgcgtgataaatttgataatccggtaataggtcgtagtaacgatattgcgttaattggggataacagcaccatccaattcagtaaaatcacagaaacggctaacggcaattatcaagctcatattagaggtacaaaagcgggactcagtcaaattaccgccactattgatagtattacggtaacgcaatctttaggatttttaacagataataaaacagtcaagatccactccgttaaggttatggcaccttataccgtaacagcgaatggtaaagacaaagtcattattcaagcacaaatcaccgataaacataacaatccagtatcaaaaggcgttactgtcggttggataagtgatctcggtaagcttgcagcaccattaagcatgaccaataagcaaggaatagctgaaattaccctctcaagtactcaggcaggaaaagcgaaagtaacggcagtgctcaataaccaacaatctgtcaatgctgatcacattgtcacctttacggaaggtgatatttcggcctctctttctactgttgccatattccctgacactattgtagcaggggcaaataaagcgaccgtaacaataaccttaaaggataaagaaggtaatttattgcccaacttagccaataaaatcaccttaacgccgcagactaatttacaaacaacgattacgccctttaaagagaaacaaaaaggcatttatcaagcccaagtgagcgcattaaaaaccggaaaaacctcgttatcggctcacgttgctccattagcaataaaacaatccgtttctttaacggtgctccctaataacacaacagcaaaggtgaaaaactttactattagcaatatgcaaccacatgctggggagtctattacttataaagcctatttagttgataaccatgataatcctgtcggtatgggtgtacctgtcgcttggtcaacgaatgaaggtagtcaactcgaaacaccattaacttttacagatgataatggtgtagcaatagttggattatctcgacgctctgtcggtgttgccaaagtcagcgcaatattagcaacaggtacttatatagcagatgatgttcactttttaacgggtcacattgatgaaacgatgtcagaactgtcgttgaacccgagtcaaatcattgctaatggcaaagataaggcattattgacatttgtgattaaagataaaaatggaaatatcatccccaaccaacaagtaagcggattttctaaaaatccaaccatcaaatttagtcaagcacaacaaatatcaccgggacgctatgagattgaaataacaggaactcaatcgggcacagcacaaattggtgttatggtaaatggcacccatttcaaaaaacaaaaaatattacaacttaatgccgatgtgacgacatggaaaatacgcgctgttgaggttgatagaacaaccataaccgcaggagataaaggtgttaactaccaagcaactgtcgttgatgccaataataatgtattacctaatgttattgtgtcatggaaattactcggatcagcagatgattatcattacagcacttatactaatgataaggggatagcaacgaatcgagtgactagtcatgtcgcgggacgcttgaagatgagcgcttatcttgattctaataattataaatcaacacaagatattactgtaataccggctgaaatagatattcataaatcaacctttaatagtcatcgtcgttctataaatgctgataataaagatagtacgttattaagcgtaaaattaatggataaatacgataatactattgatggtaagaatgttgagattaaaactatcagtggtaagcctaattttagtgacaatccattaaagtcagtgggcaatggtgaatatcaaacaaatgttacagcaaatacgatgtccgatattatcttaaccgctcaagctgaaacaataactatcgcagagccattgacgattaaagtggctatccctaaatctgaaattacctttgagaaacctatccaacaggaaatctacaaatcaactgtgattgatgcgttaagttataaaggtgtaccacaaaatatgcaggtaatatggtcaagctctgatcctactgttgcttccattgatacaacaagtgggcaaatctccatgaaaaaggctggtactacaattattaccttacaaaccttaggtaatgagcaatatccatcagctaaaaatagctatcctttagtgatagaaaaagcgccacccaaactgaaagtgatttctcctcacaccatacaatcgatctggaatgatggcattacccatcaaatagcagcggaatttgataatccagaggctaaaaatatccccattcatttctctagtagcgataccttggtagccaccattgatagtaaaggtaacttaaccgccattaaaccaggaaaaacaaaaatagtaatacaaagtgatgctacagataaattcctagcggatagccaaactgtagactatcagcaagaaaaagccgcactaagttattattttaaaaagaattatattgtattaacaactgattctgctgcagataaattattgatggctcaaagccctacgccagatgtccccgttgaagcgaatgcaacttggtatagtagtcaacctaacatagttgaaatcaccccagatgggattatcaaaaaccttaatattgggcaaacaacattaacacttgaggtgaaaaataataattattttcaagatcatgagcaaagctataacgtcattatacaagcatcgcctcgcatcaaaattaactcatttgagtttctatctgcgggagagagcaaatcaaatacacatttggatgatttaacttggcaacctttatacacttcagacgatcagtttattgttaaatggtcttcatcagacacacctaaagcgattaacttcgagttatttgatgaaaatggcacttctatcgccttagaagaaagacaaaactatgcacctaaatataatatacatgccccagtaaaaattcaggtaccgaaacaatatctaaccagtccaaaacaattaacactagaagtcacaacctttgatagtaataatcagccttatgtcgatcctaaaaagtataaaattaatattgactattttcctgccaataacgcatataaaataatctctcttgattataattctaaatttatctatacagatacaggtacccttgcttcatcttgtcaaaatggttggtcaaccactacaacacatcttattttaacgccaagattagtatttaaaggtgagccgaaaaagttactttatcccatttatattactacggaattatatgatgtaacattaaatccatcggataaactcatcggacatattaatgagaaattaacttatccagataagattatatttagcgagcattctaaaaaaatagctgaaatatcgccgacatcagcacactacgcattagacgaagaatgtagaattaatgattctggtcatggtacgttaaaagcaaatataaccataggtaacagatccagttatcttaaaaaagaatttcattgggatggccaaatagggggatatttttaa

SEQ ID NO: 302222 - DNA, 951 bp, Proteus mirabilis
atgacccgtttacgcacagtatcaaaacaccctgaacaattagaaaccacaccattaattgcggaaagtcatcactacgatgatcctttagcacctcaaaagctggtatttttagaagcggttaatcaacagcgttgtgtgattaactcaccacagcgcaatagccaacttactaatacaatacccttttttatcgtacttttagttatggcctgttatacattttggggttttatggataggcactcatctaaaatgtatacatttcaggatacaattaattataacaaaagaatttatgactcatataatgaacaaggcaaaagccttccaaaatatttagataaatatgttccatactttaacaaagggaaaataagtatatgggcctatattaaggcatattataccggtgagcttagccgtaatagccaagcagaaatatttttaataattggctggctaatttttttccccggttttttatggctatttggctatctctctttctttacgcctcctgtatatcttactgctgataggcaaagaggaatactgtatagctatggcatgggaaaagtgcgtttaacccgctataaagaggcacaatttggttatgcgggcaacatgttggcaattaaactatatagcattaatgaaaaaacaggccaactaaaaacgatcctctatcgccccaatgtgtcccactactccagtttcctaaccagtaccgacagtgaaaaccaccgttttatcactttccttaatgcctatatgcaacaaggtcgagatgccgtttcgcctgttgattaccaagcccgtaagccctttttatcttttggcaaaaacccacttcctgccgattttgagcaacaggtcgaacagattctggcaaagcttgatcaggagaaaaaaaacatgcgtaaaattgataaggaaggtacggaatga

SEQ ID NO: 302223 - DNA, 177 bp, Proteus mirabilis
atgcaacaaggccgagttgctgtttcatcggttgattaccaagcccgtaagccctttttatcttttggtaaaaacccacttcctgctgattttgagcaacaggtcgaacagattctggcaaagcttgatcaggagaaaaaaaccatgcgtaaaattgataaggaaggcacggaatga

SEQ ID NO: 302224 - DNA, 1080 bp, Proteus mirabilis
gtggctaaaacaaaaaaccaactatcaatcgccaatgcgatagacgcattacccttgggacatcctatttatgaaagcattataagaatggatacagggaatgatgcccgctctgcctataatcaattaacaggtcaaattcatgcggatatcttatctaaccaactcaacaatagccggcaaataaaagaaatactcctctctcagattaaaaatgcagaaataattaatagagagaaagaaagtgcaggtaacaaaggtcatgtttgggctaaaattctctctaattgggaaaagacttccaatgatggcaatgcaaatagctatgatgcttccacctatggcgtactattaggtgcagatcagcgggttagtcacgataaaatgctgcttggtattgcaacaggggtcaccaaaacctcactatctggtgataacagtcacgcaaatagcgaaaattaccacttatcactctatggtggctatgattttgacacaatcgcgttacgtgctggtgcatctaatacctttcatcgtatccatacaacaaaatcggtcaactatggtgtacagtcagataaaaataaggcgaattacaatgggaacactagccaaatttttattgaagcagcttatcccatcaccctctctgatacacaattagagccttttgttaattttgaatatgccaaaacaaaaaacgccaccattaacgagcaaggtggacgagcagccttacaagcccattcgcaaactctagagtcaaccacctccactacagggctacgtttaaataaccaatggaaatttaacagtaaatcaacgggttctctctatggtgagctaggctggagacaccaatataacgatgtagaacgagggatccatttacgcttcacacaaacccagcctacatttatagcaaatagtgttgatgctgctcgagatgcactggtggtaaaagctggaacgactatccaaattaatgagacatcaaaagtctcaattggatacagcggactagcggcaagaaatcagcacgataatggtattgatatgaaactctctatcgcgttctaa

SEQ ID NO: 302225 - DNA, 792 bp, Proteus mirabilis
atgaaagggaagcccctgcagtattcagtcgccccagctagtcgttatcaaggtgacatgtcacgactcattaatgcaatgattaaagactatgaaaaagtgtttagcgaattaaatgacgactttgacggttttacgatggatgccagttttgccagtcaaacacgcatctggcttaaccgactaaaacgcaaatgggataagatttttaaacaaaaatccacagagattgcggataaatttgtttcccaagtcgatataggcgcaaagcgtaatttagatgattctctcaaacagttgtcaggggggatcaccatcaaaaccccagccatgcccgaagccctgaaagataaaattattgcctctacagctgaaaacgtatcgttaattaaatctattccactgcaatttcatcaacgtattgaaagtgttgcattacgttctattagccaaggtggtgagggcgcaaagacgctattagaggaaattagggatacgggtagcgttacagaaagtagagcaaactttattgctgttgaccaaacacgaaagattacaactgcatgtaattacgctcgtatgaaatctgcgggtattcgtaaagcagtttggcatcattcaaacggtagtgcagaacctagggagctacatcttgagttagatggtaaggagtttgatttagacaatcctcctataattaacaaaaaaacaggaaggagaggtttgccgggtgaggagccgggttgtaagtgcttctggacaccagtaatagatttcggtgaggagacatga

SEQ ID NO: 302226 - DNA, 462 bp, Proteus mirabilis
atgaagtattggaaattttacattgtcgttgtgatggtggggattgttgttggtggttgtgcgctgattaatgcacaaactaaaagaattaacatactgatagaaaagaacaaagaacttacagccacactcaaagagcaaaaggctatcaatactgaatatcaagtgcgcatagagcgactcaatcaacttgatacaagacacacacaggagcttgttaatgcaaagaatgaaattagtcgcttgcgtgatattagtgagcgtaatcctgagcgggtgtacatcaaagccgagtgtccaaagagcaccagtaatcccaccaccagcatggatgatgcaaccaccgcccgacctactgacaccgctatcagaaattattggctactcagagaacgaattgcagagtcagagcaaatgatattaggactacaagattatattaaaacggagtgtattaaataa

SEQ ID NO: 302227 - DNA, 894 bp, Proteus mirabilis
atgtcaatacttattgaaatacaaaaggattgttttgattcaaatgttcaattatctgatttattaagaaaatgtctatatttggctcataaaattaagaataaaaattttgttaaatgggttaatgatgaattgaacggctatcaaaaaacagaagaacttccaacatatagaatatttaattgtgtagttaagggagatttctttgatggttataatttatatcataattgtccgataaatataaaaaaattccctaaacctcttcaagatgcttatggtgtaatgcgagttaataatagtgtttcatcgattgaagctttagttgctaaggattctgcttctactgttatacaacgaccgtgggatacttctattgtacaattaatctccgaagggtatgaagatcgagaagttataaaaatctggagcgaatcgccaactcatttatataaagctattcttgatggaattaaaacaagaatactccaatttgtattggaagttgaaaatcaaataccaaatattgaggatattaagttgtctaatttagatgatgaacaaaagaaaataatatcaaataatttctataaccatatatatggtaatgccaatgttgctaatgccagcgaaaattttaatcaaaatttacaagttcaatctaatgatttaatagataaactactttctgaattattagagatgaagaagcagggaaaagattctcaaattattgatgatataatcccacatgttaagtcgatgaaaggtgttaaagaccaaactggtattatgacaaaactagtcgaaataatgactattgctggtggttcagcatctgtattatctgtaataacaccttacatatctcaacttaaagaactatttatgtga

SEQ ID NO: 302228 - DNA, 846 bp, Proteus mirabilis
gtggaagcacctgttattagttttattaatatgaaaggtggtgtaggtaaaaccactttatgtgttggaatggctgaatacttagcaaactatataggtaaaaaagtattagtaattgatgtagatccccagtttaatgctactcaatcattaatggggaaatacggaaaagtagaagaatatatggaaagttatctttctaaaagcaatactattcgtaaaatatttgaaaccccatcaaatgtaatggaaaagtcaaaagtagcaagaccagaagatgttattactaaaatagatacaaatttagatatcatacttggtgatattaatatcatttttgatacatcacaagaatctgttcgagttcacaaaattaacaattttattaataaaaataatctaaaagatgaatatgacttcatatttatcgatagtccaccaacaatatcactttacaccgatgcagcattaatcgcatcaggatattatcttgtgccagtaaaaatagatcattactctgtattaggtgcaactagccttattagtgcaatagatactcttcaagataatcataataaaaaacttatacatataggttttatctacactaatactgatgatgactttactcaaaaaacagctaaaataaaagaacaatttgaagcaaaaacaccatttgatagtatgtacttttttaataacagattatcttatgtcaggaatctgatggttggagcccaaggaaatattccatcacattatgaaagatctagaaatgatattgcaagcatctgtgatgaatttttatccagaatgaatcaattaagtgaggatgcaaatggataa

SEQ ID NO: 302229 - DNA, 384 bp, Proteus mirabilis
atggataatataatttttatgctaagaaagctgaaacatggaaatatagcaaaagaaaacctaattggcattataattatgcttctgctatctaaaaacttatttaaaagaaatatagacgttgccgaatatgttgaaaatacatttggaattgaattattaccttatgcggtacgttctagaacaattataatagcaaaactatgccgtactctagtaaatattacagatttagaagcaaaaaaaatatccattaaaacatatggttacataactagtaactttgaaataaataataacaccatacttttatccaaaaataaaaattcgaatgcattaaaaaatatggaaaaatggatagatggaattttaagtaaaaaataa

SEQ ID NO: 302230 - DNA, 693 bp, Proteus mirabilis
atgttaataaataaagatcctttatcagttagatcagaaattaatttatttagagaaaagatttattcattaattccacatgaaaacgatgcaagtaagaatcttttaatcagcatgtttaagcatgctgttttttacaatgtattaactcttttaaacgaatcaataagtcataaaaactatattaaaggaatgacttatgatgcattgaattgcataatatgtttaattcagcgtagagaacgaagtttacacttaaatctaaggtcaataattgagcactcagctagaattgcattaaataaatcacatgtagataatgatttcgatggtaccgttaggcgaaaaaattttgactacttaaaacaaaataaaccaaatgaaaattggaaatatatgcatgaatcatacagcagagcatgccaatatattcattcatcacctgatgcaaatttaaatatttcagctacatttactgaattattagaaagcgattttacatctaaaatgcctaaacaaattcttagtacacaaaggattattagtgaaataactaaaatattaataacataccttgaatctgatatttctaattcttttttaaggacacaaaaagaattagaattcttgttagggaaaccaacctttgcttactatttaaaattaaaaaaccaaagattaacagagtggtaa

SEQ ID NO: 302231 - DNA, 300 bp, Proteus mirabilis
atgcataaaaaggatatttcgcgaaaacagcgtttaataagctattgtgttatttatttaaccgctatttacccattgcatcctgcttggggctctgtcattacttcatctgataaaacgataacaataaatcagcaaaataatattcctattattaatattgcaacacctaatgacagtggtgtttctcataatagatttaatgtctttaatgttaataaacaggggcagtacttaataattcgcaagttgatgccaatagtcaattggcaaaaaaaatatctgctaataaaaatttaa

SEQ ID NO: 302232 - DNA, 879 bp, Proteus mirabilis
atgtcaaataaattattggataaaattaagcataaaaaaagaacggttaaagatcttgcgagctttattaaagtaagctcaggaaatatacctaactatagtttatttttaggtgcgggagcttctgttacttctggtattctttccggcgctaatttagtaaaacaatggagaaaagaaatttatgagcgtttatccacagaagaatatacagagcaggatgaagcaattagttggttaaagcaaaatgaaagtgattggtatgatgaatcaaatgaatactcatctctatttgagaaaaaatttgatttacccgcccaacgtagaagatttgtagaacagcaagtagataaaaaattgccttctattggttatgcatatttagttgaattatttgataaaggatattttgatactgtttttaccacgaattttgatgatttaattaatgaagctttttatcaattttcatctaatcgacctttattatgtgcccatgattcatcaattaaaggaatatcgataacatcatctagacctaagattataaaattacatggcgattatttatttgatggaataaaaagttctttgagtgaaacatcatctttggaaataaatacaaaagataaattaatagagtttactaaagaatatggaatgatatttattggttattctgggaatgataaatcaataatgaatgtaatgaatagtttaataaaacaaagtgaatatttaaaaaatggtatttactggtgtaaaagaaaaggtgacaatatatcacaagatttatttaagtttttaaataatgataaagtatattatgttgaaattgatgggtttgatgaattaatgctgtctcttatacacatctga

SEQ ID NO: 302233 - DNA, 273 bp, Proteus mirabilis
atgaataaaatttcaacgcaacgtaaaaagcttggaatatcacaagcaaaacttgccgcacatttaggctgggggcaatcaagaatatccaattatgaactaggtatcaggactccaagcctttgtgactgtcgttcaatcgtagctgcttttaatgagttgggtagtaattgttccctggatgatttgttcccttctaaatatggttatgagtctaatgccatgaagaatcaaggaaactctcatgcaccaaatcaacatgccgatgcctga

SEQ ID NO: 302234 - DNA, 459 bp, Proteus mirabilis
atgagaatattaggggttcgagtttcaccttcagtggcatcatttattgtttattgcactgaatctaaaaagcttgtttgttctgatgtgataaatattccatgcattttagatacaccagagaaattaaaatatgttcgtaacaatatcctagatatattaatgttttataatgttgatatcgcatcaataagggtaacagaagcaaactctcaaaatatgagcatagaccgtctctatatagaagcagtaatacaagaagcattttcaagtagtgaagttaaaaaatactttaccattcgaaaatcaggaatacgggcaggtctcaatgtaagcgatactgaatataaacaattacttaagtcagaaatatcaatacatgatatagacaattcatcattcactcaggaaacaaatgaagccatgatggcagcattagcagtggagggtaaattttga

SEQ ID NO: 302235 - DNA, 1050 bp, Proteus mirabilis
ttgatcaccccatatcaaaaagcagacgtgtcatttagaaaaataaaaaaacttgatgaacaaggttgtttctcagaggtttatcttgctcatgatgaaaatttagatcatgagttggttatcaaagaaatcacaaaaaaacccaatcaagataaagatacttatttttctgaggcaagactgctttacaaaaatgctcacccaaacatcgtgcaggttcaatacgcagctgaagataatgaaaaaatctatatagcaatgccatattatattaatggcacgataagccaaaagatgagcagaggaaatttcactccacgtgaaataataaggtacgcaatacagtttattggtggcctatatcatatccatacaaaaaaattaattcatttcgatatcaagcctaataatattatgatttcaaaccgaaatgaagcaatgctggctgacttcgggttatctaaattaataaatataaattcaacagcaatacctgatcacaattactattttcatacccctcctgaatatttcacaataagcaaaagtggtggatttacctataccttcgatatctaccaagttggaatgactttgtataggatgtgtattggtgccattgagtttgaaaatgaaatatctcaattccagtatgctgagcagttagagtccgcaataaaagctggaacattcccttccaaacaatacccatcgcatataccaaaaaaattaatatctataattaataagtgtttagaaagcaatccaaacaaccgatttcagtcatcactagatattcttaatgcactatcatcaataaaagacgatgatggcgcgttagattggagaaagtgcgataattccgataccacactaaatgaatggcgcaagaaaatcgcaggtgctatactccatttaagttatgatagcaatacaaaatcctctatttgtcatagagtatatccagatgggagaaaacgaaaggaaggcaaaggtacgcttacccgttgttctcattcaaaaatatatcaaatactcaaagggttatag

SEQ ID NO: 302236 - DNA, 183 bp, Proteus mirabilis
atgatcatgacaaaagaaataattaatgtagatagcggaaaaatactagatacattacatcgagtaaaagcattcttaatttcagctcagtttctttctcgtaatagcgaagagcgagcaattcaacttagcttattatctcaagcagaagatgaaattaatgaggttttaaatgatgaataa

SEQ ID NO: 302237 - DNA, 252 bp, Proteus mirabilis
atgaatattgatgaattaattacccttcctaatttgaaaaatatatcagaaaaagaattagggaaattaagagcaaatttagacttatctattgattcactcattacaggaatgaatacattcggggagtttatgttttgggctgataataatgaaaactatcatgatagtaaaagtcatattggtgatgtgggattgtttataagccaagtatcattattggtatcaatattaaatgacagacttggttga

SEQ ID NO: 302238 - DNA, 936 bp, Proteus mirabilis
gtgtatacagatagtccaggaggatggatagaaaatgaaagtaatttaagtagagatgataattgttttatttttgataatgtaatggtatttggtaatgctaaagtcacagataatgcaattataagaaataatgtgaagatctacggtaatgcaatagttaagggaaatagtaaagtaaaagacaatgcagagatttatggtaatgtgctagtggaagataatgtgacaatatctgatgatgttgtaatatatgataatgcagttattaaagataatgcgagaatatctgacgatgctgtaatatatgataatgctgttattaaagataatgctaaagtatcagaatatgctattgttcgtggtgatgcaatagttgaaaaaaatggttgggtgactggttatgcgactgttgagggaaatacaattgtatcgaaaggtgaggttattaagagccaatttggctcttgggatgatattgatgaactaagagcattttatatttatattaatagatataacagtacagcgactgcatatgttaatggtagacatcaggtacctattactatttatatagaggctttagataaaaatggtcgtatcataaaaatagccaaagaagatatttatagaaatacacatattgtaaatgaaaaaaatcttcctattgaccgcaatgatatttctttatctgataaagaaaatggatttgtatttccaagcagtgaagaagcaacattgaactcccctgatgcatctacttgtgttatttatctttctgttaataaagtgatagatacctttagaatttgtgcacagactcacattaaaggaaaagagtatactacagcctttaaaaataattacagtgattatttaaattttatcattctggacgttgcaccaaaaaaatatttacagaagcagatgtag

SEQ ID NO: 302239 - DNA, 870 bp, Proteus mirabilis
atgtttttttcaatatctaaatggttcttgttattagtttcacttattactgtctgcgcatgtagtacagtagaaaaaaacaccgtacctagtacaactcccgctattattacatcagccaatattattgatacgcgtacaggaaagacaatcacagctaatgcgctattaactcaattagccagccaatcgcgggtgattgttggcgaaaaacatgacaatcaatatcaccatgagattgagtattggttaatgacacaacttcccaataaacgtcctcaaggtgcggttttattagagatgttgacgccagatcagcaaaacttagttgataatacgaaaaaacgttactctagctcacaatatttacgtgatgaacgtttaatgtctgtactcaattggaataaaggctggtcttggaaagggtatggcaatctgattaaagaagggctacaagcagattatccattgttagcggctaatatcgatcgcagtgatattacaaatgcatataaaaacccacctaatattgaaggtgaatattcaacgcaacctgctgttcgtcagcttattagtaaaactattgagctttctcatggtggtgcacttgataaaacacaaattgaaaaaatgaccgtgatccaacaactgcgtgatcgtgcaatggcaaaaagtttattaaatgcccctatgcccgcactgttgattgccggctcatttcatgccactaaattaatgggtgtacctttacatattaaggatttagcccctaatgaaacagtcacggtacttattatggcagaagaaggtagcgatattacctctgaacatgccgattatttgtggataacccccgcagcccatccttga

SEQ ID NO: 302240 - DNA, 549 bp, Proteus mirabilis
atgaaaagaaaagttatagcactagctactattctttctgctgcatttgctggctcatctatggcgtatgacggaacaattacatttacaggtaaagttgttgcgcaaacctgctctgtcaatacaaatgataagaatttagcggtaacattacctacagtatccaccactacattaaatgaaaatgcggctactgcaggtcttactccatttactattcatttaactggttgcgctattggtatggatggtgcacaaagtgtcaaaacatattttgaaccttcaagtgacgttgatgtaaccacacacaacttaaaaaatactgcacaaactaaagctgataatgttcaagttcaattacttaactcagatgcagcaacaacaatccagttaggtactgattctgcaacacaagatgtccatccagtacaaatcgacaatgctaatgtaaacctcccatattttgctcaatattatgcaaccggacaatctaccgctggggcatcaaatgacacctgccaattacctctaaaccgcccccctgtataa

SEQ ID NO: 302241 - DNA, 522 bp, Proteus mirabilis
atgattgatttgtttaagttaacgaaaaaaagttctaggcatattggtatagcaatatatgttggtattatagcgggtatcttttcagctttagttaaatctggttttgaagacctaattcccccgagaacacttgaaacgatacccccgccagtcgtcttactcgaaaagcttggattaaatatagatactatgacttatcattggatgggatatagtattaattggggcggtaatggtgttcatatattattctcaatagttatcgctgtgacatattgtgttattgctgaattcttgccaaaggttaaattattacacggtatttgttttggtattggcgtttctgtttttgctcatggtttagtcgtacctctactaggattgtctggctggctttggacagcaggttatcaagcattaatttctgagtttgttggaaccgctttttggatctggtcaattgaagcgattagacaaaatttgcgttattgtttaactaaagaaaatgatgctgagtag

SEQ ID NO: 302242 - DNA, 363 bp, Proteus mirabilis
atggaatacggaaacacatgcaaaacagttcgtgacaaacgagctattgaatttagaacacgccacttagtaagtagcgcacttcaaatattacgtgatggggagcagcgagaaattgcacaagccacatcacgctcagactcgactatctcaagaagaatccaatctattgatggtgtatgcgaaatgcttgccacacgtcgtgtaattggttttgtgagggaaggagaacgaaaaatctcagaagaagagtaccgatttttgtggaaacaaatgggtgaactttctcaaatgaaaataaaagaaaacgcctcgattgcggcaacaaacgaggcgtgttgttcaatggaattcaccatttaa

SEQ ID NO: 302243 - DNA, 348 bp, Proteus mirabilis
atggaaaagagacattatcaacttattgaacaagcctgccgttttattgaagaaaatcagggtgatgtttctcttgccgacatcgccgcacatattcaatccagtccatattatttccatagacgatttaaatctataatgggaattacacctaaagagtatgcgaatgcttatcggcacaagctaattaagaaagcattagctggcgataaaacaattacagatgcgatataccaatcgggctttaatgcgaatagccgattttatgaaaatgcgacagccatattaggtatgacgccaacccattggcgcaatggtggacaaaatatcgtgatttttttgctgtag

SEQ ID NO: 302244 - DNA, 579 bp, Proteus mirabilis
atgaataaaataaagtctattgccgtgtattgtggttcaagtttaggtgcttcaccaatttataaacaacaagcgattctttttgctaaagagctggttaaacgtaatatcactttagtttatggtggtgccagtgtaggaattatgggcacgctcgcagatactgttttacaggaagggggtaaagttattggtgtgatcccaacgctattagaagggcgtgaaatctcacataaaaatctgacagagctccatgtcgttgaaactatgcaccaacgtaaaagtaaaatgattgaactcgcggacggctttgtggcactgccggggggttttggcacattagaagagttcagtgaagtgtttacttggagccaaattggccttcatcaaaagccattaggtatatttaatattaatgatttttatcagccattactggctatgatagataaaatggtagatgaaaaattcttacatgaaaaatatcgtcatatggcgattgttgagcaatcacctatccagttattagataaatttgaaagttatattgccccttcgattaaaacctacgataaataa

SEQ ID NO: 302245 - DNA, 465 bp, Proteus mirabilis
atgataaccataagaaaagctgtactttctgatgttgagcagattaataccctgtatggctatttatttgctgagatggcgaaattacagccagaaagattaaaaccgggtaaacaagatgaagcatttattattaatggcattaaaaatgataaatttcatctgttagtggctgagttagaacagaaaattgtcggttttactattgcccaaatacaagagacaccgctatttaactgtttagtacagcgtaaatatgcctatatttttgatattgttgttgacccttctgttcgtgggcaaggggcaggggcattgttgctaaatgccatgaaggcgtgggcaaaacaacaaaaaatgacccacctagagctttcagtattggctgaaaatgccgatgctaaacgtttttatcagcgagaagggttaaaagaagtcagtaccgtgatgggtattgctttgtaa

SEQ ID NO: 302246 - DNA, 468 bp, Proteus mirabilis; identical to SEQ ID NO: 297222

SEQ ID NO: 302247 - DNA, 1125 bp, Proteus mirabilis
atggcgggagcattaggtagattaaatattgatttgacgctgaatacggcaaatttcacaaatgcgatcaaccgtagccagcgccaaacagaacaattcgggcaaagtatttgcgtcagtcttcaagctatcaccgtacaacaagagcgaatggtatcgcaaaccgcaaaatcctcggcgctctttactcgttttgcgagcgtcgcagcaagtgcattatctgtacggcaagtgattaattatgctgatagttggacggaattacagaatcgactgaaattagtcacagatagcactcaatcgctaaacagagcgaccaatgatgtttataccattgcccaaaaaacctatcaatcattggatgccacagcacaagtttatcaacgttttgcggataatgccgaccgtttaggcttaagtcagcaaaaagtggccgaactcacggaaactgtctcaaaagccgtggcgatttcaggcgcgagtgccaccgcagcccaagcggcattaactcaatttggtcaagcattagcctcgggtcagttacgtggcgaagagctaaattcagtgatggagcaaacccctgcgttagcgaaagccatcgctgacggaatgggtgtcagtgtgggtgaactaaggaagaaagcccaagacggtgaaatgacgatagagaaagtcattcaagccttagaacgtgcagctgacagtgtggataaaaaatttgctaccagcgtgacaacggttagccaaggtttcactaatcttcaatcggcgataataaaatttatcggtgaagcgaatcaaggtacaggtgcgactcagctttttaccacagggatgaccactcttaccgataatctatcgttagtcgctaaagtggttgaagggatcgccgtcacggcattggtagcaaaactttctcaatggacgaaagccacttatctgaaaaatcagacaacgttgaatgaagccaaagccacattacagagtgcagaggcaaacagtgtggcagcaaccagtgccgtgaggaaggcatgggcagataaagaagccgccacatcggcgctctttgcccgttttgcgagtgtcaccgcaagtgcattatccattcatcaagtcattaaatag

SEQ ID NO: 302248 - DNA, 951 bp, Proteus mirabilis
atgaccaatttacgcacagtatcaaaacacccagagcaattagaaaccacaccattagttgcggaaagtcatcactacgatgatcctttagcacctcaaaaactggtatttttagaggcagttaatcaacagcgttgtgtaattaactcaccacagcgcaatagccaactcactaatacaatacctttttttatcgtacttttagttatggcctgttatacattatttggttttatttccgaacatataaattataaaagacattttcagagtatggtcgaaaaagttgaggctaaatatagtaatgaacttaatttagatgctcctacattaaaatatgtaaacacgtacagaccatattttgggaaaaaaaatataaattattgggattatataaaggcttataattcaggtgaattttttactgatggccaatatgaaaagtacctcgtcattggctggctaatttttttccccggttttttatggctatttggctatctctctttctttacgcctcctgtgtaccttattgctgataggcaaagaggaatactgtatagctatggcatggggaaagtgcgtttagtccgctataaagaggcgcaatttggttatgcgggcaatatgttggcaactaaactatatggcattaatgaaaaaacaggccaattaaaaacgatcctctatcgccccaatgtatcccactactccagtttcctaaccagtactgacagtgaaaaccaccgttttatcactttccttaatgcctatatgcaacaaggccgagttgctgtttcatcggttgattaccaagcccgtaagccctttttatcttttggtaaaaacccacttcctgctgattttgagcaacaggtcaaacagattctggcaaagcttgatcaggagaaaaaaaccatgcgtaaaattgataaggaaggcacagaatga

SEQ ID NO: 302249 - DNA, 516 bp, Proteus mirabilis
gtgggtttaagtaatgcggaaagacgcttacaagaagctatagatagactggctgaacgatggatattgcttcgctgtgaaacagaacaacgagaaattcgctggatacaggagaaagctaaatattttacaggtgagggtaagatcgagattgtttttgctgattccatcatcccgtatcttactcaacttcaagggcagttcaccaaaattgtcattaaaaatgtctcggcattaaaacgcacttacagtatccgtatctacgagttattaatgcaatttaagagtattggtgaccgcgtgataagcatagacgattttcgttctatgttaggcttagaaaaaaaatatcaaacatttaaatcattaaatcaactggttataactccagcgataaaggagttaaacgaaaaaagtgatctttcagtatccgttgataccgttaaacaggggcgaaaagtggttgcattacactttcgattcactgaagacaagcaaataaagatcaactgttaa

SEQ ID NO: 302250 - DNA, 267 bp, Proteus mirabilis
atgactaactgtaatcgtattgatccccaatatttagatcaaatctttcctgaaaaaaaactcaccatagcccaaaagcaggacgcactgctgtatgcaatgggcgcatcggtgaatgagcttgccggaatgaatgatcgccactctgataccgtcagaaagcgattaaatgagacgacactgaccgttgccggctgcacagaaatcaaaaacttgagaacagtcacattaataagaattttaaatctgttgctgatgaaaagttaa

SEQ ID NO: 302251 - DNA, 237 bp, Proteus mirabilis
atgaaaagcaaaaaaaacgaattaatagccacattggttttactttcaatgggattattagccgcctgcaaagaagaaactaaatcatacgattggtatctcgataacaaagaggacgcttatcgggtgtatgaaaaatgccaaaaatcaggggatggctctgataactgcgaaaatgcccgcagagcatataatgcccatgaaagggcaaaacaattcggttattccctaaaatag

SEQ ID NO: 302252 - DNA, 591 bp, Proteus mirabilis
atgattcgcgctgacctacagtcggttttcgggggtgctatgaaacaaattaaattcaggttaacggatgatgaatacgaaaatatcaataataaattgaatgaaaaattaaaaatatcggttccggtcttttttaaaaatgttggaatggaagttattaatcgcgatcctgatattaaaaaatcattaaatgacgaaaatattaatattaatgatttatcagaatactgtgacgaacgtttacaggttttggtaacacatgagcaatctttagcattgaaaaaaatggcagataagcacggctggtcactatccaaagaaatccggttccggttacaaaacacgctcagtaataatctggattttttcgatcaggaattggacgaaatgcacgcctgccggaatcagataagaaaaataggtattaatattaatatgattttacgacgggatgaaggcagagttttagacaaagacggatttaaaaaagatattgatgaacttaaaaatcaattatctggcttggaaaatagatttaattattttctgaaaaaatgccgaggcagaattacatccagtaaaggagagtga

SEQ ID NO: 302253 - DNA, 201 bp, Proteus mirabilis
atgaacaacaacaacgacgaactcaataatgctctatatcgagtcgctttagtgttagataaagggcttgaatcaacaagagaactagcagctggttatgtagaaacaatgggattggggtttgatagatctgttaggaatctatcgtatttttttgatggctatgaagatgtctatgaaaatataaaatataaaatatga

SEQ ID NO: 302254 - DNA, 756 bp, Proteus mirabilis
atgaaacgccaagttttggtaggtttaggttttgcactaggattattttgccataatagctttgctgtagagcttcatctttatgctggcgcaggattaaaacagcctgtagagcaagttgttggtctatttgaaaaagaaaccggcaatacagtgactatcgaatatggcggttcaggccaaattcttacacgctttaatctcactcaacaaggtgatctgttttttcccggctctcaagagtatgtagagaagttagcgaaacaaaatcaggtggttagccaatatcctattgtgcgtcatattcctgttattgctgtcagaaaagataaaatcggtgagatcaaaactatcacagatcttgcaaatagttcattgaaattaggtatgggagatgcaaaagcaattgcattaggtaaaagcggtgaacaattaatcgaagcgtcaggccaaggtgagcagttacgaaataaagtggttgttcgtacagcaaccattaaacagttacttatgtatttattaaatggtgaggttgatgctgccattattggttacgctgatgcaatgaaaaatcaagataaattagttttattacccatacctgaaggaagtcccgaagaaattgcgacattagcggtattaaaaacttcaacaaatcccacacaagcacaacaattggctgattatttttctcgtcccgaaggaataaaggcttttactgattatggttttctacctgttatttcaaaaccatag

SEQ ID NO: 302255 - DNA, 975 bp, Proteus mirabilis; identical to SEQ ID NO: 103770

SEQ ID NO: 302256 - DNA, 741 bp, Proteus mirabilis
  misc_feature (727)..(736): n is a, c, g, or t
atgaatattattaatcaaccttggttgccttttcgttttcgtgatggcgagattaaaacacttccaatatcagctatttcacatcctgatattattgatttctcattaaatagagccgattttaaaggtgctgcttatcaatttgcaatagggttattacaaacgatatttgcaccagaggatgaagatgaatgggaagaatattttgaaacaccaccttcaagtaaaaaattacaatctgcatttgataaagttgcacatgcttttaatataatgggtgatggccctttatttatgcaggatttttcaactttagaagagcaaaaaaatattcctatagctcagttgctaatagatgctcctggtgaaaatggaataaagcaaaatacagaccattttattaaacaaggtattgctgatgtaatgtcattagagatggctgtgttagctttatttaccttacaaataaatgcccctagtggtggcaaaggtcatctagtcagtctaagaggaggtggacctttaacaacattagtttatcccgcagaagaaaattcaacattatggcaaaaattatggcttaatgtaattaatagagaattttgggaatatgatgaaccaaattttgatgatggtagtgtttttccttggttaataccactaaatttaaaagaaggaaaaggtgaaaaagtttcacctgatgatgtacatcccctttatatgtacnnnnnnnnnncctga

SEQ ID NO: 302257 - DNA, 957 bp, Proteus mirabilis
  misc_feature (45)..(54): n is a, c, g, or t
gtgaaaaagtttcacctgatgatgtacatcccctttatatgtacnnnnnnnnnncctgatggtgtagatcccctttatatgtactgggcaatgcctcgtagaataagattaaaagtagaaaataaatctgtcacttgtcaaattagtgatatgaaaagtaatttttcagttaaatattatgttactaaaaattatggattagactatcaagaaggttggttacatccattaacgccatattattgggatcctaaaaagccagaaatgtttcctaattctattaaaggaagacaaggaggtattcactataatttgtgggatcgattatttttatcaagtaatgaaaatggacaaaaaagcgctactgttgtcagtcattacttaaagctatatcaattattagaattcacaagaaagcctagattacttatttttggttatgatatggataatatgaagccacgtggatggtataatttagaaatgcctattttccatgtaaaagatgagtataataataaaattattaatgaaataaaaattatccaaaaattaactatagattgcttaaaaagtgtaaaagaacaggtgaaaaaagcgtggtttagtagtcctaaggatatgaagggcgatattagttttattgatttaactttttggcaaagaagtgaaaatatattctttgaagtggtacaaaacattatcgttcaaatacaaaaaaatgattttctaacccatgaacaagccaaaaaatggttaaactctattagaaaaataagtatttctatttttgatgaatatgctttatcagcattaggaacacaaaaatcagttagtgggtgtattaaagcaagaaatggtttaattaaagatctttatagtaataaaagaataaagaagtttgctgaagactttaaaattactaaggaaaatggagaacaatatgggatcttataa

SEQ ID NO: 302258 - DNA, 1278 bp, Proteus mirabilis
atggggtttggcggaattgcttattttttcacgttaaaaaaatggaatagaactctttgtaatatagggataatactaattatagtttctttttatttttattcaaaaaataatctttggcctagctatggagcattattgcctgtaactggtgcatttttaatactaatatctaattacagactttctatcttatctaaaagtatcttttttcaaaaaataggaagatggtcatattcaatttatttatatcattggcctattgctgtatatctatatgcatcaccatttgattcagttataagctccattattggcatttcactttctattttattaggttttttatcatataaatatatagaatctggccatgtaaactcactaattaaaaaaagagggttaatatccccaatattaatgataattgccatctattgtttaggaaaaatagttgttcattttgatggaaaaaatcataaccaacaattaagcattcaatatgaaaataaattctcataccctagatactgccatgtcgatgataaaaacattagcgattcaaataattatttaaactgtacacttggtaataaaaatattaaacctgtagggttgttatggggggattcatatgcagggcatttagatccatttactaactacttattaaataataaatttagttttatatctagaaacgcatctctttgcttcccttcattaagggccaatactatgcttggttctccatatactaaagaatattgttctttaataaggcaacaagtaaaaaatgaattacaaaataataaatataaaattgtttttattgctgcaagatttgatttagcaaaaaaaacatatggtgaagaagctattacatcaataaaagaggcaataacgttttcatcacagcattctgaacttgtttttgtattttcccagccaattacatataaaaagccagttataaaaactttcttaagaactcagattagttcaatatactctaaccatgttatgagagatgatgttaaaacaatttttctaaataaagaaatagagacatttattaaaaactcaaaatttaaaaatgtttattttattaaaagaaagtatctatatggtaatgagaatggtgttgattttacaaaatcaggaataccatattcatatgacctaggtcacttgaatgagcaaggaagtattgaatttgcaaaaacattcaaagaaacaaatgaatatatgttattaatgaatgttttaaataaataa

SEQ ID NO: 302259 - DNA, 897 bp, Proteus mirabilis
atgaaagccacctcagaagaagtccaagtttttattgcagtggttgaaagtggtagttttacacgtgctgcagaaaaattagcattagccaattctgctgttagtcgtacagtaaaaaaacttgagtcaaagctaggcgttaatttattaaatcggactacgcgacaattgagtttaacggaagagggggagcattactttcatcgtatgcaagttatcttacaagatatgaaattagctgaagatgaattaattaatacacaaaaaacaccacagggtctattacgtattgatgccgcaacgccggttgttttgcatctactggtgccttttattaaacaatttcagcaaaaatatcctcaaataaccctctctttagtttcatctgaaacatttatcaatcttattgaacgtaaagtagatatcgcgattagagtcggtaatttaacggattccagtttacgggcaaaaccactattgaatagttatcggaaaatcgttgcgaccccggactatctcgcccgttatggacagcctaaaatcgcagaagatctgcttgaccatacttgtctaacttttactgaaccagtatcactaaacacatggcctattgagcgagagaatggacaattattagaagctcctatgggaatatcgtcgaatagtggagaaacgataagacaattgtgtctcgaaggtaatggtattgcttgcctttccgattttatggtggttaatgatatcgaaaatggtcgatttatcgaattattccccgataagctgcaacctatagctatgccttttaatgccgtttattatagtgaaaaagtggttagccaacgcatccgtgtatttattgattctctgagtgagtatattgctaaaaaagtaggttaa

SEQ ID NO: 302260 - DNA, 804 bp, Proteus mirabilis
atgagtgttcccgttttaggtcttggtacttttcgtttaaaagacgatgcggttataaattctgtaaaaactgcactagaactaggttatcgtgctattgatacagcacaaatttatgaaaatgaagctgctataggacaagctattgcagaaagtggtatatctcgcgacgcgctttacatcacaacaaaaatctgggtagaaaatttaagtaaagataaattaattcctagcttgaaacaaagcttaagtgatttacaaacagattatgttgacttaactctagtacattggccatcaccaaatgatgcagtttctgttaaagaatttatgcaagagttattagctgcgaaacagatgggattaacgcgagaaattggtatttcaaattttaccattccattaatggaacaagctattgctgccgttggtgttgaaaatatcgcaacaaaccaaatcgaattatcaccttatttacaaaatcataaagtggtaaattgggctaaacagcatggcattcatattacatcttatatgactctagcttacggcaaagcattaaaagatgaaacaatacaaaccattgctaaaaaacacaatgcaacaccagcacaaatcattttagcttgggctatgaatgaaggttattctgttattccatcttcaacaaaacgtgaaaatttagccagtaatttactcagcgtaaatatcaaattggatagtgaagataaacaagcgattgcaaagttagattgtcatgatcgtttagttagcccagaaggtttagcgcctcattgggattaa

SEQ ID NO: 302261 - DNA, 474 bp, Proteus mirabilis
atgatgggtgagattaaaatcagtggattgtctgaactcgctcaacgaatgcaagacattgcccgtaaaaccagaaatcaaagcgcacgtaaggcgatgaatgcaggcgcttcggcgttaaaagaagaaatcaaacatcgagtgcctatccttaaggaaacggtgcctcatcgacgcaaaggcaccatcaagcgcaatattcgttctaaaacgaaagtacaacgcaatgggcaagtcaaaacgcgcatttgggtgaaatcattatcgggtaaaaaggtgtctgcctttaaacaagcaacggggaaaagtgcagcattgaacccaaatgatccgttttattggtggtttgttgagtttggtaccgccaagatgcctgcacaaccgtttatgcgccccagctttgaagcaaaaaaggaagcaacggctaaagtgattgttcaaacactcaaagaggatattgaaaaagcaaggtag

SEQ ID NO: 302262 - DNA, 330 bp, Proteus mirabilis
atggatccgggacgattacgccacactattcatattcaaaaatcagtattagcgcccgatgccatcagtggcagtgatgtgatttggacggatcatgcgacaaaagtacgtgcagcgatcatgccttatcaagggcgggaatattttcaagcccagcaagtacaaagtgaggccacaacacgaattcttattcgctatatcgctgatattgatacttcgatgcgtattgtatggggtaagcgactatttaatattatttcgattattgacccttatgagcgtcatcgtgagcttcaattaatgtgcaaagagggcgtgaatgatgggtga

SEQ ID NO: 302263 - DNA, 339 bp, Proteus mirabilis
atgaaaaaacgcaatgtctatggtggtcgctgggcaaaggtgcgattagcatttcttaatgaacatccactttgcgtcatgtgccaagagcaagggcgcattactgcggccacagtagttgaccacattattccgcatcgtcttaaagaagcgcttgaatcaggtgataaagaacgtatcgcaaaagcccaagctttattctgggataaaaataactttcaaagcttatgcgaactgcatcataactcgaccaaacaacgtatcgaaaagagtggcaaagtcattggctgtaatgcggatggtattccactcgatcccaattctcattggcatcaataa

SEQ ID NO: 302264 - DNA, 984 bp, Proteus mirabilis
atgaaccatttgatgggtaaaagactttttttattaggtacaatcttctttttttctgctgacgtctttgcagcttgtattcagaatcctaatttaaaaaatattcaggctcggatccccaataaaacctattcaattcaatatgatgatatagggacaagagtattagatgagtttcagattaattatgccaatgggcctataacaactttttcaggtaacgatgggcggtgtgggaacgcatcaatcactgccaattatactaatggctggttgcctaatgcgaataaaatagcacagaccaatattgcgggtattgggatacaggttaaatttgctggaataggtgcattaaatacaacgtatttgaccccaaaggacccaagtggcaattcttatcgacttcttaccccttattggacagtcaaaattataaaaacaggcagagtaacgcaatcaggaagccttcaatggggcaagattgctcaagcagtacaaaataatacacaacctaaaaacacaacttggaacttaacttcactttatttgcctcttaatgcaataaagataaattcattaaaatgtactacaaaatcatcaaattataatattaatatggggacttggtatgatactcaatttaaaaatattggtgatgtcagtaaaagtgtagatgttcctattacattaaactgtgcggctggcactaacattaaagcgacagtgacaagtagtgctggatatatagatgcaaatacagggaaattaaacctatcgggcactaatcgagccactggtgttgccattcagttattagataaaaacaataacccgataaaactaaatacaaaaaatagtctacaaaatggggtctcctccggtgattatatatttggttggaaagcaagatatataaaaacaggtaataaaataacgcctggtagtgctaattcaacagcaacagtaaatatcttatatgagtga

SEQ ID NO: 302265 - DNA, 1476 bp, Proteus mirabilis
atgggatcttttttattaaaaaaagccgttgggttatctaatatttctgatttattagataaaagcgggatcttctataactattcaaccaaagtattaccttcttttgattatgataccgcaggaaaacatatagcccgtgaagattccacttggaatggcaaatatgttattgggcaacccgctgaggtgacttattcattcccaaaatgggaaggcaaatttaatcaatttggtaataagaatccttatgaatttaatgaattacaaaaagagcatgcaagaaaatctttagatgcatggtctgatattgcaaatattaaatttactgaagttgctgttgggaatgttgatggaatgaaggcttctgacgtaaaaacagatattacttttggtaatatctatgatcccaatggcacatttcaggcttatgcaacattgcctaatacctatgcttatggaaaagatctttctggccaagcatggtttagtgattatcattatgcaggtaatactacaccagaattgggtaattatggtcgtttaactattatccatgaaattggtcatacactgggtcttatgcatcctggtgattataacgcaggtcagaatgttccaggttatttaaaatctgattatgcggaagatagtcgccaatatacagtaatgagctattgggatgaatatgaaacaggcgcccacttccaaggtgcttatgccggagcccctctccttcatgatatttctgctatgcaatatctctatggcgcaaatacgactaccagaacaggtgatgatgtatatggtttcaattcaaatactgggattgattattatacggctactgatagcaatgataaattaattttctctgtatgggatagtggtggtaacgatacatttgatttctcaggcttctatcaagatcaactgattgatttacgtgctgggaacttttctgatgtggggggattacagaaaaatgtttccattgcacaaaatgttaccatagaaaacgcaattggtggttttggtaatgatattattcatggtaatgatgctgataatactcttattggaggcgaaggagacgatattatctatggccatagtggtaataacactatttatggtggtcgtggacaagatacattacatggtggcacaggaagcaatacctttatttataaagaaattgcagattctttagtatcagccgcagataaaataatggatttcaaaaccggtattgataaaattgatttatcaacattaattcaagatacatttagtagcaaaattcttaactttgttgataactttacaggaaatgctggcgaagcaactcttagctataatgaagtaaccaatgcttctgaattagccattaatgcttatggctataattataatcctgattttaaaattgatatcgtaggttttgttaattacgaaactgattttattgtttaa

SEQ ID NO: 302266 - DNA, 945 bp, Proteus mirabilis
atggaattaaaggattattacgccattatgggggtaaaacccactgatgacatgaaaacaattaaaactgcttatcgccgtttagcgaaaaaatatcacccagatgtaagtaaagagccagatgctgaggagcgttttaaagaaatagcgcaagcttgggaaattcttggtgatgaacagcgtagagctgaatatgacgaactttgggctcaccgcaatgatccgaaatttaaacaatttacacagcacaacaattcacattcaaaccaacaaagttttagtcaggaagattttgacgatctttatgcttctttctttggtcaaggttcaccttttgaagggcgccattctcgtcaagcacctagacaacgtggacaagatctagaaattgaattaccggtttttcttgaagaagcacaagaagagcataagcgtaccattagctatcatttaccggtttataatgtctttggcatgatagagaaagaaattcctaagaccttgaatgtcaaaattcctgccggtgttgttgatggacaacgtattcgtttaaaaggccaaggtactgctggggagaatggcggagaaaatggtgatttatggctaactatccgtattgcacctcatccattatttgatgtaaaagggcatgatcttgaaattgtggttcctattgcaccttgggaagccgcattaggtactaaaattgctattcctacacttaaagataaaattttacttactattcctcccgctagtcaggcaggtcaacgcctgagaattaaaggaaaaggcttagtaagcaagcaaaaaagtggtgatctctatgccattttgaaagtcgtcatgccacctaaagtggatgaaaaaacacattcattatggcaacaactcgccgaagcccaagccgattataatccacgtaaaaactgggagaataaataa

SEQ ID NO: 302267 - DNA, 204 bp, Proteus mirabilis
atggacaaaatttacattgcatcatctaaaattatttctgttgcttacgattatcaaactaaaatgctagaaatcgactgtaaacatggagaacaatatcgatataaggaagtaccattcagtatttaccaaggtttaatggcatcaaattctaaagaaaaattttttcatgccatgattgaacataaatactcttataattaa

SEQ ID NO: 302268 - DNA, 462 bp, Proteus mirabilis
atgaaatacggaaaactctatgccgtcattgcgatggtaggcatcattgtgggaggctattgggtggttaattggcaagctaacagaattaatctattagtagaaacaaacaaagaactaacgattgctctcgaagaacagaagtctattaatactgattatcaagcacgcataatgcggttaaaccaactggatattcaatatacgcaggagttagcgaatgccaagaatgaaattagtcgcttgcgtgatattagcgagcgtcatcctgagcgggtgtatatcaaagccgagtgcccaaaaagcaaaaccacttccgccaccagcttggcttatgcaaccaccgcccgacctactgacaccgctctccgaaattattggttactcagagaacgaattgcagagtcagagcaaatgattaaagggttgcagaattacattagagtggagtgtgtgaactaa

SEQ ID NO: 302269 - DNA, 903 bp, Proteus mirabilis
atggattaccaagggttttatgataaaaacgatgccgaagatgttcaatattctccgcagataaaatcactccatgcagcctcttttgcacaggatgaattagcgaataaattgtgggctgaatatcagttagatttcccacctattcctatctattgtgccagtaattctgcgttaatggctgtgcatataggacataatgaaataagccaagatatggcggatattgtaatagtattgtcgtggaatagcttacttttacaagatatagcctttatggatagccaaggcatgttagttgaagcgcacgctcaacctttgagtaaatacagcgatggggtcaccttatcagacggttatgccgtgatgattttagaaagccaacaacagataaactcgagacaatatcttgcacctgcttatatctaccattccgtttttatgcaaagtaatgctgaacggacaatgggaggcacattatttaacttttatacgatatcaaaagtgatttctcagcttctcgatcttagtcattatttaccaagtgatattggtgctatttttattcatggtaatggttcgattattagtgataaagctgagacggtagctattactaacatctttaaacaacccattcctattattagctataaagggcagataggttatatttctaattgctctggtattattgatttaatgattatagctgattcattaaaaaataatcgattgatcccctcaactacacattatccaatagatgatggaatggaggttaatttcctcactaatcaagagtgtgtgaactatagcgctaaacctattttaaaaatcggcttaggtatggatggctctattattgccatgttattaatcgcaaatggagagcaaggatga

SEQ ID NO: 302270 - DNA, 276 bp, Proteus mirabilis
atgcatgcggcgcaaggttatgcttcggggggctttgtgggggcggtcgcagggcgaataccgattacaccgcaaccgacgttagcccgtgcaggcggggtgcaaatgacggtcgttaatcatattacggtgacaggaaatggtgacgctgtacttgctcaagcaatgaaagaagccgcacaacaagggacagaagccggcgcacagaaagctcacgcgatgatgttacaagactttcaaagtaatggcgcagcacgcagaacattaggagtttaa

SEQ ID NO: 302271 - DNA, 597 bp, Proteus mirabilis
atgtctattcttgaatggccaaaagcggtgatccccatacaggaaaactggcaattattgagtaacagcaaaacctttacctcgccatttaatggaagtagccagacggtacgctttccaggaagtcgttggcgttgtgagctgacatttaataatttaaatgaagagaaatcgcgccagttagaagcgctagtggcttcattggatggcatgtcgggacgggtcaaaatatcaagctggataagaaaagggcgttatgggtatggttcgcctcgtattgcaataccgagtcaattgggtaatcggctagaaacaaaggactggaagcgcaatatgcgcgtattacagcaaggggatcgcttaactgtgggcaatgaactcaaaatggtggtggcggatgtggtcagtgatcatcaaggacgtgccattattcttatttcgccgatgttaagaatgtcacctaccgtcaatgaaatgctcgaggttgagcgtccttttggaatttttcgtctcgttgataatgaacagggtaaatttcagcatcgtcgattggggtataccaatatcacgttatcttttgaggaggtgttgtactaa

SEQ ID NO: 302272 - DNA, 918 bp, Proteus mirabilis
gtgctgacaaaatcatggaatgggagtcaggcttcttatgaagtgaaaacttttaataaatcattaggcagtgatgcgagttcagccggtgttcttattcagccgatgcaagtaccgggtattattatgccggggatgcgtcgtttagttatccgcgatttattagcacaaggtcgtatttccagtaactcactggaatatgtacgcgaaaaattgtttaccaatagcgcggcacccgtgaaagaaaaggcacaaaagccagaatctaatctgacgtttgaaaaacaaacggcaaatgtgatcactattgctcattggatccaagcgtctcgccaagtgatggatgatgctgtgcagttacagtcttacgttaataaccgcttattgtatggcttagcattagtggaagaggagcaattactcaatggtgacggtacagcggataatttgacggggattaatcatgttgccactgcttatgataccacattgagtgctacgggggacacgcatgctgacttgattgctcatgccatttatcaggtaacagaatctgaatttagcgcctctggtatcattttaaatcctcgtgattggcatgccattgcgttaatgaaagataaagaagggcgttatatttttggcggtccacaagcgtttacttcaaatgtaatgtggggattacctgttgttccaacaaaagcacaaaaacaaggtgagtttactgttggtgcatttgatttggcgtctcaagtatgggatcgaatgaatgcagttatcgaagtgagtcgagaagatcgtgataatttcgtgaagaatatgctgaccattttgtgtgaagaacgtttagcattagcccattatcgccctcaagccttaattaaaggaactttcccaacgtctggaagaagtgcttaa

SEQ ID NO: 302273 - DNA, 918 bp, Proteus mirabilis
gtgctgacaaaatcatggaatgggagtcaggcttcttatgaagtgaaaacttttaataaatcattaggcagtgatgcgagttcagccggtgttctcattcagccgatgcaagtaccgggtattattatgccggggatgcgtcgtttagttatccgcgatttattagcacaaggccgaatttccagtaactcactggaatatgtacgcgaaaaattgtttaccaatagcgcggcacccgtgaaagaaaaggcacaaaaaccagaatctaatctgacatttgaaaaacaaacggcaaatgtgatcactattgctcattggatccaagcgtctcgccaagtgatggatgatgctgtgcagttacagtcttacgttaataaccgcttattgtatggcttagcattagtggaagaggagcaattactcaatggtgacggtactgcggataatttgacgggaattaaccatgttgccactgcctatgataccacattgagtgctacgggcgacacgcatgctgacctgattgctcatgccatttatcaggtgacagaatctgaatttagcgcctctggtattattttaaatcctcgtgattggcatgccattgcgttaatgaaagacaaagaagggcgttatatttttggtggcccacaagcgtttacttcaaatgtaatgtggggattacctgttgttccaacaaaagcacaaaaacaaggtgagtttactgttggtgcatttgatttggcgtctcaagtatgggatcgaatgaatgcagttatcgaagtgagtcgagaagatcgtgataactttgtgaaaaatatgctgaccattttgtgtgaagaacgtttagcattagcccattatcgccctcaagccttaattaaaggaactttcccaacgtctggaagaagtgcttaa

SEQ ID NO: 302274 - DNA, 918 bp, Proteus mirabilis
gtgctgacaaaatcatggaatgggagtcaggcttcttatgaagtgaaaacttttaataaatcattaggcagtgatgcgagttcagccggtgttctcattcagccgatgcaagtaccgggtattattatgccggggatgcgtcgtttagttatccgcgatttattagcacaaggccgaatttccagtaactcactggaatatgtacgcgaaaaattgtttaccaatagcgcggcacccgtgaaagaaaaggcacaaaaaccagaatctaatctgacatttgaaaaacaaacggcaaatgtgatcactattgctcattggatccaagcgtctcgccaagtgatggatgatgctgtgcagttacagtcttacgttaataaccgcttattgtatggcttagcattagtggaagaggagcaattactcaatggtgacggtactgcggataatttgacgggaattaaccatgttgccactgcctatgataccacattgagtgctacgggcgacacgcatgctgacctgattgctcatgccatttatcaggtgacagaatctgaatttagcgcctctggtatcattttaaatcctcgtgattggcatgccattgcgttaatgaaagataaagaagggcgttatatttttggcggtccacaagcgtttacttcaaatgtaatgtggggattacctgttgttccaacaaaagcacaaaaacaaggtgagtttactgttggtgcatttgatttggcgtctcaagtatgggatcgaatgaatgcagttatcgaagtgagtcgagaagatcgtgataactttgtgaaaaatatgctgaccattttgtgtgaagaacgtttagcattagcccattatcgccctcaagccttaattaaaggaactttcccaacgtctggaagaagtgcttaa

SEQ ID NO: 302275 - DNA, 918 bp, Proteus mirabilis
gtgctgacaaaatcatggaatgggagtcaggcttcttatgaagtgaaaacttttaataaatcattaggcagtgatgcgagttcagccggtgttctcattcagccgatgcaagtaccgggtattattatgccggggatgcgtcgtttagttatccgcgatttattagcacaaggccgaatttccagtaactcactggaatatgtacgcgaaaaattgtttaccaatagcgcggcacccgtgaaagaaaaggcacaaaaaccagaatctaatctgacatttgaaaaacaaacggcaaatgtgatcactattgctcattggatccaagcgtctcgccaagtgatggatgatgctgtgcagttacagtcttacgttaataaccgcttattgtatggcttagcattagtggaagaggagcaattactcaatggtgacggtactgcggataatttgacgggaattaaccatgttgccactgcctatgataccacattgagtgctacgggcgacacgcatgctgacctgattgctcatgccatttatcaggtgacagaatctgaatttagcgcctctggtattattttaaatcctcgtgattggcatgccattgcgttaatgaaagataaagaagggcgttatatttttggcggtccacaagcgtttacttcaaatgtaatgtggggattacctgttgttccaacaaaagcacaaaaacaaggtgagtttactgttggtgcatttgatttggcgtctcaagtatgggatcgaatgaatgcagttatcgaagtgagtcgagaagatcgtgataacttcgtgaagaatatgctgtccattttgtgtgaagaacgtttagcattagcccattatcgccctcaagccttaattaaaggaactttcccaacgtctggaagaagtgcttaa

SEQ ID NO: 302276 - DNA, 753 bp, Proteus mirabilis
atgctaatgacaatgattaaatcacttatttttatcccttatctattattaagtggatgtggtgagtatatcaatatatatctggataataaattccccgtcaatatgaataatgatggcaataaaatcacggtttattcaactatttcccctgaaacggtagtacttgttcgcggtacgtatacgtcaaataaatgcgaacgttctcattttaatgcttcttatactgaagtcacttattcttctttaacacaacaagtggaagcagagcgtaaaatagcaaaggataataaaaacgcgacctataccgtgcctatcgatgggggaggatggtgtaattggaagctggtagaaatagagatagcaccattatctactaaatatgaagtgcttgttagaagaaatatggttttttcattgtctaatagtgaacattcaaaaataaaattatttgctacattagcccctgttatagtggaagaaaaggatgaacagtccatctattactcatcatcaataatggaggatgaacaaaaattatccaataaatcagatggagaaatttattttaattataaagttgaacctaaattaaccacgactatcatctcaaatgataacaaagctattttccctaacggcaatattaaaatattggacggatctagttatagcagaataattaatttcaatgaaataatcgagaatagtgatgaaaaagcgtttacttcttttgttagatatattgattga

SEQ ID NO: 302277 - DNA, 1026 bp, Proteus mirabilis
gtgggtgcttataacaaagccgaggctgataagcgttttcagcctgtgggtaaatatcaagcggaaggttatagctatgcaaaagcggaatctgatactaaatatcaacccaaaggcaattatgctcctgcgggaaattatgcgaataaaggcgatagttataccaaagcggagtctgatgggaaatatcaacctaaaggcaattatcaagcttcaggagattatgccactaataccaatttaaaaaatgagcttaataaaaaatttgataagggtaatatttctcaagcgaccggaacctcaacggctcatgttattagccaaaaagccgccactgatgcttttcagccaaaaggaaattatcaacccaaaggcaattatgcattagtgggtgcatcctatactaaaacggaatctgataataaatatcaacctaaaggcaattatttagcgacaggttatagttattctaaatcagagtcagatggtaaatatcagccgaagggcaattatttagcatcaggttatagttattctaaatcagagtcagatggtaaatatcaacctaaggggaattatgctttgaaatcagatatcaatgatgcaaataatattcctgttggttcacctattccttggcctttaccaaagcctccagttggatatttagcttgtaatggacaaacttttaataaaaaaacgtatcctaaattagctattgcttatccatcaggaaaattacctgatctaagaggtgaatttattcgcggttttgatgatggtagaggggtagattcaggtagaataatattatctccacaaactggtaatagtttattatcgggtactggacatggattttataattatgaagctaaaggatatgttgaaaaattttatggaggatttaattcaggatctaataatcaacaggatcaggcaatgtggcaacaaattgaaggtaaaaataataatgaaactcgacctaggaatatttcatttttatatattgttagagcagcataa

SEQ ID NO: 302278 - DNA, 444 bp, Proteus mirabilis
atgttgaatggtggtaagggtaatgatcggatctgtgtagcctcaacagatagagggcttccaggcagaaatatcattcaagggggagaaggtgatgatgaaatatatttgggcacaggaactcatcgtataacaggtggacaaggaaatgatacctttaattttttctgctatgagggcgttgaaagcaatagttcaatttgggattttgaaaaaaacaaggataaaataacgttgatcactagggattatagaaaaatagatatatcaaaaatgaaaaaagttgataaattatcaggagataaaaatgaattttcattaaatcataacaaaccagccaacaaaaccatcatagacgtttcaacatcttctaacgatgataagtccattgtacatatagagattgtcggtatatttaaccatgatgaactctttgcagtataa

SEQ ID NO: 302279 - DNA, 798 bp, Proteus mirabilis
gtgctgtatcagcaagccagtgtggatttaggcgaaaaagagctggcgaacttacaacgcaatgtcgagctcactaaacagcaaattgaggaagagcttaggaaacgagaggccatgaaaggtgatccgatggcgggattaaaacaaggcttatcggatttcagtgagtcggccatggatgtaatggaaaacgtcagaaacgtcactaccaatgcccttaataatatgtctgatgcattagccgattttgctttaacgggcaaaggaagctttaaagattttgccaatgcggtgatctccgatatcactcgaatggtgatgaaaatgctggttttcaaagccattgaagcaggcgggcaagcaatgggctttgatatgggatggatgagcaaagggcatgcttacggtggctatacggggcatggcgggaaattcgaacctaaagggattgtacatggtggcgagtttgtttttaccaaagaagcgacggctaaattgggtgtcggcaatctctatcgcttaatgcatgcggcgcaaggttatgcttcggggggctttgtgggggcggtcgcagggcgaataccgattacaccgcaaccgacgttagcccgtgcaggcggggtgcaaatgacggtcgttaatcatattacggtgacaggaaatggtgacgctgtacttgctcaagcaatgaaagaagccgcacaacaagggacagaagcaggcgcacagaaagctcacgcgatgatgttacaagactttcaaagtaatggcgcagcacgcagaacattaggagtttaa

SEQ ID NO: 302280 - DNA, 417 bp, Proteus mirabilis
atgtctaacgctttattgcgtgaattagtgttaaaccaagcactgaaagtgacgccttttacctatttagacaacaccttttatgtcaaagagttggatgttggcaccatgaattacattcagcgcaaacttcgtcaaattaaaatcaagctcgccgaagagcaggacatttatttagacgaagacgatcccgaacaatttaatgaagcgataaatcgtgtctacgatgaatatgatgtcgccagaatgttggcctttaagttgtgtgatgaaaaaggggaactgctttttgatgctgaaaatgaagaagacttaaaaggtcttaatcgtctagggcaagggttctctaatgcggtgtttacggccgaagcggggaatagcgaaaaaaacttggagaacggcgacaatttcaattga

SEQ ID NO: 302281 - DNA, 417 bp, Proteus mirabilis
atgtctaacgcgttattgcgtgaattagtgttaaaccaagcactgaaagtgacgccttttacctatttagacaacaccttttatgtcaaagagttggatgttggcaccatgaattacattcagcgcaaacttcgtcaaattaaaatcaagctcgccgaagcgcaggatatttacttagacgaagacgatcccgaacaatttaacgaggcgataaatcgtgtctacgatgaatatgatgtcgccagaatgttggcctttaagttgtgtgatgaaaaaggggaactgctttttgatgctgaaaatgaagaagacttaaaaggtcttaatcgtttaggacaagggttctctaatgcggtgtttacggccgaagcggggaatagcgaaaaaaactcggagaccgacgacaatttcaactga

SEQ ID NO: 302282 - DNA, 684 bp, Proteus mirabilis
atgaaaggtgagccgatggtgggattaaaacaaggcttatcggatttcagtgagtcagccatggatgtgatggagaacgtcagaaacgtcactaccaatgcgcttaataatatgtctgatgcgttagccgattttgctttaacggggaaaggaagctttaaagattttgccaatgcggtgatctccgatatcactcgaatggtgatgaaaatgctggttttcaaagccattgaagcaggcgggcaggcaatgggctttgatatgggatggatgagcaaagggcatgcttatggtggctatacggggcatggcgggaaattcgaacctaaagggattgtacatggtggcgagtttgtttttaccaaagaagcgacggctaaattgggtgtcggcaatctctatcgcttaatgcatgcggcgcaaggttatgcttcggggggctttgtgggggcggtcgcagggcgaataccgattacaccgcaaccgacgttagcccgtgcaggcggggtgcaaatgacggtcgttaatcatattacggtgacaggaaatggtgacgctgtacttgctcaagcaatgaaagaagccgcacaacaagggacagaagcaggcgcacagaaagctcacgcgatgatgttacaagactttcaaagtaatggcgcagcacgcagaacattaggagtttaa

SEQ ID NO: 302283 - DNA, 177 bp, Proteus mirabilis
atgcaacaaggccgagatgccgtttcgcctattgattaccaagcccgtaagccctttttatcttttggtaaaaacccacttcctgccgattttgagcaacaggtcgaacagattctggcaaagcttgagcaggagaaaaaaaccatgcgtaaaattgataaggaaggtacagaatga

SEQ ID NO: 302284 - DNA, 276 bp, Proteus mirabilis; identical to SEQ ID NO: 302270

SEQ ID NO: 302285 - DNA, 336 bp, Proteus mirabilis
atggctaaatcgttattcataatctgtttttcaataatcttatctggttgctcagtgaaaaaagaaatagtgcctatcggtggtagtaaagctgatggtacggttcgtatgggttatacatatggtgataaattcggtgcttttgaagttcctgttgttgatatagaacgtgcaaacgaattagcaacaaaaaaatgtaaaacttggggatatgaaggcgctgaagcatttggtgggaaaactgaaaattgtggtatgagtaatggatttgcatgtacaagaatgaatgttgctattgaatatcaatgcatcggtggtaaatcagcacaatattag

SEQ ID NO: 302286 - DNA, 276 bp, Proteus mirabilis; identical to SEQ ID NO: 302270

SEQ ID NO: 302287 - DNA, 183 bp, Proteus mirabilis
atgacgtatatgtattacgtttttaattttaatcccgatgaacgcttacgtttattattagaaaacttcgatttaatgccacgtccttctggcgtaggcgtcaaatatcgcatcataactaaaaaagcatttggttatggttcatatcgtaaaaatttcttaaagagtaatttcggagaataa

SEQ ID NO: 302288 - DNA, 348 bp, Proteus mirabilis
gtgcatggtggtgagtttgtttttaccaaagaagcaacggctaaattgggtgtcggcaatctctatcgcttaatgcatgcggcgcaaggttatgcttcggggggctttgtgggggcggtcgcagggcgaataccgattacaccgcaaccgacgttagcccgtgcaggcggggtgcaaatgacggtcgttaatcatattacggtgacaggaaatggtgacgctgtacttgctcaagcaatgaaagaagccgcacaacaagggacagaagccggcgcacagaaagctcacgcgatgatgttacaagactttcaaagtaatggcgcagcacgcagaacattaggagtttaa

SEQ ID NO: 302289 - DNA, 288 bp, Proteus mirabilis
atgaaagttaaaattaaagaatatgatatcgccgagcatttaaacagcgaagaagaaatgcagctttatttaaatgatattttagaagatggcgaccccgcgttattactttccgcattaggtgatattgcccgagccaaaaacatgagccagctttccagagaagccggtatgtccagagaggggctttatcacgctttatcaggtaaaggtaatccgacattcagctccatgctgaaaatcaccaaagcgttaggcttgaaacttcatttcaccgcaggggcgtag

SEQ ID NO: 302290 - DNA, 306 bp, Proteus mirabilis
atgaaagacaaagaagggcgttatatttttggtggcccacaagcgtttacttcaaatgtaatgtggggattacctgttgttccaacaaaagcacaaaaacaaggtgagtttactgttggtgcatttgatttggcgtctcaagtatgggatcgaatgaatgcagttatcgaagtgagtcgagaagatcgtgataactttgtgaaaaatatgctgaccattttgtgtgaagaacgtttagcattagcccattatcgccctcaagccttaattaaaggaactttcccaacgtctggaagaagtgcttaa

SEQ ID NO: 302291 - DNA, 246 bp, Proteus mirabilis
atgtggggattacctgttgttccaacaaaagcacaaaaacaaggtgagtttactgttggtgcatttgatttggcgtctcaagtatgggatcgaatgaatgcagttatcgaagtgagtcgagaagatcgtgataactttgtgaaaaatatgctgaccattttgtgtgaagaacgtttagcattagcccattatcgccctcaagccttaattaaaggaactttcccaacgtctggaagaagtgcttaa

SEQ ID NO: 302292 - DNA, 246 bp, Proteus mirabilis; identical to SEQ ID NO: 302291

SEQ ID NO: 302293 - DNA, 816 bp, Proteus mirabilis; identical to SEQ ID NO: 300228

SEQ ID NO: 302294 - DNA, 576 bp, Proteus mirabilis
atgcaagaaaaatatttaaactataaaaagatcagagcgattcctattgcaggtgatatttttcgcattgctaatgcatacgtttatgaaggtaaggtggataatcacggatctattgccccgttatctttatggctcgataaaataggtaaaaaattactatatacactaatattaacagttattttatctattatttgttggttattcttggatgtaaattgggatgctgctgatgcaataataagtgtttttcctagcttgctcgggtttggtataggtgtgtttgcgctattgtttattttgccaaataggctttatcagcttttagataaggaaaaagagaacggaaacattaagtttggtcatgagattttagctgtggatatgggctacccattacttgtatttgcagttattttgacatggtctggagttaataagtttatagatattgctgcttttaattttgttagtaagtggctgtttttttatggtatgagcatggtgttagaactcatctcttttttgttcaatatctcaatgttaataatgaatttaaaaataaaaccataa

SEQ ID NO: 302295 - DNA, 936 bp, Proteus mirabilis
atggcaatttataagttttataacattcaacttttaccaatcgatacaaagaaagtatctgaggttggggtagatgggtattgtaggttgtttgaagcattatctaatcaagtgaatgcctgtaaagagaacggagataaactaagctcaattgcttttcctatgagagggggaatgttttttgctccatatagcataacaatcacaacatacccatctaaagatggcgatagtaggttagtttatggttcatttttgaagtttgatgatgttaatgaggtcgttgacaccaatagtggtgagcttttgtacaagtcgaagggtaactctagtagtaaacgttatgatttagagttcgtttttgaccctgaacagcacgttatggccattcatcataccgcgggattgccaactagaaacccattgattgaagcattaaaaagcatattagaaggacatgcagctgggctttttaaaaaccatagcttagagattgaggagctgacagctgccgagtcaattaagattttctttgaaaagaatcttttcggaataaagagctatgatgggtacgttacgttttcaaactctggctcatttgatgaatttgcagaaagtgcgatagtaaaaaaagctgaaaaagaattaaaagataaaaatgttggtaaatggagctctaaatattctagctttaaaggatcgttgatgagtgcactgcctgagcaagcaaaagtacaaatggttttagctgcaaggtatgggaatgtcgaagtatcttatactgatgaaaatggggaaaaacataagtatgtgatggaagatcatccagtgagagaattctataaagaagaaaaacaattgggacgaaggtctagagcaatagaaataaaaaaccttatagttcgagcaataaaaagaacagtgtcaaagtattag

SEQ ID NO: 302296 - DNA, 663 bp, Proteus mirabilis
gtgagcgaagaaagaaacggaatttacctccgaatcaatggggatcagtatcggcatatttgggtggttggtgatattcatgggtgtttcaatttattaaaaaggaatatgtatcgaattgattttgataaagaaaaagatttattgatttcagttggtgacctaatcgataggggtgatcagaatgtcgaatgcctagacctgattaatgaaagatggttcagggctgtacgtggaaatcatgagcaaatggctattgatgttgttatgcacaaaggcaatagagattgctggctagcgaatgggggattttggtttttaagcattgatcctgacgaagcaattcgaacagcgacaaatatctcatacgcagaaatgttaccgctaattatcgaggtcaatgcaggcggcaaaaagacagtcattgctcatgctgattatccatccgatgaatatgagttcggcaaaccagtagatgagcagtatgtcatttggagtcgtgagcgtataggtgacgagaatgtgcgtgagattaaaggtgctgacctatttctatttggtcacacaccaatgattaaaggtatagaaaagcgcgctaatcaggaatacatcgatactggggcagtgtttggttatgggctaactatgaggcaaatcaaatga

SEQ ID NO: 302297 - DNA, 144 bp, Proteus mirabilis
atggctaagagaaataacgcattagagagcatgaaaaagtggatggaattcattcctcaatgtttgcaaccacaaggtaagcaaattgacaacgaagaacccaaagagaaaccagtagccaagaagcggagggcgagaaagtga

SEQ ID NO: 302298 - DNA, 390 bp, Proteus mirabilis
atgactaaaaaacaacgtgaaaatctacggatgctattcggtggtcgatgcgcttactgtggctgtgagttaccagaaaaaggttggcacgcagatcacgtagagcctatttacaggaaaaccgacatgattaacggaaaaatggtatcgacaggagagtgctttaatcctgaaaaagacactgaggacaaccttgttccagcatgtgcgccctgcaatctatttaaatctgtttatagcattgaagtgtttcgagaagaaatcaagaaacaggcagatagggctagaaaatcatctgttaatttcagaacggccgaaagatttggattgattgagctagtcgataaaccggttgttttctggtttgaacagtatcaacaggagagctaa

SEQ ID NO: 302299 - DNA, 240 bp, Proteus mirabilis
atgcagggaactaattgggttaagataaaaagtgaactaccgaaacctaacgagccagtattactaatttaccacggcagagtttacaacagtgttttctacttgcaatcgtacgattcagctagcgggtggagatggtctttcgttgatgatgattgttcattcattgctttacatggcgctagtcactggatgtacatcaaagacatcccactcccaccaatgccagagggtgaatga

SEQ ID NO: 302300 - DNA, 336 bp, Proteus mirabilis
atgaacattaaacaattacagcaacaaatccatcaacaaaataaatctgcaggatggtgggataatccacgcgaaaaagggacattactttgccttattcactcagaaatcagtgaggcgatggagggtgagcgcaaagacttaatggatgaccatttgccacatagaaaaatggcagaggttgaacttgctgatgcagttattcgtattttggattatgccggagcctttggttatgacattgaaggggctattgctgaaaagctcgaatacaacaagcatcgagcagatcatcagcgtgaaaaccgcatcaagaagggcggaaaacaattctaa

SEQ ID NO: 302301 - DNA, 1377 bp, Proteus mirabilis
atggaaaataaattcacggattattactcagagcaggctgtcattggcggaatactgattgccacatctgaaacagaagaaattgctatctcagcgattgaaagtttagttgctgacgatttcacatcatcggctcacaaagccatatttaaagccatgcaaagccttgttagaaatggctctaaggttgatttggttttactgaatggagaaattgaacagcaaggtaattcagatattactggcgggttcggctatcttgctgaatgcactaaaaatacatcaagcattcaaatgttacccggttatgttcagaaggttaaggatctaaccacggcacgaaaaacgcttgctgttctcaatgaaggtattgcgaagattagctcatcaaacgttagcaaccttgttgatgttgttggtgaggtacaatcctcaatctcatcaatggacacaggtagcgttgttgaaacacagcacatcatggacggtgtgaatgagtcgataaatattctcgagtcgatgatcaacggtgatatctggaaatataaaactcagtttggcttacctgatatcgataaggcatttggtggatttaataacaccgatttgattgttgttggtggccgtccgggtatgggtaaaaccatgttcagtacagcaatttcaaaagcaatcggattgaagcaaaagaaacccgttgttttttatagccttgaaatgccctcgtggcagatatcagaacgcatttcatttcatcacgcgggggttaacaagcaagacttactcggtgatgataaatcgaaaatcaacatggatgaggcttgggctaagttatctcatgcgcttgctgacattcaggaatcaccgatttatatcaatgaccgaccatcaatgagcattcatgaaatacgtgctgacgctagaaagatgcacaaaaaaacgggtggtttaggtgtcattatcgttgactacttgcagaaaatgaaaatgaccaatcctgaaaatatgaatcagtcagtaggtgagattgcaacaggactaaaaaacctcgcgaaagagcttaagtgccccgtagtcgcactggcacagttaaaccgtaacttggagcaacgaacaaacaaacgccccgttaatgctgatttgagagagtctggcgttattgagcaagaggctgacgttatcttcatgatttatcgtgatgaaaaatatcatcccgacaccaatctgaagggtatcactgaggttatttgcacaaaatcacgacacgcaccaggtgcagaaaaaacatattacttcactaacgctcgcggtggtttagatcaggcggtattgagcaatataaacagcgactacgtagatgaagaaattgagtgttaa

SEQ ID NO: 302302 - DNA, 180 bp, Proteus mirabilis
atgagtaatgttgcatcgtacaaattaagagccaagaaactattgcctgaattaccagaagaagatggatttacattcataccaaataaatttcttgatgatttattgaaggaagatttttcagttgatcaaattaatgaaattttgagtgttttcaaaaggaaggtgcttaatggctag

SEQ ID NO: 302303 - DNA, 354 bp, Proteus mirabilis
atggaatgtgcaaaaaatatcaaagtagagtgctcatcaaacgaattgatgacgttttacattcaacaaatgtattcagtcggtaataacggactcgccaaggcgctaggaatacacccatcaaaatccagtcgagataaagccagaatattcgatttagcttgccagttggtgagtaagttcggattgccccctgattcggtaaacatcagtgagaagccaacgaaagttgttcttgaaggtgattatgctgaaagggttattcaggctcttgaagggaagggaaaggttaaaagaaaagcctcaaccactgcgaatggtgaggcttctcaacaaatggacttaaccatttag

SEQ ID NO: 302304 - DNA, 273 bp, Proteus mirabilis; identical to SEQ ID NO: 301704

SEQ ID NO: 302305 - DNA, 234 bp, Proteus mirabilis
gtgggaaaaatgacattcgtagttgagtataaagatggcaaggagccgtctgtaaatgctggcacggagatactaggcggtaaattgttatcagttggatttaatgactaccgagatgaacaactaactcaggatgaagttagcgccttaaatcacgcaattaactttaacgacttgaaagaaacctgcaaagactttgaagttaattatgacgaagttgtagcaaaactctaa

SEQ ID NO: 302306 - DNA, 234 bp, Proteus mirabilis
atggcaaatgataataacggttggattcgttgtgatgagcgattgccagaacttggtgattactcagtgttagcttactggagtcatggcggaatggatatgattcatgtagaggactatttcagtgacataactaacggaagagatgaaaggggaaatctaatgtatacaaaattgtatttaagccaacaagtcacacattggcaaccaatgccagaagaaccaaccaagtaa

SEQ ID NO: 302307 - DNA, 474 bp, Proteus mirabilis
gtgactcagattctagatatgtgctgtggtagtcgcatgttctggtttgacaaggaagataaccgagcaatttacagcgacatccgcgcagagaaacatattttatgtgatggtaggaaactaaacatcacaccagacattattgctgattttaaaaacctccccttccctaataacacattttatcaagttatattcgacccacctcatttaattagagttggccacaattcatggatgtttaaaaagtacggacgattaaataaagagtcatggaaagacgatttatcaaaaggatttagtgaagcatttagagtgcttaggcctggagggacgttactgttcaaatggaatgaaactcaaattccaacaaaacaaattttagcgctaacagaccaaaaaccaacagcagtacagcgtgtagggaaaaatgataagacgcactggatctcttttcttaaggaggttgaatga

SEQ ID NO: 302308 - DNA, 156 bp, Proteus mirabilis
atgatgagcgactcaaaacaatggttagaagaattacgcaggaagcgtaaagaatcgcaggaacgcgaacacgatgaatttatgtatcaaacggaagtgttaggacgacaaggactgtcgataccaacaaaggactttgcaggaggttttcaatga

SEQ ID NO: 302309 - DNA, 327 bp, Proteus mirabilis
atgagtaaattaataattggcggagtgaatatatcaacttcgcaaataaacaaattatcacacgcatctaaagctagagatgcaatgtctatttgggaaaaaataaaagattggtttaatcatggtcaaaaagaacatgtgcttaaattactttatcatacctatttcaatcctaaaaattcaatatttgataaggttgattgctttgcagaattatattctatgacaggggcgcaatataaagataattttcatttatatttaaaagatggttatgatttaaaaatgaaatttgttataaaaaacgtttataatggtgaggtatga

SEQ ID NO: 302310 - DNA, 300 bp, Proteus mirabilis
atgatggatcggatacataataaaaacccaagcatagaaaaagacataggtaatataagaagttatataagaagaagactacatgaaattcctaattatgttaattatgatattaatcaatacaatttctatttatcccaaataaaaaatgacttactaccaaataattattttaacgtagagcgttatttggatggtgtaacagattttgttcgtttatataatataaataattatagaattagtgtagacgataaaattgaagatcgttgtaaattacaaaaacttatgaatatatag

SEQ ID NO: 302311 - DNA, 555 bp, Proteus mirabilis
atggacttaaaacaatgcgataaaaagcaattaaaagaagaatttgatcgacttacagcattaaccagctataaatcaacaatgggtgtttttgatatttttactagactacctgaattattaaataatgatgaaactgttttatgtgttaatagcggactcgtaaaatctaatgtttggttgatcattcctacaaataaacgagttatttttctacataaaaagagtggtctctttcataaaaaaattgattcatcttcagtaaattatgatgctattacttcaattgactcatcttctggattagctggaggtaaaataaaaataaatactcctggtactatttatgaagttggcactctacaaaaaaattcagtacaaccactagttgatattatcctgtctacaaaaaataactcattacaacaaccttctaataatagtggcagtgatgatctgttatctaaattagaaaaattaggtaaattaaaagaaagtggtgtactgacagaagaagagttccaagaacaaaaaagtaaattacttaatttttaa

SEQ ID NO: 302312 - DNA, 1071 bp, Proteus mirabilis
atgaagaaactattattttttataactgatataacaactggtggtggtactgaaagagcattaattactcttgtaaataaattagctgataaaaatttcaatatttatatttattctctttacaggaaaaatacaacacctttatttgaaataaataaaaaaataaaaatagaattcttaaaaagtaaacaccatattattaaactatttaatatgaaaaatattgctcaagaagacccttcagctattaaaattatagtatctatgggaagattatcgattgaaactgcattattatttaagctatttaaaataactaatatttttttatcagaacatacgtcttttgagtcttatagatttttaattagaaaattaaagttattaagctatagactggcagataaagttatagtattaactgaacatgataaaaaattactcaatagtgagtataatttaaataatatttataccatacctaatattaacccatatgaagaatataaatataatttcaactttgaccaaagaaaaaacatagctcttgctataggaagattgtgctatgctaaaaattttgaaagactaatacaattatggagtaaagcaaacacgcaaaattggaaattactaattgttggtgatggcaatgatagaaaaaaattagaaaaaactattaatgaaacaggtgtaaaaaatatagaaatttttccatttacaaaagatattatttcttattatcagaaagcaaagctatatttaatgacctcgcgattcgaaggtttaccaatggttttaattgagtcccaacattttagcatacctattatctcttttaattgtaaaacaggtccatccgaaatagtaaaaaatgactataatggttacctagtcgattataacaacgattcactatttatagaaaagttagattttttcataagaaacgaatcgttacagagaaaattagctattaactctcctttggtttcaagtaattattcaagtaaaataattataaatatgtgggaaaatattttatctgaaaataaatcttatgaaaaataa

SEQ ID NO: 302313 - DNA, 822 bp, Proteus mirabilis
atgaaaaataatacaatttgtgttgttatacctatttatataaatactaatattcacctatttaaaaaagctattgaatcaatagttcaacaatcacatccagcagatgaaattctaattatttgtgatggccttatatctactcaattaaataatcttataaaaacattttcgaataaatattcatatataaaaataattcgatacgatcataataaaggtccaggctatgcaagagattatggaatcaaatgtacttcttgtgattatatagctataatggattccgatgatgtatctacaatagacagattagcaatacaatatgaattcatgcagaaaaataacgacatatctttgtgtggtggattaataagagaactcgatgacaataatcataaaatttcaataagaaatgtcccaatgctccattcggaaatactaaaaacaattaaaataaaatctcctataaacaatgtaacagctttttttcgtcgtaaagattatttagaaactgatggatatgcacatattagaagctctgaagattatgctctttgggctagattaatatataaagaaaagaaactacaaaaccttccacatatatttgtcgatgtcaacttcgatataggttcattatccagaagaactggattggctcattttaaaaatgacttgttcacacaaaaagaattattaaattttaatttaataactcgatatcaattttataaaaatattttaaaatactttatattccgttgtattttgcataaaaatataaaaaaaatactatataaatattatttaaggaaataa

SEQ ID NO: 302314 - DNA, 1257 bp, Proteus mirabilis
ttgaataaaaaaatattacataatgctatttggatgatttctgaaaaagcaatctccatcataggattattcttagtcacttcttatgttgctaaatacgttggtccagaaacatttggtattattgctttagcaaccgctacatttcaaatagttcaaatcattgcacaattgggtaatgacaacattattttcaaaagagtatcaaaaaataatcgttctggtattaaactaataaaatctactttccttatacgcactattatttatataactataactataccacttcttatatatttttattcatacaaaaataatttaacttttatattctctattgctatttctgtagcatgttatttttcttccatagatgtttattcaatttataacaatgccatccttaaatcaaaacaaaatactatatctaatatggttggattaactttaggattaagcattcagtttataatagcttacaagaaatataaccctatctatttatccataccaataattataacaacctttctcccatttttgattagattcattttatttaataaaatgaatctagtaaaagaaatcgttgtcaaaaaaaaatcaaggtataataaatatatattaagctctggtttagcaattgtgttctcctcattatcaattgctatttatactagaataaatcaatttatgatttcttacttagacagtgattacagtttaggaatttattcagttgcagtaacattatcaagctcatgggcattcattttatctgcactaataagttcaacactaccttctatatttggagaaaaagatgataataaagcgattagaataggagtaaaacttaacattattataacattaatatcattactagttctttcttttataactttatttggtaagctttttataaatttactttttggtgaagaatatatcaatgcttactatttattaaaaatattatgtatatcaacaatgttttcaaaccttggaatgctatcatctagatttattgttcgttcgtcaggctattcatttctatcaaaaaaaatgtttattatggttctacttagtattcctatatcttattgtcttataaaaaattatggtttaataggcgcatcatatagtgtattgataatagaatttgtctcattaacattaatgaactattttttcaagaaaagaatagtttggaagcttcatctagaaacattaaaaatgaatctaaaataa

SEQ ID NO: 302315 - DNA, 1200 bp, Proteus mirabilis
atgctgactgataccaaactgagaaatttaaaaccgaaagaaaagctctataaagtgaatgacagggatgggctgtatgtcgctgtaacgcctgctggctctgtctcttttcgttataactacgccattaacggcagacaggaaacggtgacttttggtcgttatggtattggcgggattactttagctgaagccagagggcggctaggggaagctaaaagaatggtgacagatggtaagtccccagctaaagaaaaagccagagataaagcgagaattaaaggtgctgaaacatttggtgcatgggctgaaaagtggcttcgtggatatcagatggcagattctacacgggatatgcgacgatcagtttataccagggaactcaagggcaaatttggcaaccaaaagttaaatgaaatcacacacgaagacttacgggcgatcactgacactattgttgaacgtggtgcaccagcgactgcggttcatgcacgagaaatcgtacttcaggtttatcgctgggcgattgaacggggccagaaggtagaaaacccagcagatttagttaggcctgcaagtattgcaaaatttgaacccagagatcgctcgttaacgccatgtgaaattggtttgatgtatcgctatcttgagaaggttgggacaacgcccttaattcgggtagctgtaaaactgctattgttaacaatggtacgtaaaagtgagttaacgaacgccacctggagtgaaattaatttcagtgaagcaatttggacaatcccaaaagagcgaatgaaacgtcgcaatccacatttggtttttttatcgcgtcaggtaatggatattttagttgccttaaaaacttttgcaggcggttctgattttattctaccatcgcgctatgattcggatgcgccaatgagtagtgcaacaatgaatcgggtactggatctcacctataaagctgcacaaaaagacggacacgaccttgctaagtttgggcctcacgatttacgcagaacagcgagtacattgctacatgaagctggctataacacagattggatagagaaatgcctggcgcatgaacagaaaggcgttagggcagtgtacaacaaagcagagtaccgcgagcagcgcacggctatgttgcaggattgggctgatatgatagatgagtgcactttagatattcgaaaataa

SEQ ID NO: 302316 - DNA, 2385 bp, Proteus mirabilis
atggcgagaacaactaaaaataatcattatattcctcaatggcatcaaaaaggtttcatgagtgaacgtgataaccaactatgccatttggcacgcaaagaaattcccttgccaaatggtaagtctaaagttactcaaaatgttaagtggtatactgctgctcagcaattttatgaagcacatctatattcaacatttttaggtaaccttgcaaatgatgaaatagaaaagaaactttttggccctattgatgataatggctccaaagctgttcgagcctttctaactgacagtcaagaaaagtggcaccaaaattttaaagctttttttacttatttagacgctcagaaacttcgcacacctaaaggcttagattggattcgaagtaaatatcctgaactcgatcagctccagctaatgattgaaatgcagtcattacgtaccatgcatttcaccttatgggctgaaggagtacgagagctcgtatcagctgaaaattcagacattaaatttatagtttcagaccatcctgtaactgtttacaattatgcctgccctcctgactctgagctttgtaaataccctaatgatcccgatattgccctaaaagggtctcaaacgatctttcctttagataaaaatcggtgcttaattttgtcaaatattgagtacgccttaaatccagaaaatacgaacccacttgaacaacgaacaaatgctacccgtatgcgccgaagcatggttaatacaattgagtttatcaataatcgtatcttaacagaggatgatgttaataaaatcaactatataattaagagtagagctaaagctacagttgctgctggcaaagaggagtggttatttcctgaaaatgatgtggattgtaattgggaagagttaaggcatgtcttattacctcaaccaaatatgctataccggtacagtggagaaatatatgcgcgatttgaagacggcactatccactatcaggacatgcttgggcgcacaactcctcctgctaaatatcttaataaggatataaatgaaactagattaggtcgaaacgatccatgcggctgcggtagcgctatgaaatacaagaactgttgccgagatatacctcttgatttgcgtacaacatggagtgttatgagtatccgggaaagaaatatagcattctgtaattgtattcgtgatgttcttggacttaacagagacaaaacttggttggacgtcaggagagaattatctaaagagcatataacagaaatttatggtttctattcaaccttatggccacgtgaaacagatatttacgcacttttgcctaagccagatggaaagtttcgaggtctgtatacaggcccaatagatgctaggacaattggcgctaatgcgctaccaatggcttccctatttgatgattttttaattgaaactccaatcatcaatccaaataacattaatccagaatttagccctcttgagtcgccgtcaagatataaataccaagctctaaaagatttcatgtttatgctacaaatggagccatttattaggcttggtttgattaacttaatcccagaccctagtgaatttgatatgcctcttatgagaggcatgatggaaatggcaaaagaacgtagcttgaaacaacaaattcttactaatcaagatcaacatttactgacctctatatctattgaggatttactaaattccactgcaataatgccaagagaggctagaattcagttattaatacatgaatttggtttagatgaggtggaagccactaacataatcgatgagctagaaagccaagctgaaatatctccactgatgttattacagaaaacgggatacaaagatagcggtcagttcctacagtttagaatggcaccaaattatgaaatgtcgttactaatagctcaggcgactggatctgtattagtcacggacagtagctcaagatggcaagagttaatgtctgcacagcatagagtacatggaattgcttcttccccatggagtgaattatttgatacctataaagtttttccaattgatgaacgctttttagaaacatttcaaaaatcccaaagctattttgctaatgctagaaattatttaaaagctgctgataaaatggtaataagcaacaaccgcaatgtttatcaacgttctcaattagccgaacaaatttctaactttatgcaattactgaagcaaacaagtgaaccgttgagacttgaatctttgaaaattgcgagccctgaaggtggtttttatgatgtcaacgtacagcgcttacttgccctctctagttgcttaaaatatgaacatcaagttaggtcagtttatggaatagccctccactattaa

SEQ ID NO: 302317 - DNA, 1164 bp, Proteus mirabilis
atggaactggaatttgatatccaaaaacgattaggtaagttctacattccaatatgggttggctgtgataaatccgtagcggctgctattaagattttcagggaacaatggcattcatattctcaagtttccaaaagccataatataaccagattaatcagggaattagttgacccagccgtatctgaatacttgaataggcttccagccaactatctgcgatatagcccaatatcatcaactaagttaacctatagtgatttaattaaaatgcgaggttttcgttactgctctgactgtattggcgactatcttaggccttttgttgaacattctacgtatacagagacagataaattattcatagctactcaagaaacattaaaaagcttattttcccactgcaaaggaaaacgaccaaaaagatcaaggcttgcacctgatatttactttaatacggaaagaagcaaaggattatgtcgtctttgtggcaacccaactgaattttcttcatttattaccaattgggataacgacggttttattgatgatactgaagaaaaatatggactaaagaaagggccagattttagccataaatactgtgctcaccataaaccacaattacaagatggctcttggaacccagcctataaacaagcaattcgctcctctaaacaatttgaattggaagttttaagattatgtcgccaaatagctaaacctgagcgtttaaacgctatgtcaggtgataatctcatagatgagtatttttattattatcttagagataaaacaatagattactctcaatcacttacatgttttgaatatattaaaaatacattttctgaatcaattaccgttgataaaaaaacatgtgagaaaataattagtattgttgataatatgacaaatgtaggagtttctttaggacctaatgatatagataaaatacgcaatattgctagaaaaatggttgactcaagacttactgataataaaaaaagaatgttagctctaagaatgtatggttttagccaatatgagatagctcaaaatatgatgaaacacataggaaaaaagatgacccatcaagcagtgtctaaagctctgagcacagtttcctatgagtttaggcttaaaagaaaatcaataaactaa

SEQ ID NO: 302318 - DNA, 252 bp, Proteus mirabilis
atgagcatatcagtgaaaaataaaacgctgatcaaccgtaagacattgttgaaaatgatcccattatcagaacgaaccatctacaacctggagcaacgaggggagtttcctcgtcgtattgtgctgacaagtcggagcgttgcttgggatttggctgaagttgaaaactggatagaagaaaggcgcagatcattgttaaaagcggctagaccaggagatttatgcagggagttatcatggcgattgaaataa

SEQ ID NO: 302319 - DNA, 852 bp, Proteus mirabilis
atggcgattgaaataatgtctgcattcacaaataaaccacctctatttgactatgttttacccaatatggtcgctgggactgtaggggcaatagttgctccaggaggtgtaggtaagtctatgcgggctttgcaattagctgttcagatagcgggtgggcctgatttattaggaatgggggagctaatgacaggtaatgtagcgtatttacctgctgaagatccaacgatagcgatatatcacagattatatgctttaggtgcaagtcttacttataagcagcagcaatctgtggcaaatgcactcatgattgaacctttaattggcaaatccccaaatgttatgtcttctgaatggtttgatgatttacgcaatatagcaaaaaataggcgtttattaattttggatactttaaggcgctttcatattgaagaagaaaatgccagtggcccaatggcgcaagtaattgcaaaaatggaagcgatatcaaccgagacaaattgctcaatcatcttcctgcaccattcaagcaaaggagctgccatgatgcgtacaggagaccagcaacaagccagccgaggttcctctgtattagtcgataatatccgttggcaatcatatctatcagctatgacacctgaagaggcagctgagtggggcatagagcatagccaaaggaactattttgttcgctttggtatcagtaaagcaaattatggtgagccttttactgaacgctggtttcaacgtcatgaggggggggtgttattaccagttactttgacaaaaaagagacgtcagaacgtaaccagaaacaaagcagtggtgatgagcgatgacgataactggtaa

SEQ ID NO: 302320 - DNA, 726 bp, Proteus mirabilis
gtggttatttatcagccgagtaaaaagcctttagagcgtaaaggtcagtggattgatacttcatttggcaggtgcagagtgacaggaagactgggtcaacggcacgctgatattgttgaaagtatgcttttcgtggcagaacgtaggcgagacataaatgatggcggaatagaattgctggtcgaccctgcaaaactgaggaaagtattatcagacaatcaatatagtggaggaaggttaaataaattacttctggagttgaaggctgcaacagtcgaaattgtgactccaaaacttgatcaaattggggagcgtattattggtggcttaattgatcatgttattccgtcaccaatgacgaggaataatcctcttccggatagtcagggaggagttcgcaggctttggaaggtaagactaggtatcgcgcttgttatgttactggagcgtgatttgtctttatattatcggcctgaattaattgcacgactgaaacatggaattagccaggcagtagctcgccatgtactaacacataataataacccgcctggtggttggtatcttgatacattatttgtcgcagtaagtggcaatgatgttagcgcaaagacaatgagtaattatcgaaccagaattaaagatgatatagaaagtttgcgcgttataggcgttgatatcaattcagaaaatcgggtcaaacgactcacaggggcccgagagtaa

SEQ ID NO: 302321 - DNA, 363 bp, Proteus mirabilis
atgaataaagaattaaacgaaacacggaagaatagcacgcctataaaagtttattgtttgcgaagtgaaaaagagaatattgaatctcaagctagaaaagcaggtatgagtgttgctaaatatttacgggaagtaggtcaaggctatcgagtaacaggaatagttgattatgaatgtgttagagagctagcaaaaataaatggtgatttaggtcggttaggagggctattaaaattatggctaacaaataatatcaaaacaaaaaacattagcagtgtaaccataagagcagtattaaacaaaatagaatctaatcaaaatgaaataggaagaataatgaaagatattgtaatgcgaaaataa

SEQ ID NO: 302322 - DNA, 780 bp, Proteus mirabilis
atgcaaaaaataaaaattttagcggctaaaattatgtttgtcgcttcaattacaactgtgatttacatacagcctccaattgctatgtcagcaggcattcccgtacttgatggtacgaatttaagccagaacattatgtctgctatggaagctgtagcccaaacagcgaagcaaattgaacagtaccaaactcaactacaacaatatgaaaatcaattacaaaacacattagcacctgcggcctatatctgggatcaggctcaatctacgattgataatttattacaggcaacggatacacttcagcactatcagaatcaattaggaagcttggatgcatacctgagtaaattccaggatgtttcatattatcgagggtctccttgctttaatggtacaggcggatgcacgccatcagaaaaaaaagcaatggaagaaaatcgcatattggcttttgaatcgcagaaatctgcgaacgatgcgctatttcgtggattagatcagcagcaaaaaaatatacaagaagatgcaaggaaattacaacgtttacaacaagcagcccaaggcgctaatggacaattagcagcaattggttatgcaaaccaattggcgagtaatcaggcaaaccagctattacaaattcgtagtttattaattactcagcagaatgccgctgcggctagactatcctctgaactggatgacgaggctcgcggagcggcaagagaaaagcaattacggacatggaattatcaaccaagcccaatcgataattattga

SEQ ID NO: 302323 - DNA, 237 bp, Proteus mirabilis
atgaataatttattttttatcgcgttgactttattttgtgtttttttaactggatgtgaaaggacaataatagaggctaataaaataacatgccataaagataattatgaaaagtctttatcggaaattaaagacaagaatttacagggaatatttattggtgaatgtaactccataagaaaatcgaagggaatgagagagtgggaatttaaatcaagtccagaagacaacttttaa

SEQ ID NO: 302324 - DNA, 1359 bp, Proteus mirabilis
atgaaagtcactatctcatgttgtttcttaattatattagggttatttcctgatattgcattagcacaagaactaagtagtagcggtgtgatgaatgatgttcttaatcgttttcatagtgcagcttcaacctgggctccaacaatagaaggtgctgccagtcggttattttggacactagtaactatttctatggtgtggacgtttggcatgatggcgctacgtaaagcggatattggtgagttttttgctgaattggttcgttttactattttcacgggtttctattggtggctactctcgaatgcaacgcacggaatgaatatagcaggttcaatagtggattcattgcaacagttgggagccgaggcgggagggctaagtagcagtaaattaggtccttccagcattttagatatgggctttgaattatatgacagaactgttgaggcaacttcagaattaagctggaaggagtttgccacagctttaatgatggagctaatggcattggcagtactggttgtattagcaattatctcagtgaatttattattactgttagctgccagttggattttattatacgcaggcgtgtttttccttggttttggcggttccagatggacttctgacatggcgatcaactattacaaatccattcttggtatagctgcacagctattgtctatggtgcttatcgtcgctattggtaaacaattcttgctggattatcacaataaaattagtgagaacatggcaagccaggaattagccgtgatgttagttatttctctttgcttactgtttttagtgaacaaggttccaccgatgatttcaggcttagtttctggcggtaatatcggaacgatggggattggttcattcggcgcaggagctgcaatgggaacagtgatgacggctgccagtatgggagcgacaggaatgaaaattgcaggtggtgcgatagcaagcggggctgctaatgcaactagtggtatcagtgcgataaaggcagcttttgagcaagcacaaagtagcatggctgatggggcaatgccaagtggaggaagtgagacaacacaaaatagaagcacggagtctaatactgattcaggcgattcacctttcagcaaggccgctggttttgatagcacggatagatcttctgtaagcccccaaaaccgcactaacgatgcagattcatcaattcgtgatgatatggcagggacaagtgctgataggactgagttttccgataatactttgtcaggaagtgataagcacagcattaatcaatcaactactgataatgatgaggttaacgactttgttaatcgaaacaaatcagataaataa

SEQ ID NO: 302325 - DNA, 258 bp, Proteus mirabilis
atgaaacacaatagcttcttggtcgcatttgatttgctcgaccagactgtagatttaaatgcaaaagcagtctatgagccggttgatgttgttcccgctgaagaaaaagtagatgcaacacaggaaatagctaatttcatgaaaaagcgtgaaattgaagttaaaaatgaggaattatgtagtgaactagccagtaatgtgtttgagggaaaatcggaagatagcccattttcaatagccgcagggcttactagctag

SEQ ID NO: 302326 - DNA, 462 bp, Proteus mirabilis
atgtctcctgcattacttaataatttatttagcttagtgagtaagaacaaaaaaggcatccttaagtcaatcaggtttgcaactcaggaagaactggaagatgataaagaagaagaaaattgtatcatttccaacatttattgccaaatacaggagaactcctattatcaatccttcgagagtttgtctacaagtgagaaaaattgtgtattgctagacatattaatcacttcattaaatgaacgctctaaattcacacctgtgttactttttatagaaatgaatgaaacctctttttcaaaagaaacttttaaaccatatattgaaagattaaactctattgagactttatttcaaaccattgtaacaacccattcaaatatattaaatgaatattcagtaggttttcctcgctatgaattgataaaaggcagtaaatcctcaacactccggaaagtataa

SEQ ID NO: 302327 - DNA, 189 bp, Proteus mirabilis
atgagagccgagtttacaaaaaaacaaagaatatccttgcagggagagcaggatatcaatgtagtcatcctcagtgttcagttattactattggacctggtgaaaatgaagaagaaacatcaaatattggagaggcatcacatatttatagtgccgctaaaaatggtcccagaggtcaatgtgggctaa

SEQ ID NO: 302328 - DNA, 2151 bp, Proteus mirabilis
atgaaggaacagcgtgacgaagctcaaatttttgaggatttggcagtattagctcgttcgccaggatatgttcatgcgattgcgcaaatttgtaatcgcgataacgtcattcatattaagggaacgctaaagccatctgacatgggtcgattgttcagtggtgagcgccttatacggacggagcttacgacgttgcttggtctcgtggtaaaaggaccgttggacctaaccaggcaaccgaaagctgtaattgatggctatgtccagcgtactgatgcgcttatgcaggagcttcacaacgcaatgtcctatccaatcttcgcttctatgtttgaagcgatgaagcagggaggggagcttccaaacccgtggcatgggccagggatgcgagaaccaatcttttacggtacagaatcagcttatgctttccagtatagagatttagtgccagaaaagtttggggcggatgatgaatggctgcttaaaaacaaaggcttcacttctggtcaggcgcgcatcatagcgaagacaatgtgcactttgatggatgagaagggaacgaaacttctcgcggattttcaatcagatgaaggctctctagcgacttggttgccagtattcgagttctcgctagatgaagtggtattccacagtggtgttgaggccaatatagttcaagccttctttgctgcatttctcttttcagggcataacgatgggtttaaggaggttggggatttcaatgaggtcgctgctcgaccgctcataccgaccgggcatggaactgtacttctcttttcacattacgccatttacgaggcattatacgaatctccattcttttggatgtgggacgacaaggcttatcgcccgacagctgctgagcatcgcggagcttttactgaacaatttgctgcacgccgcctatctagggtttttggcagtgaacatgttcatgcgaatgtaaacctatatcgtggtaaagatattgttgctgaggttgatgttctggtcatatacggagatcgactcatcgttttgcaggcgaaggctaaaaagctaactattgcagcacgcaagggcaacgacaaccagctaaaggccgacttcgctgccgccattcaggattcgtatgatcaggggtgggtgtgtgcgaatgaactgcttgctggaggatgccggttggtggatgacaacaagaaagacatagctcttccgactagcatcaaagatatctttttgttcagccttgtgtctgaacactatcctgcacttgcctttcaggcaagtcagtcactgaaattccagactaccaatgtcatccgtcctccgttcgtaatggacgttttcctcctagatacgttgacggaaatgctggcaacgccattgcgttttctaagctatgtaaaattaagagtggctgtatcagataagttgatgagtgggcacgagttaaccgtgcttggctatcatcttaagcagaatctctggctagatggaaattgcgacctagtgatgcttgaagattctgtcgcacaagatttagatgcggcgatgttagttcgcagagataatcttcaaggtgattataccccagcaggcatactcacgaaaatgcgaggaacacgttatgaagatttgattaaagaaattgagaatagagcagacccggcaacacttgaactcgggttccacttgctttcaatgaatgaggatgcttgtagaaatgttcaccgcatacttgaaactatcataaggaaagcgcagttcgatggtaagcggcatgatgttactctggcctcgagaactccaccttgtggagtcagctttcattgtaatccaaaggtatctcctgaagcggttgctgtgttggaagctcactgtgcaaaacgcaagtatcagcaacatgcagctcaatggtttggagtttctgtaagtccgaatgggcgagttcagttcggcgtgacgttggattatccatgggcggcgtctgacgaaatggaacgacttacagctgacatgaaaccagcatctagagtaagtgatgctttacctccatttttacgagaaggtaggcggatgaaacttgggcgaaatgaaccgtgtcactgtggaagtggaatcaagtacaaaaaatgttgtttaaaatag

SEQ ID NO: 302329 - DNA, 2379 bp, Proteus mirabilis
atggtgctcgaaagatcagtagtccaaaatggggtgataagaatgaatatggaagaagatcgaaagaaggctgtagcttctttattgaaggatatggaatccattgctgaccgaatgcgtgagttgattgtcaaaatgcctccgcatgatttgctcgggtacatctacgctcagcacatgatgaaaaaaatgggaaaccaaattgggggcgaaaagcaaggccaagagggtagcccagctgacgtagttaatgaaccccagttcttactggagtatgttcacgcggttctggcatctgaggccgctcctgcggatatggaattcgacgaagcactgtgcgctgagttgtttgaatgtagccgaaaactgagagagctggccatgttctatgctatggccacctctgctgataccaaagatggcatcttcggtcctaatacggccgacattgaattccgtgcgaaatccacttgggtcatgatacgcgggaatcgttatcaagttttggagggcgagttctatcgctacgttctggcgcctcacaatgatgttttgaaggaggtgtacggcattggtgccaccgatattgcggaaggctttcaggccatggccgacgctactcgttctgggcaggccaatgcaatcattgagatgatgaagcagtttgaggcggtaaaagctttttctatagagcaaagtaagtctatggaagacgctatggagtcatggattgctgaaaatgaggagcagtccaaagcggcccggggggctatggaggatatgcttcgcggcggtattgccaatgtaagccgtcacacgaagttgccaccgacattgctagcagacttgtcataccagcgaggagaagatactgagttcttcgcagcgggcgattttaaggggacaccctttcggacactaccagcacgtaagaaacctctaattcagcttgggtcggactactacgcggtcgatccctgttttgctcgcgatgcggggtatcgtgcgctcctatttaatctccttcagcgaaagccggattacaataaggcctttaaagataggcagaaaatgatgagcgaagcagcctttgccgacattctctatgcccagcttccgggagccactgttcttcaggaggtttactacaaggatcctgatagcaagcagtggtccgaaaacgatactctaatcctggtcgatgatgtactgttactagttgaggctaaggctggtgcagctgccaccattgcatcaccggcgcttgattttggccgccatgctcaatcagtgcaggacttagtactcaaggcatataaacaatgtgtgcgcttcttcaattatatgaattcggcggatgaagtgtccctctatcacctcgtgaatggcaaatacgaagagtgttgtcgtgtgcgtcgctctgactaccgggtgatggtgccgattgggttaacagtcgagtcgttctcgcccttttccacgtactgtaaagaattaccgcaggttgagcctttgcttggaaagcatgctttcatttcactgtccatcgacgatttgtttgtgctcaagcgactcttgcccacacccggggagttcgtccattacttggaggtgcggcaagccgtggccggaatacgtggggctcatctcttcgacgagttcgatcacttgggtgcttacctgaagaagaaccgttttgatcaggatattatcgagcagttgaaggaagagaaagcgaacatggttatctgggatggcatgagtgacattgtcgacaggaccttcgaaggtgaggagtgggaaagcaaaccgttcccaagtcagaagttcccggaggaggttctgaagctgcttggagcactcgatagcacccgagctagcggctggctttcagcagagagtcatatccgtgacctaggagaggaaggccggaataatctggctaagatgctgtccgaccttcgaaaaacactgattcagcatcccgttcgttactttgttctgggcggggacggtgtaccgctcttcgtttggcttcaacggcatggtcatccaattgactggactaaggtgaacaataaggctagcgcagttgcgttgagcaccaaggctactaacgtcattggcgttgtggctgaagttagtgccgatggtacttatgtccaggcgcggtctttcaaaatttacataccgacggagcaaacagcagaaaacgcacacatttatgaagacgcggcgagaatggctaatcctgaacgtacggtcaatctcgaacgggaaaaacaagtccactttggtcgcaagagcaaaaagattggccgtaatgtcccttgtccatgtggcagtggcatgaaatacaagagatgtcatgggcggtag

SEQ ID NO: 302330 - DNA, 195 bp, Proteus mirabilis
atgcataatcagatattaaaaaaactgccacaaatagagcaaacgcatcaaataaaactactttatgttgctgaaagtggaagccgtgtttggggcttcgcatcaacggatagtgactatgatgtacgaggtatttttatacggcctcgcaatgcatatctttcaattgataaacctaaagaaacatttgagtag

SEQ ID NO: 302331 - DNA, 273 bp, Proteus mirabilis
atgcgcagtgctgcactagaatatgcacgccacggtattaccattaatgccgttatgcccggcaatattttaaccgaaggcttacaagcccaaggagagacctatcttaatcaaatgaaggcctctatcccaacccataccttaggggagcctgaagatatcggctatgccgccgcattttttgcctctaatgaagcaaaatatattaccggtcaaaccattattgtcgatggcggacagattttacctgaatctccagaggcgttgttgtag

SEQ ID NO: 302332 - DNA, 543 bp, Proteus mirabilis
atgatagcgatatacgaaatcatgagcgatgacgaagttaataaatatcttccttggatgccattaaaaaatgaaaatgaagctctcgattttttcaaatctagaatccagccacgatatgataacaagcaaggttattactttgcggtatgcttaaaaaacgatgataagccgattgggtatgtaactgttagtgaggatcctgatcatgaccttggatatggtttgcgcaaggaatactggggaatggggttaatcagcgaggccgttgaaatggttgtccagttactcaaggagcaaggctggcattacatcacagcaacacacgacattaataacatcggtagtggcaaggtgatggaaaaaatagggatggaatataaatactcatacagagaacagtggcaacccaaagatatcctagttacatttagaatgtaccaactcaattttgatggtatagaccgcacctatactgaatattgggataaatatgaagaccacttcattgagcctaatttaaactttcatattaaaaattaa

SEQ ID NO: 302333 - DNA, 3444 bp, Proteus mirabilis
atgggtaaaggtggtggcggtcaaagaacaccgtatgaggcaccaaacgatttaacatcacgacaaaaagcctcattaattgatttaatcagtgagggaccgattgaaggtcctattcatattcaaggctcgatggatgatttagggtgcatttatttagatgatacgccggtgatagatggatctggcaatagcacgattaatggaatgtatgcacaatggcgggcgggtaccttagagcaaccggcaatgagtggttttaccgcgtctgcgaatgaagtgccagtggggattgaggttaaatataattcccctgtcactcgcactatcacctcgcccaatattgaccgcttacgcctaacctttggtacgcaatcactggttgaaaccaaagataatggtgatcgagtacctacatctgttcaattacagatccaaatccagcgcaatggggtatggataacagagaaaaacgtcacgattaagggtaaacgctctaactctccgtacttgatggcggttattttagatgatttgcccccagttccgttcagtgtgcgcatgatccgtatcactcaagacagcacttctgacaaaattcaaaataataccgtttggtcgagttattctgagttagtggatatttcacaaacctatccgggttctgctgttgcaggattaatgtttgatagtgagcagtttggcaataaatttccgcgccgtaattatttaattaaagggcgtattattcaggtgccgagtaattatgatccagataaacgaatttattctgggatttgggacggtacctttaaaccggcatttaccaataatccagcatgggtattatgggatttgttaactcatcctcgttatggcatggggaaacgcctcaatattagtgaggttgataaattcgccttatatgcgataggacgttattgtgacgaacaggttgatgatggttttggaggaaaagagccacgtataacctgtaatgcttacattacggatatgcgtaaagcctatgatgtgatggcagatatgtgtgccatgatgcgcattatgccagtctggaacggacgaacattaacctttattcaagacagaccgtctgatgtagtatggccttatactaatgccaacgtaattgatggcaacttccaatacagctttagcgcattaaaatcgcgtcacaccgccgtcgaagttcgttttattgatccaaacaatggttggaaaaccagtgttgagctagttgaagatgatgctagcatagcgcgctttggacgcaatgtgatgcgcgtcgatgcatttggttgtactagcagaggtcaggctcatcgtcatggtctttggttgttaactactgagaaattagaaactcaaacggttgaatttaatatcggtagtgaggggctacgtcatatgccgggtgatattatcgaaattgctgataattattacgcggataatcaaattggtggacgtctaacacatattgattatgcctctcaaacattaaccttagatcgcaatatcgacacacccaaaagtggtaaatcaagcgtcacactcatcaatgctcaaggtgatccgcaatcttatgaagtggtgagctatcccgcatctaatcaaataaagctggatactttgccgttagggttacaagaaggcggaatttggacattaacacttccgtctttacgtcggcgattatttcgtgccatcagcttggctgataacggagatggcagctttacggttattgcagtgcaacacacgcccgaaaaagaggctgttgttgataaaggggctaaatttgagccaaaacctgatacgccactaggtggatttattccaccggttgaaaacctttgtgtggatatcgaatcagatacaagtgcatggcaagtagaagccagttggaatacaccttattccagtcgaggggtagattttttattaaaactaaccactggtgatcgcattgtcggcaccgcctcaaccacggatacgatatatcgttttggtggtttgcctcaggggaattatgttttatccgtcctgcctcaaaatgatcggaaacaaaaaggcgaggtggccacaacttcatttgcgattaatccaccattaccacccagttatattgaggttgagtcgggctattttagtttagggattattccgcgatctggtggtcaaaatagcttacgagcacagtatgagttttggttttcagaaaaacagatcacggatattcgtgatgtggaaaatcgtgctgagtatttaggtattagctctatgtgggttatacaaggacgtaacctaaaggcaggacatacctattatatttatgttcgcagtataaacgcggttggaaaatcggtatttgttgaggctaaaggggaacctgatagtaatactaaagaaatactcgatgagttagacggccaattcatgacaacagaggcaggcaaacaacttgacgaaaaactgaattggaatacggagtctattgctgaactaactaatgccacctattcgctatctacggatgtattgcgatattccgctaatgctcaagccggtattactcaactacaacaactccgagtttctgataatgaagcatgggcgcaggatattaagcgtgtatatgcatcaatagaggataacgataaagccttacgtgcagaaattaaagaaactcaaacatcaataaccgagttaaacaaggcgttcggtcaaacaactacggagatccgcacagagttaaaaacaaccaatgatgcaacaaataaacgcattgatgataccaaccagaagttaggcaatacagataaagaagtcggccgtattcgtgcagatgttgcgactaacaaagaggcgatatctgaaacgaataaagccatggctaaatccgaagaacaggtacaagcgcaattcggcaaacagcagggcatgattaaccaaaaaatgcaggctgaatttagtcaaaccggtgacggtgtagtcacccattccatcaacattacgattgttcataacaacgtgaaatacaatgcagctgggcaagtaattagtgctcaggttaagaacggaaaactggaatcattctttggttacaacgctaataactttgcttggtataaccctgtaaatggcaagatggaattgtttatgtatgccaaaaacgggcagttctttatcaaagaggcgtttttagataaggcttctattcgtgaaatggttctttcagagtcaataagatcagataattatgtgcctggtaaatctggatttattattgacgttaaaaataacaaactggaaatgtatggtggtaatggcggaacaacattaaccaatcaaaatttatatgtaaaagatgaaactgggtataacgttgttattattggtgatatcacaaatgagcgataa

SEQ ID NO: 302334 - DNA, 480 bp, Proteus mirabilis
gtgaaaaatataatactaacagttttgttatttacttcatttagtgtaattggtagtggaaatacatcgttaggaaaatggatcataactaaagaagagaataaattaactgataaaatagattattttgcaatattaccacccgaaaatggtggtggagctttagtattaagatgtgttgataataaaactgatgcgttccttgcgacagatgattttataagtttggatgattatagcaaagttactatcagaattgatgggcagaaagcatataccgaaagatgggaaatagggggagataatgatactttatttcctttaagtccaatacagtttataaaaaaaataaataatagtaataaattaattattggttataagccatatagtagaactcaaactgtaagcgaatttaaaattgatcatatagatgaagtttcaaaatcagtatcaaaatactgtggatggaaactataa

SEQ ID NO: 302335 - DNA, 270 bp, Proteus mirabilis
atgaaaagagtattatttggtgcgatagcattgttaacatgttcttattcctttgctattgatgaaattacagttatcgatcatgcaaaacaagaagcatgtaaaagtaatgttgagtgtgaaaaatactttgtagatgctattggtattgtatctatgatctcacgttatcatggtgagtgtgttgtggacaatgatacctcaaagcaatgcaaggatgctgaaaaaatatataaatacatcatgactcaatatgataaaaataactaa

SEQ ID NO: 302336 - DNA, 549 bp, Proteus mirabilis
atgaatatcaaagaaaaagtaaacactatacttctttgtgacattgctaaacacttaggtatagattcggatatagatccagatattattaaatatgcaattacatcaaataatgaatgggttatcagtgccaagtattcaattttattagatgatgaatcatctaaacataccaaagaagatcgtgattttcttgtggaaatattaaacatgtatagaggactgtctgcttgcttgagaaaattttctaaggataaacaacaggaattaatcaagaaaaataatctcaaattaattgataattatattcaaattcctggtttcgatgagaataatgaatataaatatataaatattctcgaaggatttttaatgatagataaatttcctgaacaaaaaaaacctatatccaacactcacacccaaacaattgatggatatcgccgtatgataagtagttataacaactacgaaatactagatagaaattgggatattactgaaagcgaatttcaggatatattagatagtgcaccatacagcatttaa

SEQ ID NO: 302337 - DNA, 378 bp, Proteus mirabilis
atgtcagataaaaaagagataggcgagttgatctacaaagtctcagtagatacaagtgagttagataagttagaagaacaactcactcgcattaaacaactgatgcaagatgtaggtatgaatcctaaatcaattcctcaattttcctatccgcacgctggtaagttttttattaaagatgcccttattaattcggctgtgttcaatggtgtgcttgttagtaataagtcagagcaggacctcggggctcaactagcagatttacgtatgcgagcggatcgacaagataatgatatagctgaactcattagattaagacatgcagatcaacaggcatggtctgacgctattaatcgaacatggtgcagtcagaagtaa

SEQ ID NO: 302338 - DNA, 159 bp, Proteus mirabilis
atgcaatggaagcctttaatcatcatcgtcggttttatccttacattactcatctcggttgctggtggcatttatctctcaattgataattcatgtgttaatgataaagccagtttagacaaacgctgtcagattgctctctcacatcatcggtactaa

SEQ ID NO: 302339 - DNA, 471 bp, Proteus mirabilis
atgaacctaaaacaaaaagtgacagctgttgcgagtgctggcgctgtaagtattgcactaacagtgattggttattttgagggggtgcgttatgaaccttaccgcgatgttgctggagttctgacggtttgttatggacacactggaaatgacatcattcaaggtaagacctatacacaacaagagtgtgacgaattactacagaaagactttatcagaacgcaacagcaagtcgatatcctggttaaagtgccggtcgatgataaaacaaaagcttctctatattcctttgcctttaatgttggtaccacagcttttgcacgctctacattgctaaagaaattaaatgcaggtgatcagtatggcgcttgtgaagaaatgaaacgatgggtttatgctggtggaaaggtgtggcgagggttggtcagtcgtagagaggcggagtcagcattatgcaatggaagcctttaa

SEQ ID NO: 302340 - DNA, 324 bp, Proteus mirabilis
atgaaagatggtatttattacgttacttttcgaagtaacatgcaagactttgggaatggtactgtaactgttagaaacgatattgttaatggtggtgactttgcttatttatacagaggcaaggttaataataatcaggttgtattaacagtagagagacataatagatcagcaacctcagtatttggagatattgataaatttaatcttattttgaatatctctgagtcgggaaataattatgagttatctggtcatattgaaggtatgcagcagatgcaaatctcaattagtgctaaatttatcggggaagtaattgaataa

SEQ ID NO: 302341 - DNA, 294 bp, Proteus mirabilis
atggctaataaatttaattgccccgaatgtggctcagttgtaaatgcatgggctgatctagatgcgacagtaatatttaaaattaataatcacgggaaattaaccaaacgtgtgattaaaaatacaaatcagacagatggacgatgcggtgttgaatgtactaaatgtgattggattctatatgctgatagcgattattcagaatatccgcattttgaagagttggcttgtcaggctcttgcttatgaagaggaaatagaaaccttaagtgtgaagtcaaaatatagtgactga

SEQ ID NO: 302342 - DNA, 498 bp, Proteus mirabilis
atggctaacggatcagtaaacaaagtaattcttatcggcaatttagggtgtgatcctgaaattcgctacctgccttctggtggtgctgttgccaatttagctgtggccacatcagagaaatggcgtgacaaacaaacagatgaaaatcgcgaaaaaacagaatggcatcgtgtcgttctgtttggaaaactcgccgatatcgccagtggctatttgtgtaaaggctcgcaagtttatatcgagggccaactacaaacgcgcgagtgggatgataacggcgttaaacgctatacaacagaaattgttgtaaagattggcggttcaatgcaaatgctaggtggtgctagtaaatcagcaggttcacaaccggcacagcaaaacccgccaccggctcaacctcaagcacagagtagtcaaccaccaatggattttgaggatgatattcccttcgcacctattgggcttatgtatccacgccatttaattaatgtggtttaa

SEQ ID NO: 302343 - DNA, 828 bp, Proteus mirabilis
atgtctcaattagacggtaatgctatttcgcaaattcaaaatatggcggtggcttcattaagtctcgaagcaatagagaaatctctttgccccgccattgttcttccaaatgaatttaaagtgagtagtttggaaaatttacaagaaggtcgcttccgtttccgtggtgaaatgaaaacaaccagtatcagtgactttgttaaatactcaatcaaaaatgcaattgatgaaggtgttagctgctttattgatgccgatgaaatgagtgccaaaactatttttaatatcggcacaattggtgagcctggtcatgctgataatactgctcttgtgaaattaaaacaaactgccccattcgcagcactattaaaaattgatggtgttaaacatcgtcaaaaagaattagcggaatggttagaagactggcgtgattatttaatggcgtttgatgctgacggcaatgttttagatatcaaacaagctatttctgctgttcgccgtattacaattgaatcaacacgctctgctgaacatgaagatcacgattttagcgccaaacgttcagtattagaaaatgttgaagcaagaagcaaagatgttatgcctactgcattccagtttacctgcaccccatatgacgagttaaaagaacgtagtattaaattgcgttatagcgtgcttactggcggtgatgttcccgttttagtgctccgtattgtccaacttgaaaaccttgaagaacaaatcgctcaagagtttcgcaatctactttgtgatgaatttgatgaaagtgatattgaaacattcattggcaagttttcagcttaa

SEQ ID NO: 302344 - DNA, 375 bp, Proteus mirabilis
atgagccaagaagatcgtaagacaaatgtccctgactttctttccgaattggacgctggcgtttttgaaaataaagtctctgctgttttaaatgatgtggctttaggcgttttaaataatggtggaaaaggcaaagtcactattgaattagattttgctcgccttagtaattcaatggaagaaaaacgagttgaaataactcataaacttaagttctctgcaccaacaccacgcgggaaacgggctgaagaagatactactaaaacaccaatgtacgtaggtaaaggtggtaagttgaccattatgcaagaagaccaaggtcaattattttctttgcaaggtcagcccgacgggaaattaaaatccgttaattag

SEQ ID NO: 302345 - DNA, 663 bp, Proteus mirabilis
atgaatcactcaataaaattaacgtcgtttaataaaaaccataaggttattgatattggggatcatctctgcagggttcctaataacaggataaatccaatcgttctcataaagctcattgcttttaagagtatcaaaaaagctgtctacggcatggttatagttgttgcattgtcttgtggtcaagtgagggcgcaaggctctgaagtcatcacgagtgatgcgaggcatgtctcttttcccgtctttacaatcgtcgaggaatttatcaagaagcaagaacaacggatctgcaatggcattgaattcctttcttttgtctcttctgcgagcgagggaatgaccaagccaagttcccaagaaaaaggaaaaaatagcccaaaagaaagtaataagactgaggctggttttgagaaacgagaccaagtgacccaagaagatatcgagcatgttaagtcatcccttatcggtatgttatttgcgtccttagtgatgatcccactagggataatgtttagcgagtgtattagcccacgaatattagcaaaacgtaagcgctggatgaagcttcatgagctaaaagccaaacggttttaccggaacaacccagggaagtattacgtgatgccacgcaagactttttgccaatggctgtggttttaa

SEQ ID NO: 302346 - DNA, 858 bp, Proteus mirabilis; identical to SEQ ID NO: 300551

SEQ ID NO: 302347 - DNA, 1233 bp, Proteus mirabilis
atgatacaacaagattattccgagcaaaatttgcggcgttatttataccctagcgattttataaaaaatcgaaaattactaaattctgtactctcaaaatctttttttgacgaactgaaagattatatgaagtacattgacatcgatggttttccgctcaaaaatataaaaataaaaaataaaaatgtttatacaaccacaactctacatcataagttaattttgcgccgatgtgattcatcgttaaaaagactgtttaatttaaaaatgaaaaacaggcattctataatagatgaattaacggttttccttaaggaaagccctaaatactctataattagaactgatataaaatcattttttgaatcaataagtcaatgtcatttactaaaaaaacttgaaaataataaaactctttcgcatataaattttaatgtaatacttcatttattaaacacatacaatacaataactgcaaataatgttggaatcccccgaggcttagagataagctcttctctttctgaaatcgccttattagattttgacgaaaaaatacttagaaatcaaaatatcatttactatggtcgatttgttgatgatataatcataattacagataatccattatttttcaataagatacacaacacaatttcaccgtacaatttaaatataaataagtctaaatcacaactaataacactaaatacttatagtgagcatagtacccctgtatctttcaattatttgggttataatttttcattccctacagatcaccaattatcaaacaagaaaaaaaagaaaaacttcagaacagttgttataaaaatatctgataataaattaaaaaaaataaagacctgtatttcaaaatctttttatgcattctataaaaataacgactttgatttattaatagataggttattgtttttatcaacgaatagaaccttaataagtgagaaatcaaagaaaaaaattcccacaggaatttattttaattactcaaagataaatgacacttcttgccttaaggaaattgacttatttttaaaaaaaacaatatttagtcataaaattcgcgccaataaaataaaagcaagaagttttaacaccttacaaataaataaactaataaaaattaactttgaaaactcacataaaaaaataatatataaaagttttaatgcaaaaagattaaaagagataactaggatttggcaatga

SEQ ID NO: 302348 - DNA, 1971 bp, Proteus mirabilis
atgaagcataatattaaaatagacaaaaaagattttttaagatctttactaacagatacatcacctaatgatgtacctttaatattctctaatgatggactatatattaatttaaattccataaaaaaaggaaatcctgtatatgatataatgaaaaatctgataattagaaatgttaataacaatgaagttttaaatcccgatacaacaataccatttaaatataacataaagaaggatgaacataaattaagaacactttctctaattcacccagcatcacaatacacgtatgcaataatatatagagattatgctaacataattaattatttatgttcattaagtgagatatctataagagcacctataaaaatagccaactccttttatttaaaggagggtcatattaataataaatacaaagaaataaatgttgaaaccattaaagatgaagtaaaaaggaaacatgcatcatcttttttctcgtataaaggctataaccgtatctataacttctataaagataataatttttacaacttagaaaaaaaatttcctattatgtggaatttagatgttgctaattgttttaataatatttatacacactccatagagtgggcgatcaaaggtaaaaactattcaaaatcaaccaaatctataaatcagcgtttccctgccattttagataagactatgcaaaatagcaaccatagcgaaacgaatggaataccaataggaagtgaatttagtagagtatttgcagaaataatactccagcgagttgataataatataattaattcattatcaataaaaaatataaaaatgaatgatgattattgcatctatcgctatgttgatgattttattctctttgcaaaagacataaatactgcagaaattatttataaagaaataaatgatcatcttggagaatataatttgtatctaggtgataataaacttaaaaaatataacaggccattccttacagaaaaatccgattctataattaaggctaacttgatattaaaagaaatggatgaaaaactcttcattaaaaatgaaaaaaagatatcatgtctattggaagtaaaaaatgtaagagatttctctaatttcttcattaataaaattaaaataataaccccaccttcgagtaactattcaaatttatcatcttatataatctccagcatatgcaatagaattacaaacatcaataaggattataatgagataataaaaaataatttcaacccttttattttaaaaaagactctattgtcactttataatattttatttttctttttttacactaatgtatctatttcatcatcgcttaaaataacgaaggctactatactaatcaataaaaagctgttgactaaacatgatgacattagattggaattatgtgattttatttcaaacaatattaattcaatgtctatattggaagttgataatattaatgaaggaagacataattttctttcaattgaaagagtaaatatgttaatacttctaagaaatctaggtgatgaatatttaccaaaaaaagttagtctggaaaaaataattacaccagatacaaaaatgaattatttttcgatagtatcatttttatttattataaaagacaattataaatataaaagtataaaaagaataattgagttaaagataaaatcacttttctcagatggacataatgatattaaagataattcggaaattgctcatttagcgttagatattttatcttgtccttttgtttcacctgagctaagaaaatacatttatataaaagtaacatcaagtttagatttagctagaactccaactcaaatagatgatgaatataatagttttttaaatgtttattggtttgtcaaatggaacgatttaaacctgataaaccttttagagagaaaagagttgaaatctagctatttatag

SEQ ID NO: 302349 - DNA, 2661 bp, Proteus mirabilis
atgaaatcataccatattcaggcgttattgcctcgccttatacacgactttcaattcaaagagcaaaatggttatttgcgtcaaggtgtttgcccaaactgtaagaaaaaagagttatttacttcaattgaaatgccgtttgtgttgcgttgtggccgtgagaataaatgtggtgctgaattgatcgtaaaagaaatttatcccgatatatttgacgattggtcaactcattaccctaagacacaacaagcacccaatgcggcagctgatgcctatttacagcacgctagagggttgaatattgagctattaaaggggctttattctgagtctagttatcatgctaatgggttaggtgccgcaacagttaaatttgcgttaccagagggcgcatattgggagcgtattattgatagatcatcaagatttgatcgtaaagctaacttttttggttcttataaaggtcattggtggtcatcacctcaacaagatttaacacaagctaaagagatctggcttactgaaggtatttttgatgcgctaagtcttattcaaaatggtatgacagccgtttcactgatgacttgccataattatcctgaaattgctttggccaagttaaaagcagaacttggcaacaataaaaaaccattattggtttgggcgttagataatggtgcagctggcgaacgggctatgaggaagtttgttgcgcgtagtcatgaggagggttggaaagcgactgccgccagaccagcagaagttgataatgggaacgattggaatgacttgcacatgaaaggcaagttaactgaacgagatatggctcgttatcgttattatggaaagttgttgttagcttccactgcgtttgaaaaagcacgtttaatgtttaattggacggagcgttcagagtttgattttcaacatgataaccgtttgtattggtttaagttagacatcgataaaatgatgaagacgattgagcgtattcatgatgcagagcctgatttagatgaagatgaagccagacaaaaagccgttaaagaatctggtaccgtaattgaaatagccaactgttatcccacgccattatatttccaaaaatcggtagaaaccgatgaatcatggtattacatccgtgttgattttcctcgacagccgcaagttaaagccacgtttaccgcatcacagttaaccagcgccagtgaattcaagaagcgtttattgcatgtggccaaaggagcggtttataccggcacaactttgcaattagaccgcatttgtaaacaaaccttgccagatataaaagaagtgatcacgcaaaattatgtgggttataacaaagagtatggtgtgtatgtgtttaatgatgttgcggtacaggatggtaagtgttttacgttaaatgaggaagattatttttctctcaataagttggatatcaagacgttaagccttagcccatcattggccattaataccgattttagcgaatttgataccagttggttgagctccctttgggatgcatttggcgcaaaaggttatgtagtgttggcgttctggttgggttcgttctttgcggagcagatacgcaagacccataaaagctatccatttttagaaatttgcggtgagcctggttctggtaaaagtacgttgattgagtttttatggcgcttatgtggtcgtgctgattacgaggggttcgatgcatcaaaatcgagtgttgccgctcgaggacgaaacttctcacagattagtaatttgccggtgtgtttaattgaaagtgatcgcgtgcaagataatgcgaagttaaaagcgtttgattgggaagaacttaagtcactgtataacggccgtgcgacccgttcattaggggtgaaaaatagcggtaatgagacctacgagccattatttaaaggcagtattgtgattgcacagaatgcagagataaacgcgtcacacgccgttttagagcggattattcatctttataccgataaagcggagcaaagtgttgaaacccgttatgccgccatagcccttgaacgttatcccattgaaaagctgtctggttttttgcctacggtattgatgaaagaagcggcgatattaaagcaatacaatgagcgcgtagatggtttacaggcgcaattatttgcggataaggcgattaaccatgagcggatcgccaagaatcacgcacaattaattgcattgctagaaacgttagcgttagttcttcctgtaaaagcggcccatattcgccaaactcgcgattttattattgagttggccaaacaacgagtccaagcgatccaactcgaccaaccacaagtgatggagttttgggaactgtttgattatttacacgataacgaggcctttggtgtgaatcacagtagtgaaaagggcgtttatgcagtgaattttaaccatattgcacaggtggccagtgagtatcgtcagtctatgcaattgaatacggatattaagaatttattgaaagcggggcgcatgcataagtttgtgggcgttaagacggtgcgaagtgtggtaaacagccagtttaatagcacgcttgcggtagggagtacgcttaaaagaccggaagtgattaagtgctgggtatttcaggaaaacagtgagagttag

SEQ ID NO: 302350 - DNA, 222 bp, Proteus mirabilis
atgagaaatattccagaacctatatttacgcctgtagctgaaaatataaaagcaaatagagaagatgaacgtaaatcattaataaatcattttgccgatcgtcagcgtcaattagccaacaaagtattaatagataaattagattacgcgcaggttcaccagttattaattggtgaggcagataaattggagtcagaagcaggagaacttaattatgtctga

SEQ ID NO: 302351 - DNA, 450 bp, Proteus mirabilis
atgaaattttatgttcatgcaattaaacaaagctcttattgggagctggtatataatgatttaaaaatagctagtccagctttttcttctagaatggaatccattgataatttagaagaaactattttatatactgagcaagctgatttagatgtctgtgacgataagagcctgatatattttaaatttgaagaaacatccaatggctggcactggatcgcactctctgatttcaacggtataatcaacttagttataaagaaagaaacgcatctatctacatatgatacagctcgcttaaaagctgaaatatttaaaaatgaaatcatttcatcccctattgtcgattctgctggcgtattaattcccaatatgcatttttcaaaagaattctcttctaaatttgatattggtgatttacatccatctgcacgccgtaaacatttttaa

SEQ ID NO: 302352 - DNA, 309 bp, Proteus mirabilis
atgaaaagtaattcaatcgttaagaatacacaaaatggggtgtatatttgtattgaagataaatattcaccaataaatagtattgtttttgaattatcacaactgatacatttcattccagttaataatattggtaatacagttttaatttctgtaagtggaatggctgactttagcccaagtattccgtttgcaaaatttttaagtttttttcgttatatcattgagcaaagtcagaaactaaatagctactcacatttatttacgataacaataaataaagatttgtcttgtgaatggcaatgttag

SEQ ID NO: 302353 - DNA, 591 bp, Proteus mirabilis
atgacaattaagaaactcgaaaatggtcaatatgaagtggacattagaccggctggtcgtcacggaaaacggatcagacgacgctttgaaaagaagcaagaagtaattttatttgaacgttattcgctggctaatcagcaaacaaaagattgggtagaaacatcaacagatattcgccctcttagtgatttaattgatatttggtgggaagtgttcggcaaaaatacaccttatggaagaatgacacatctaagggtgagacgtattgctgaatcactgaataatccccctgtttgccaattaaccgataagcaattggtactctatcgtgagcttagactcgcttctggcgtaaaagcttcaacgataaatagggatatgtcagcactcagcgatatgtttacagcccttaaaaaaacggatttctttttaagtaaacatcctgttcaaggaatatcacggttaaaacaacaaacaactgaaatgtcatacctaacaactacggaaattcagcaattattagcattattggaaggtgacaacctaaaagttgccgttctctgtttaagcactggcgcccgttggggttaa

SEQ ID NO: 302354 - DNA, 126 bp, Proteus mirabilis
atgcaagtattaagttcattaaagcgtgcgaagctgcgccaccctgattgtaaagtggtacgccgtcgtggacgtttgtatgtaatttgcaaatcaaatccacgttttaaagccgttcaggggtaa

SEQ ID NO: 302355 - DNA, 390 bp, Proteus mirabilis
atgtctaaatcggcaaaaggtacgacagaacggcatggacggaacgtaaaagctaaatctggtttaaaccgctcaatactggagcagggctggtatgaaatgcgccgtcagcttgagtacaagcagctctggcgaggaggtcaggtactggcaatacctcctgcctataccagtcagaagtgcgcttgctgtggtcatacagcaaaggaaaaccgccagtcacaaagtcaattcgagtgccttgaatgtggatatacagcgaatgctgatatcaacggggcacgtaacattttagcggcaggacatgccgtgcttgcctgtggagggagggtgcagtcagaccgcccgtcgaagcaggaacccgccgaggtgattcagacatcagtctga

SEQ ID NO: 302356 - DNA, 261 bp, Proteus mirabilis
atgatgaatgattcggtgatggttatgtctaatatacctttaattaacgtcttaccttatgaatttctattaaattatttaagtaatgatgaaataaaaaataaaaaagatgtgtattttctactgaagaatggagttcgctcttgtactaatactgataatcaaagaattgaacaagaaattgaaagaagtgaccatttttccactttaaaaataggtaaaaaaaattatatattgagcgtgatttcattaatgatataa

SEQ ID NO: 302357 - DNA, 813 bp, Proteus mirabilis
atggacttacgacgaatacgggtggggattgaagttgcagaacgattgcaatggtatgaaggattgcgtattaaagccaacggtaccaagtatgcaaaccccttacaaaatgaatgcacagttagcattgatggattaaacgcccacactcgagattatctgctcactgaaaccagcccttatcataaaagcaaacaaactcgccgtctttaccttgaagtaggacgagtcaataccggattatttcgtatctttaccggtgatattgtcagtgcagaaattgcctcgcctcctgatgttacgttaaccattaaagccaaaactaataatgccagttcaggtgatattgtttcttccagtggtggtgccatgcagaaaatgagcgagatcgcatcatcggtggcgaaggattgcaaggttagattggactttcaagccactgataagaatattgccaattggtatttttgcggttcagcgttacaacaagtacaacgactgcaggaagcaggaaacgttaaagcctttattgatgatgatacgttgtttgtcaaagatgataaccaagccttaaaaggtcgtctgcgcattcttagcatgaaatcaggcatggtgggtataccgaaagccaccgaaaaagggttgtccgttacctacttaattgatggcgcctcagaactaggagggatgctacgactcgagagtaaatttaattccgcacttaatggtgactatattattgagcaactgaaattcgatgttgcttcacatgatgatcctttcttttatcaggctacctgtaaacgagcataa

SEQ ID NO: 302358 - DNA, 729 bp, Proteus mirabilis
gtgaataaaagagcactttcgacaaaatatcgaaattcgatgtgtccatcaatgataaaaaaaatagggggatacggtttatcgttattcttgataccaataatattctttcattccgctaatgcgttagagttatccgttcctattggctcaacaggttatttaggggaggtcactccgccagttggttcaacaacgaaaaattatgggatggtaagttcagtgcttcaggcgaatagatcttatataagttttcggtgggagcctagtcaatttgtgataagtgacctgcctttttaccccgaaatcggtcgagtgggtgtggctatctacaataaaagcaatcccaaaggggcctttattgttttagcacccagtggatatggtttgttgcgttataaacgggctaacgatacatatgagaatgcttcatttgcatttagtcgttccaaaaccaccgctatgacaaatatgtataataattttccctctaattctgatgaattaagttggggtcttttgcccagacaaggcaatagtgattttttctcagcacgatacgtagatggtagtgataaagttcattcgttaacattaacaatatccagttattccgcgtatgccatcgggccattagaggccggtgaatatgccatgcgtgatgattcaaaattttatgccgtcattcgcactagttcaggttcttctgtagattctaaaacattataa

SEQ ID NO: 302359 - DNA, 471 bp, Proteus mirabilis
atggataatgtgaatattaaagcacttaaagcctgtgacgttatcccccaaacgtctaccaatattcagtttccgactcaaatcgcgaaaaattatgcaacacctactaaattagcagataatttagctagtatcagtgtcaattgtccttatgctaataaaaatatctatctcaccctgagcccttttaataatttagtctcaggcagtgaaacagggatggagctatccaccaatggctctgaaaatatcaccacactgccttatgtggtggcttctttaaaatctgcacaatcaagtatttgtcaagccaatgcacaagaggccttgcgactcgtcggtagtaataaactagcacaacaaaatatgaagagttttacgcaaaatataatttttaacctttgtgctaatggcaatatcaaagccaataaatatacaggggctattaatgtagcaattttaattgaatag

SEQ ID NO: 302360 - DNA, 1293 bp, Proteus mirabilis
atgaaattatataatttaaaagataaccaagaacaagtcagttttgctcaagcggttaaacaaggtttaggaaaacagcaaggactcttttttcccaaagacttgccttcattttctcaagcagaaattgatgcgctattaaaattagactttgcaacacgcagtagccgtattttaagtgcttttatcggtgatgaaattcctgctgatgtgttagcaaaacgtgtgaatacggcatttgcttttcctgcgccagtgacacaagtagaagaggatattagttgtcttgaactcttccacggaccgacactggcttttaaagactttggtggccgttttatggctcaaatgttatcagaagtcgcgggtgaccagcctgttacaattttaacggcgacatccggtgatacaggagcagcggtcgctcatgctttctacaagttagataatgtccaagtcgtgatcctctatccccaaggaaaaatcagcccattacaagaaaaactattttgtacattaggggaaaatattcatactgttgctattcaagatgactttgatgcttgccaagcattagtcaaacaggcatttgatgatgaatatttaaagaacaccatgcatttaaactcggctaactcgattaatattagccgcctactggcacaaatctgctattactttgaagcagttgcacaaattccagctgaaaaacgtcaacaattagtcatttctgtaccaagtggtaattttggtgatctcactgcaggattactggctaaatctatgggattacctgttaaacgctttattgcagcgaccaatgtgaatgataccgttcctcgctatttagatagtggtaaatgggaaccacatcggacaatagcaacactttcaaatgcgatggatgttagccagcctaataattggcctcgtattgaagagttatatcatcgcaaaggttggctgttatcggatctttcgcatggggctgtgagcgatgaaacgacggaagaaaccgtacgtgaactggcacaaaaaggctatatttcagagcctcatgcggcggttgcttatcgtctattacgtgatgagctacaagaaggagaatatggggtatttttaggtactgctcatccggcgaaatttaaagaaaatgtcgaacgtattttaggtgatacattacctttaccaaaagaattagctgagcgtgctgataaaaaattactatcgcatcttttaccggcagatttttctcaattaagagcatttttgttagaacgagcacctaaataa

SEQ ID NO: 302361 - DNA, 153 bp, Proteus mirabilis
atgggttggacagaagccgctgatttaattattaaaggtatggaaggcgcgattgaagctaagaccgttacttatgatttcgaacgtctaatgaacggcgctaaactgctgaaatgtagcgagtttggtgacgcgattatcaagcatatgtaa

SEQ ID NO: 302362 - DNA, 288 bp, Proteus mirabilis
atgactgaaatagaaatatttctattagcgctagaaaactacagagaaaataaaattattaaatataacgataaggcaaaaatatttatttggtatatggaaaatatacagaaaaataacgctactatagatacaacattaccttttttagttaaagattttcatagctatagtttaagaagcgatctttcagatactgagataaaaaatacaataaggaaagttaaagagtatcttattcaagctgaaaatagatataaaaaggctcaagggtatgataagacctaa

SEQ ID NO: 302363 - DNA, 333 bp, Proteus mirabilis
atgaagaagcttttatttctacttatatttacattggctgggtgtgattctcaaagtgagatctatggtcactggaaaaatataaatagtgattgtgatgttttgtgttctttttccataaaaaaacaagataccgcttattcagacgcggttgttatttttgataaaggccctttttataaggcggctagtggcccattaattcaagataaaaataacaaaaataggtatttagtcagaggtgctacaggtgacttcttacttgttttaaagaacggtaggtttttcggcaccaataacaactttatttatgaaaagataagcgaagaataa

SEQ ID NO: 302364 - DNA, 813 bp, Proteus mirabilis; identical to SEQ ID NO: 302357

SEQ ID NO: 302365 - DNA, 783 bp, Proteus mirabilis
atggcatttcgatttaaaaaaacaataaaaattgcaggggtaaaagttaatataggaaaaaatggaattagtagtatttctatagggaaaaaaggggctagccttaatataggaaaaaatggaattcattctaatttaggtattcctggaacaggtctttcatacagaagtaaattagctggctcaactaaaaaacaaaagactagtaataaattaacaaaatctgaacaacaacagattgattttgaatgttttattaaagactctaaagatgatgttcaattaatgaaattatgttttttgagtatcaatggtgttgatatttacagtgatgacgttgccattgaaaatatatccattgataatgaattaattaacaagttcaacactcttgaactatcttttaatcgtgctatttcagaggttgaattttcaggcgatacagggcaaagagcaaaaaataaaatttcaaaatttgttttcgaaataaaaagatggcttgattctaatcatcccaattgggagtcagaaaaacatcaaatagagaagatgattgagaaacgtataactgagcaacaagaaaaagaaaaagcagagaatcaagctattaaagaaaaacaattttttacgataaaatttatatttctattcatatttacattttttttccctatgattttctgctggttttctctacaaaaaaaataccccttatggtttaaagtaattagcttttcatgggctttaattataacttttatggtattaaataaagaaaaataa

SEQ ID NO: 302366 - DNA, 747 bp, Proteus mirabilis
atggatattcctcgtattttcactattagcgaaagtgagcatcgtattcataaccctttcacaccagagaaatatgccaccttaggtcgagtattacgaatgaaagaaaactggcaaattcttgatctcggaagtggctctggtgaaatgctatgtacttgggctcacgattacaatattacaggtattggcatcgatataagcccgctgtttactctacaagcaaaatctagagcagaagagttaggcgtcagccatcgagtacattttatccatcatgatgcctcagattatattagtgataaaaaatgtgatatagcagcatgcataggagcaacttggattgctggtggtgtaattgaaactatcgagctactagcaaaaagtattaaaacaggtgggcttattcttatcggagaaccatattggcggcaaattccaacaacacaagagatagcacaagcttgtggtgcttcatccatatcagattttttaactttatctgagcttgttatttctttcgacaatcaaggatacgatctagtcgaaatggtactggcagatcaagagggttgggatagatatgaagctgctaaatggatgactatgcgccgttggcttgacaaaaatagtgccgatgattttgctcaagaaattcgaacagaattgactatagcccctaaacgtcatgttagttttacacgagaatacttaggctggggggtatttgcattaattgctcgataa

SEQ ID NO: 302367 - DNA, 249 bp, Proteus mirabilis
atggatccatcacatcaaaaatactattctttacttatttctacccaatttacgtttattggcgctatagctagttgtaccactcttattaaagattattgccaaaatctagatgtcctaacatataagcttacctttctaaaaaaattaaaaagcaaattaaatcagttagatagtaatattatatcaataatattactaggtttaataatgttcacactctcttttataacaattaaaggaaattaa

SEQ ID NO: 302368 - DNA, 537 bp, Proteus mirabilis
atgccattaaaaaatttatatctaaattcaaataaaaatgactttgaatatattcttataggaaatagtcatgcaagacattatttccattatataatagaaaataatataaaagttgcttcattagcagaagatggttgtaattcaacaaaaaattattactcttcgtacaacaaaaatatttgccaagaaacttataataatactttgaagtttataaaagaaaatccaaataagaaaataatatgggctactacttggagagataatatggatggaatttcaagagttaatggtaaagaagtaagatatgaccctactaatgaaattgttgagaaaatcaatgataaattagacaatttatccaaatcatacaataatgtattttttataaatgctgaaaatgcattatgcaatagtgaaacatgcttagttattgataataaagaaactatttataccgattatcatcacttatcaaaacatggttctaatattgttggctcttatatttttaaccaaatagaaaataagtaa

SEQ ID NO: 302369 - DNA, 567 bp, Proteus mirabilis
atggttatttatttttatagagaatgggtaaaaatattattttttatgcttatttttttacctgttgcaaatgcggctacaacaatgaattttgatggtactttgattgatacgccatgtagaattgatcaaccaagtttaaatcaaaatgtggtttttttaaatagcacaccaagggattattggaaatatcctgcggttagacctgcagaaaaatttaccattaaactgatccagtgtgatgcaaaatcgttatggaaatcagtgaaaattaaatttaatgggcagccagagccagagatgggggctgaacaacaaaagtaccttacactttcatctggcgttaataaaagtaagttagccattggattaattgatatagatggaaaccaacgtattactttaggtgaaaaccataacggtggaaatggaactcaacttaacgatggcacgatgttgctgacctttaatgcatttgttgaagcgacaccaaaagcaatacaggaaaaaagtgttgtacctggagtttataatgccacggtagaatttgaggtttcttatgaataa

SEQ ID NO: 302370 - DNA, 1176 bp, Proteus mirabilis
atggccagtagaccgagaagaaaggaatttaggcatctacctgactttctttattttgataaatcagttaaacaatatcgccttacattaactaatggtttaagaaaatgcattggtgcagataaagcaaaagctatcgcaatagccagagaatacaacaatattatgcgaccagaaaaatgcgtttctgttaactcattaattattgactcgggagggcaatatggagaggccctccctctctcagaacatttagataagttatttttgcggatcactaatgatgagaaaccatcaggcagtacacttagtaactgggttaatgacttagaaagaattaagatcttttttaaagatatccccgcaaatgaaatctcactggaacatgtaaatggctatattaatgaatatcatgccgatgcttctgctaatgtacaaaatcgtaaggtaagctttctaaagaaaatttttagttacgcaatggatgaatctcttatgtttgataaccccgctgaacgtaagaaaatgaaaagagtcgatggtaaaaaacggagaagattatcttatgatgactttcttaaaattcgatcatccgcagagccttggttaagaacagcaatggatctcgcattacagacaacgcaagcaaggctagaagtatcacgcataaaatacaatatcaaagctcccaaagaaggtatatgtgggtgcttatggtatgaagaacctttaaatggaatatacgggatgatttatattcacaggcaaaaagtgcaacataaagaggcatctcatattgcgatccccataggcaaagcacttaagggcattatcgataatagccgtgacaatgtggcaagcccttatattgtgcataggctacctactcgcatcccaaataaggtgagtaaagaagttaatcatccaacacaagttgctcctgattaccttagtcgtgcattttcagcgttacgtgatcgagtgggcgttgccagtcatttacctttagatgaaagaccaacctttcatgaaataagagcattggcggcctttatgtttaaacaacgtggttttgatcctcaagctcgaatggctcacagtgatgcagagtcaaccaagatttatacagaaaaccatgtacaatgggttgaagtgccacattgtgagatagcataa

SEQ ID NO: 302371 - DNA, 873 bp, Proteus mirabilis
atgaaaaaaaacacgggaaaggaatatgaggaatttgttggagctattcaacaaagtttgttaaatgcggaggggatgtcgcatttaaaaaatatattagtagaggtaaacaaaaaaatagaagacagaaacggaattttaaggcaatttgatgtgtattgggaatttaattacggtggctatgactacaagactgtaattgaatgcaaagactacgcatccacagtgaccattgacaaaattgacgcatttattggtaaaacacaagacataccaggtcttcgtctcatctacgctactaaaacaggctaccagagcggaaccaaaaaaaaagcagaacaatataaaatagacctccttattataagagaaggaattgacgatgactggactacacctgatgggacaccattagtaaagagtatcaatttaaacatcattgctcaatcgcctcccaaaattacttcattttatccttttatcgattcatcttggttaaaatctcaatcggggcttaatattgaagatataaacaataatttcaataacatactaaataatgaagtttttatatcaaaccaagtgacaggtatcagatattcactttatgacttagctaactcattggctgataaaatacccgatataaagtatggtaatgggacatatagtgaaacgctaagtaattcatatctagagtctgctaatggagaattaaaaatcaaaataataggatacaagttgaattatcaatatagcgagccaacagtgtctacatcagtaattgattactctaaagagctcttaggtattgtacagaactactcatcaggaaataaacaaatgatctttaaagatgggcaggttaagtga

SEQ ID NO: 302372 - DNA, 816 bp, Proteus mirabilis; identical to SEQ ID NO: 298309

SEQ ID NO: 302373 - DNA, 405 bp, Proteus mirabilis
atgataaagttatctcctatttctttactcttattatttacgccctatgtatatgcaaatgcactttacttacaagcaattgaaaaccacaatggaaatattgatttttcactcttgcttaatgaaaattttctcgaaggaacctataacataacaatttatataaataacaataaaaaacaaaattctgagatatcatttaaaaacaaaaacaataacttaactccaataataactctatttgatttaaaacaatggggaataaacaccaattattacgagcctttaaaaaataagttagacaacgatatcgttgactatgatttattaaaaaaattatttaatataaaattagaaattaacaaacagtcgattggacacttagaaatattaattccattttaa

SEQ ID NO: 302374 - DNA, 765 bp, Proteus mirabilis
atgggtttagtaaacaatcctcaaaaaaaacagtttccttctaataagaaaaaagaactattaactcaattgaatttaagctatggagtgagcaattatttaacgacaatgataggagctgaaaaaaaaggagatgatattaaagcacttattggaaataccctaggattaaatatcctgggtatagtctcattagaaaacgcttggataagagagaaatatcatcaacaatatcagtccaataagattaattaccaaaaagtattttctatggaaaatacaactatttcattaaactcatcattctactttagatttaaagagaattatgctgtaaataaagaatataagaaatatgatttaggatttcacttttcacaatcattaaataataatattgctttaacgttggggtataatattgcaacctattatcactcaaaagaaaaaagccaacgactttttattaatactagttcaaattataaaaaactttcctattcattagagctagagaatagcaaagatcagtacagcaataataatcaattatcaatttttttaaattatcctattggtcaagatctctctcattgggtaacagcaaggatcaattatgataatagagaaaaatattttcatgagaatatttcatttagtggaaatacattagaaaataatcggttaaattataaccttaatttttctaaaaataataaagaacacttagattcatttaaaatttgttttaatggtagtgaatag

SEQ ID NO: 302375 - DNA, 441 bp, Proteus mirabilis
atgggagaagggcagattattgcaagtcagcttgcatatgcctattcaattatcggtaaagataatgcccaacgaaataaatcaattctgtcggaaatacaaaaacagaactatgtgcaatacgatgataacacttactttaaaatcctaaaacaagggaaacctgtggattcaattgcaggtaaaacagttgttttcgctatgcatgaacaattaactgatggtacagtaacacttaattatgacaaagctaagccgttaattttaccataccgccaacttccactgcctcttaatacttttgttgctaaagcaggcttaaatggcaaagctaaaatttatattaaacctgatggcgggtatgggaaagatggtatcccagggcaagtacctccagaatcgatgtctatagtgacaattgaaattttagctatcaaatag

SEQ ID NO: 302376 - DNA, 456 bp, Proteus mirabilis
  misc_feature (444)..(453): n is a, c, g, or t
atgcaagataaaaaatttagaaatgacattaatgggttgcgagctattgctgttttggctgtgatgttgtttcactttgttccatcatctctccccggtggatttgctggtgttgatgttttttttgttatatctggttttttgatgacctcaataatttttagaggattaaaaaataataacttttctttatggaatttcttaaaagcaagagctaggcggatagttccggcattagtaactgtcatatcaatagtattagcacttggttatcttttcttcgagccactaacatatcaattagcaggtaaacatggatattctagtttactttttatatctaatattacttatgccaaggaagcaggatattttgattccgattcacttagtaaaatatttttgcatacatggtcactatcagtagagtggcaattttatatnnnnnnnnnntaa

SEQ ID NO: 302377 - DNA, 1542 bp, Proteus mirabilis
atggaacgattaacacgaattcgccaaaatccagaagctataccagccctcaacgcttattacaaagataatccagctcaatttattattgattggggaatgacgtatgacccacgaaaccctgagagaggattaccgtcatatatcccatttttattatttcctcgacaagaggaatggattgaatggtttatcgaacgatggaaagggcaagagcctggtattacagaaaagacgcgtgatatgggtatgagttggctaacggtcggcttatcttgcactgtatgtaatttcaatcgtggtattagtgtcggcataggtagtcgtaaagaagagtatgtcgataaaatcggggtacctaaatcactgttagagaaagcccgtatctttatgtcttatctgccggctgaatttcgttttggttggaatagaaacaaagacgcaccacacatgagaataaaatttcctcatactgactcaatcatatcgggtgagtgtggtgatggtattgggagaggggatcgcgtaagtttttatattgttgatgaatccgctttcctcgaacggccatctcttattgacgcttctttatcagccacaactaactgcagacaagatatttcaacgccaaatggaaatgctaatagcttcgctatccgtaggcatagcggaaaaataccagtatttacattccactggagagaagacccaaggaaagaccaagcatggtacgacaagcaggttgaagttttagatcccgttacagtcgctcaagaaatagatatagattacaacgcatccgttgaaggggtgattattccttctgcatggatacagtctgcaatagatgcacatatcaagttgggaattgaaccaacaggtaagcgccttggtgctcttgacgtagctgacgaaggtatagataaaaatgcctttgtatcaggtaaaggaatattggtagatgcttgtgaagagtggagtgggaaaggtgctgatatctaccaaaccgtggttaaggcaatcaatttagccagtgattatggttgtagtgaggttctatatgatgctgatggtattggtgccggttgtcgtggtgattcaagacaagtcaatgaagaacggaagttagctggtttaaatcctgttaccttttctgcttacaaaggaagttctggtgtactaaatccggataaggttttaatgaaagatgccagcggtagaaatattacgaataaggactttttccaaaactttaaatctcaatcttggtggcatttgcggacattgtttttaaatacccatagagcggttaatggtatgaaatatgatcctgatgagattatttcgttatcttcaaagatgtcatctttatcgagattaacttccgaactctgccagccaacgtacacaaaaaactcagcaggtaaaatcgtcgttgataaaaaacctaacggtgctaagtctcccaactgcgctgatggcttagtcattcttaaatctcctgagaaaagaagcggtagtttcttcacaactaagaggtaa

SEQ ID NO: 302378 - DNA, 1125 bp, Proteus mirabilis
atgaatttatttgacctaaaacccaaaaatgtattacataaaaattttaaatatttagttgaacgaaaagaactcgctccggtgagagatgttattcaatcatggggagaaggacttttagatagaaacaatgaaaaagaaaaatttctgaatgaatttcaaaccacctttaattcatctttttgggaattatatttaaataaggcattcaaagagctaggatttaatatcgactactctaaagaaagtcctgatttttgtttaagtaccgccgatgggtatactctgaatattgaagctgttgtagctgatacacctacaaatatactggcttcctatgatccctccctaaaattacttagtgacgataaattcatcgatgaatgtacaataaaactccttggaagacttaaaagtaaattagacctcttcaaaggagtcaacggaaaaaaacatccttacaattcacttgaacatgtaaagggtaatccattcgtagttgcggtagctcctttcaataatgaattttctttttctcaaaacaatatatctattaatcaagttttgtttggaatagatagacccaaacttaacaataatggtagttgggatattgctaaaaaggaaaatgtcataaagccttctggtacaacactagagcttggtatttttacaaatgattcatttaaagaaatcagtgctgtaatattttcatctacaggtatgttgggaaaagcaataattgaaagtggcattcctacttatatcaaagctacccgttatcgacaaatatacaaatatgatttttatagagataaaaattcaaaccatttaggtacaaaacattatcaattaacaccaactcatgatttattctctcttagattcataaatggtaattttatttgtggttctgatactcatctttgtaagtcggatgaatatagagaatcacatttagatggcttacatatatattttaacccatatgcaacagttcctttagatcctgatgtttttggccattatgatattacacataatttttttgatattgaacgtcaagaatgcattatggaacatcacgaccaatcattggtttcacggcaaattattggtttttga

SEQ ID NO: 302379 - DNA, 330 bp, Proteus mirabilis
gtgggtggttacggttacgatgaaacattagatccaaatcctgattgcccgcgctgtaacggtgctggtattggtcgtgcgtattttcatgatacacgtgatttaacagggccagctcgtcgagtgtttgctggcgtgaaagaagggaagtttggtgttgaggtgattactcgtaatcaagatgaagctcttaagatggttgcacagcatttaggtatgctgaagaacaagacggaattaacgggtgccgatggtggacctatcaaaacagagatagctaacttgtcacctcaagaagcatctgacgcatataagcaaatcatgggataa

SEQ ID NO: 302380 - DNA, 681 bp, Proteus mirabilis
atgactaagcgtttactcacgatggggatcgcagaccttgagtcggcagataagagcattatcaatgaaaacatgctctattttatggagatgcgcgataactacggtgtgcaaatgacgggcagtggtgacactgttcaacagttcgacacctcattagcggatttagacgccacgattatgacgcaatatcagctggtggcatcggcttccaatgtaccggcaacaaagctattaggtactacaccgaaaggctttaactcaacaggggaatacgaagaggctaattaccgcgaagagcttgaaagtatccaatcaaacgaccttgaagatctattacagcgtcattacgacatgttaatgcgtagcgatggtttacctgtgacagaaatctctatcacatgggcgccacttgatagcccgacggctgttgagagtgcggatattgaactgaaagaagcgcagaccgatgtggcactggcttcgacgggtgcgatagatgggttagatatccgtaaaaaactggccagcaataaagagtccagctattacggcattgaagtgaacgaggcagattatgtcgaggcgaatacgagtacgaacgaagcgagcgcaatgggcaatttcgcgtcaagcggtcatgaaggggaaacctctgcagtattcagtcgccccagctag

SEQ ID NO: 302381 - DNA, 210 bp, Proteus mirabilis; identical to SEQ ID NO: 297314

SEQ ID NO: 302382 - DNA, 534 bp, Proteus mirabilis
atgttgcctgatagcatgagaggatttgcacctacgataaagggtattgcgaatagcaatgctattgttacagtcaagcagaatggttttgttatttatcaaatttctgtacctccaggtgcatttgaaataaaagatctctatgccacatcaagtagcggtaatttagatgtcacaatcaaagagaataacggtaaaattacacaatttgttgtaccttattcaaatgtgcctattttacaacgtgaaggacgcttaaaatacgaattgattggaggggaatttcgtagcggagcagattatcaagataaacctaattttggtcaattaagtttagtatatggcttaccttataatatgacgttatatggaggaagccaattttcaaataattatcaagcctatgcgattggtttaggtggtaatctaggcacctttggggcgatatcagcagatgtaatacaggcgaatagtatattgccaaacgatgagcataaaaaagggcagtcattccgattactttatgctaaataa

SEQ ID NO: 302383 - DNA, 270 bp, Proteus mirabilis
gtggtgacaccgtttatcgtgaagaatggacaggtggttattcatgaagccttaatggataaagcgtggatacaaaaattagtggtactcgattattttaaatcatcaggatttgataaagggaatggctttttattggatgctaaaaacaatgtttttcgctttacgagtggtaatggagggacaacattaaccaatcaaaatttatatgtaaaagacgaaactgggtataatgttgttattattggtgatatcacaaatgagcgataa

SEQ ID NO: 302384 - DNA, 456 bp, Proteus mirabilis
atgaattttgatatcaacattatcagagctgaaattgaggactgggctgtagaacaagggcaagaacatgttgctattgagattagccgagcttacttacgattagtgattaatcaagaacatggtcgattacatgccattgaggatcaaacgggtaaggcagactggaaagcaatcaataataaccggcaacagatattccgttggttacgtggtgattctcgcgcatctcaaagaaaaattgctgagttaatgccagcgattgaaatggctctaccggcttcgaggttagctcgagtacgcggagataccaaaaactatttagcaactgtagccattcagcgttttgctgatgctatgactgaaatcttattagagggtcgtgacatgtcacaccaaataaacaatgtagtacgcgcactaaatgagatatcacgcccgaccagcgtgcattaa

SEQ ID NO: 302385 - DNA, 390 bp, Proteus mirabilis
atgtctaaatcggcaaaaggtacgacagaacggcatggacggaatgtaaaagctaaatctggtttaaaccgctcaatactggagcagggctggtatgaaatgcgccgtcagcttgagtacaagcagctctggcgaggaggtcaggtactggcaatacctcctgcctataccagtcagaagtgcgcttgctgtggtcatacagcaaaggaaaaccgccagtcacaaagtcaattcgagtgccttgaatgtggatatacagcgaatgctgatatcaacggggcacgtaacattttagcggcaggacatgccgtgcttgcctgtggagggagggtgcagtcagaccgcccgtcgaagcaggaatccgccgaggtgattcagacatcagtctga

SEQ ID NO: 302386 - DNA, 270 bp, Proteus mirabilis
atgcgcatggacaaattaaccaatgctacctacggaacagctggcttaactgccttttttgcaagtctctcattgtatgaatggggctttgtaatagggatgggatttagcatgcttcttggattagcaacttatctgatgacacggcgagaacagcgaaaacgaacagcattatttgctgaattggttcatcgaaattgttctagtgatccgcgagaaatcgaaaaaatagtcggtgagatgctgactaaagctaaaaaggacatctaa

SEQ ID NO: 302387 - DNA, 159 bp, Proteus mirabilis
atgcaatggaagtctttaatcatcatcgtcggttttattcttacattactcatctcggtcgctagtggcatttatctctcaattgataattcatgtattaacgataaagcaagcttagacaaacgctgtcagattgctctctcacatcatcggtactaa

SEQ ID NO: 302388 - DNA, 1350 bp, Proteus mirabilis
atggggagtaaatggcaacaaatacctttaggtcaattgatctccttacaaagaggtcatgatctacccacacaaaatagagtcaatggtcaaatacctgtcatgggttcctctggattaactggatggcacaatgtgtcaaaatgtacaggccctggggttgtgattggccgtagtgggaattcaatgggggtagtaagttattctgattcggatttttggcctctgaatacgtgcttatatgtaacagatttcaaagggaatgatgaaaaatatatttattatatgcttcaacagattgattttgataaatttaattcaggtagtgcacaaaaatctctaaatagaaatgcagtttatccatacaatgtgatggcaaccattgatatagaagaacaaaaaagtataggtaagatccttgctaattttgaagacaaaatcaccctcaaccgccaaatcaaccaaaccctagaacaaatggcgcaaaccctatttaaatcatggtttgtagattttgatcctgtggttgataacgcactagatgctggtttttttgagcaggatttaggcttctctgatgaattactgcatcgggttgaaatacgtaaagctgtgcgtgaaagtggtaattttaaaccgttatcagaggatattaggcggttatttcctgattcttttgaagagtgtgcagagtctgcgttgggacttggtggttgggtgccgaagagatggcaaatatcaacagtagatgatgaacttactgtaaaaggtggttctaccccaagcactgcaaatccagaattttgggagagggggaatattcactggacatctccaaaagacctttccggtagccaagagaaaataatgctcgatacagagcgaaaaatcactgaacttggactaagaaaaatcacatctggattacttcctatcaatacagtattgatgtcttcacgagcccctattggctaccttgctatggcaaaaattccagttgcgattaatcagggatatattgcaattactacaacaaaaagactttcacaggagtatgtcctttattggttggattcttcgatggatgaaattaaagggatcgctggtggtacaacctttgctgaaatcagtaagaaaacgtttaagagtatctcaatgattatacctgattctcaagtgattgagaaatatacagttataattaaaagttatcttaataaagcaacgttaaatgcaaaagagaggggaggcttagaaaaactccgcgacacactcctcccaaaacttatctccggcgagttgtctttgagtgatataaaaatagatattccagaagaaacactcatctaa

SEQ ID NO: 302389 - DNA, 156 bp, Proteus mirabilis
atgttatttaaaacaacaccgtctatttctcttgaagtaaatcaaaattcaatggtgattaatttatctggatttagtgctgaggatgcaataaaaattattcaggctctcgtatcagaacaagtaaagcatccattgttaccgcctcacccttga

SEQ ID NO: 302390 - DNA, 228 bp, Proteus mirabilis
gtgaaattaataaaagtgctttgtcctgcatgttcagcaaaagcgaagatccattacattaaaatgaaaggcgaaaacaatgaccctgaattgtattgtgcttgtaatgacttggagtgtggcatgacgtttgttttagatgtcactttttcacacacattgaatcccagtaaattaatgcaatctcgtccttccattgaacaaggagaaaatagtcatgttatttaa

SEQ ID NO: 302391 - DNA, 2703 bp, Proteus mirabilis
atgactcagactcatttttcagtagaaactccctctgtcagcgacattgtgaaagcgtcacaagggcgctggctctatatcctagcgaatctcggtattaccgtacctgataatcataaacacggtgcatgtcctaaatgtggcggtaaagaccgatttcgttttgatgataagaacggcaaaggcacatggttttgtaaccaatgtggtcacggtgacgggttagatttagtcaagttggtaacagggaaaaagacgaaaacagcgtgtcaggaagtgagtaaaataattttattacccacatttaaagaaatagcgccaaccccgattaaaaaagttagcgctaagaaaggcattgaacattatgaaaaaataaaagcattctcctctttaggtgaaagtcagtatttaatcaataaagggttcgccaaccatcaatgcttaataactcgccaacagtatacacagggtgagtttagctttccagtgggctctttattgcttccgttggttgatactgattcggtgattaaaggcgggcaactgattagcctaaacggtgaaaaaagtctgttatcaggctcaactctttcgggctcttttattatcgttcgccagccagagaagaagcctttagagcaaatcgttattacagaaggctttgccacgggattaagtctctcaaaatgccttgatgcgctcattgtggcgagtgtttccgcgactaacttagtgaaagtcgctcaacagctacgggcgcaataccctgacgcgaagataattatcgcaggggataatgactttgtggatggtaaagacaacacgggaaaaatgtgggcggagcgtgcagggaaagcggttgacggatgggtgacattaccgccaacgcactataaagccgattgggatgatttccgacaagaaaatagccttgaaaaactcaaagaagcgttctttgaggaaatgacgtattacggcaaagaccgtactcgcttaccgcaaggttttcgtcttacgcaagaatatctgtggtttgataaacaaatcactaaatcagacggtgatatcgaagtcagaaacatcaaaatcagcagtccaataaaagttaccgcgattacgtgtgatgcagatgggagtaactacgggcgcttattggaatgggaagacacttacggtaattgccgtaaatgggcaatgcccatggagatgttaagcggaagtggagaagaattgcgccgtgtacttttggtaaacggattatcttatatcaatatctcaggacaggcgcgcgcccatttaatggagtatatctccctttgtcgtccagaaagaaaagttacctgtgtaaataaaacaggttggcatggcaatgtgtacgttctgcaagatgaagtggtcggcaacggggcggactcggtaattttacaaacatccagtgttcaaggtaaagactttagagtctcaggtacaagcgaacaatggcgtgagcatattggcaaatattgtgtcggtaatgcccgccttgccttttcagtgagccttgcctttgcttcccctttattacggttagcaggtgtaggcggtggcggttatcacttaaaaggtgaatccacagacggtaaaacaaccacaatgaaagtggcatcgtcagtgtgtggcggtacggattattggtatacatggcgtgctacggggaatgcccttgaaggaacggcttgccgtcgtaatgatgccacgttgatgttagatgaaatcagggaaatagacggacgcgaagcgggtaacattgcttatatgctggcaaacggacaaggaaaagcccgcgccaaaacagacggcagtgtccgtgagactaaccgttggaatctcttattcctatcaacaggggaactctcgcttgttgaacacgcctcaaacgcaggcgaacgcacttatgcaggggttgaagtgcggatgatacaaattccgagtgactccggtaaatacggtgtttttgaagacttacaccactttaccagtggtaaagcgattgccgaataccttgaacatgccgtcacacgctatcacggaacgccctttcgtgattggctcaaatacatcactaacaatttatctgatgtgtcgaataccgctaaagccttattgaaagagtacaccacaaaattgatgcctgaaaatgcagggaatcaagtggggcgcgctattacacgctttgcattagtggctatggcgggagaaatggccacgcgtgcaggtattacaggctggaaagaaggcgaagcgtttatatcggcgaagaaatgcttatccgcatggatgaaagaacgcgggcacaccgcaaatcaggaagatatgaccgcattggagcaagtcagtgattttatttctcgtcatcaatttagccgttttgcggattggtacgatgaatacagccgacctgcaagcatgatgggttttaggcgtgttgaaaaagacacgggtaacggtgaaagcagtatcaccttttatgtattacccaccgcatggaaagaaatttgcaagggatttgatgcccgtaaagtggtgcgtttgtgtgttgaaaaagggtggcttgaaacgggtaaggatggaaaaacgcaaaccagtattcgcctgccagaaataggtgttaaacgggtttatgtctttaatagcgacgttttaggctgttccgaaatagagtaa

SEQ ID NO: 302392 - DNA, 231 bp, Proteus mirabilis
atgaaaaacggcttatctcaattgactacgctgtcttctgcgggtgaaaagcaactcattcgcacggcacaagttaccgcatttatttctgaacttttagtcagccacagcatgacaggaagcgaagttgtgtcttgtgaaggtatgggcgcactgatggagtgtctttctgaacaaatagaatccattattcaagaaagcagtttaatgacggaggagattaagtcatga

SEQ ID NO: 302393 - DNA, 507 bp, Proteus mirabilis
gtgttgcatacctttaaatggatgggctatattgttgactcgttagcaaaatctaacgtcaggcgtggaaacctgaatcagttactggcgacacatgacgcgccacgcgtctttttttgtgtctatatcaacaatgcctaccttatggcgaattgcgcctatacagattctatggtggcgttgttagggcagtcctcggactggctggattccagtaactccagtatttccacccctgataacgtcaccgcccttactgagcgtggaaactctggcggtgactccttaactaagttactggagatcatcatcatgatggctatccctacccctactcaaatcaaattcctctttttgagtgttaaacgcgcagataccacggctaaaccttgtcgtctggaagtaacagcatctaatgaacatgatgcccgtttgtctctctctcgtgattatgttttgtcatttgcggggcaaattcctttgcacacaagagggaatgcacaatga

SEQ ID NO: 302394 - DNA, 534 bp, Proteus mirabilis
atgagtgataaaaacacatctcagttaacaaccagttggatatgtgttgcaactgcggggcttacgagtatggataagcgaaaaatcgaggcgaaatggctgaccgatatcgctgaatattatgaccccagttactacaccgcattaatttgggaagagcataaccgcaatctggataacctaggcgaagtgctcgatgccaaagtggataccgttgacggtgaaacaaagctctacgttcgtttaagaccgaatggcaagctacttagctataacgcacaaggacaaaagctgttttgttcaattgaggtagaagaagattttcaaggcaaagggatattttatttaggtgggcttgccgtcacggatagccccgccagtgtaggaacggataggcttcaatttagtatcaatcgggcacatttttcccgaagaaaacgtaagttgagtttaagttcaccttccgtttttcatttagataaaggcttgaagcaagctaaaaacctctggttttccgctatctctgcgggttaa

SEQ ID NO: 302395 - DNA, 1017 bp, Proteus mirabilis
atgtcttatattgcacctcaaggcgcaagggcttttcacgagaatttcacccgtggcgtaaagtatttatcttcagcgcgtcgttatttttcattatcagaaccgtcaacgaatttaattcgtgtggcgttaatggattccaattggttaattaatcaattaacgcttgctgatgttgatgaagctaaaggggataccgttaatttaggggataattcactgcatacggggcgagaagttgaaagtcgtttctataaaaatgtcgcctttgcgggaacaccttttgcgttagaagaagtggatacctgctgttcgctcacgtatcaacaattatctttaatttgcaatagtggcagtggagatgatgaccatatcaataaatccatgtccgattatatgtcaaaagcggttgctttagatatgttacgcattggctttaatggtcacttttgtaactatccgaccaatccgcaaaaattccctaaagggcaagatgtcaatatcggttggcatgaaatcgccaaaaccacaaatgatggtgctcaaattattactgacaaaattaccttaggtaaggatggaaaatttcctaatttagatgcgttggtgaattacctcattatgcaaaaaattcccgaagaataccgcgaagacccgcgcttagtggtacttgtgggcgctgaattagcaggcatgtatcgcacatctttatttaatggcgctaacagcccatcggatttaaatgccagtcaaaaaatgctcagtacggttgcaggtcgtcttgctattgttcctccctttatgccagggcgacgcattgtggttactcgtcttgataatttgcatatctacacacaaacaggaagccgtcgctttagagctgagtttgttgatgaccgttcagtctatgagcatagctatttacgtaacgagggttatggcttaggtgatatcaatttgtatgctgcgattgatgaaagtgccattgagattgaggaaggagtctattccttatga

SEQ ID NO: 302396 - DNA, 1239 bp, Proteus mirabilis
atggaaatctacgtttatgctgattggactgaatcaactgaccctgtattagttggtacattacgatcatcagaaattagaggcaaagaacatttcagctttagttatgacaagacatggttaacctccgattatgtccgccagattgacccttctttaaaactattcgttggcgagcaacatgcgcaggacgataagaatttcaaaatatttctcgactcatgccctgatcgttggggtcgactattaatgcaacgcagagaagcggtggtggctaggcaagaaaaacggcgagcgaaaagcctatatgagacggattacttactaggcgttcacgattcatttcgcatgggagcactgcgctttcgtacatctccaaatggtccatttttagatgataaccatgagcttgcagcacccacaataaccagtttacccgagctacaacatgccgccaataaaatcgaagaaactccggatttagataatccagattatctgaagtggctcaatatgttgatctcaccgggatcatcactaggcggagccagaccaaaggcatcaataagaaatcacgacgatagtttgtggttagctaagttccctagccgtcacgatgattacgatattggcttatgggagttcattgtttatcaaatggctattgaatctgggatcgaaatggctgaatcaaaagctgaggctattggcaaacatcatatttttttaacaaaaagattcgaccgtaccaaaacaggaaagcgactacacttcagttcagcgatgactcaactagagtactttgatggtcaggataatggcgcaagttacttagagctggctgagtttctgatccaaaacggctcgaatactcagtcagatcttgaacaactttggactagaatactgtttaatatcatggtatctaattgtgatgatcatcttagaaatcacggattcattctagagcctactggttggcgactatctcccgcctacgatattaaccctatgttatacgcctatggtctacaccttaatattgatgacgtcagcaatgcgctttctaccgacttggcatttgacgtcgcagagtattttcacgttaccaaaagtaaagcgaagtccatataccaaagattgttcaaagcaatttcacaatgggaaagccttgcccaacaagcgggtatctgcaaagaagaaagagaattattgagggactgctttcgactcgactag

SEQ ID NO: 302397 - DNA, 2418 bp, Proteus mirabilis
atgagcaatcagtccgatcatcatagtattaagccaatttccggtgatataagtcgtcgccattttattcaagcgagttcggcattagtcacactgccctttttttcctccaacacgatggcggcaacacaagatcatgcaatagctgaaaaaacgattgacgccaaagagagtgagcgtgttgtctctacctgtagtagttttgactgtggcggaaaatgtgatattcgcgcgcacgttaaagatggcaaagtgacacgtattagcactcgacctgacgccgatttagatgaagagatgcctatcatgcgagcctgtgtacggggtcgtggttatcgtaaatttgtctatcatcctgatcgattaaaatatcccatgaagcgagtaggtaagcgtggtgaaggtcgatttgagcgcatcacttgggaagaagctacgacgcttattgcacaaaatatgcaacgcattaccaagcaatatggccctgcctcacgttttgtcagtttaagcactggggtgactggtggcattttttctggtgctaatatgctacgccgtctgtttaacctaaccggcggctttctggagaattatcactccgtgagtaatggtaacacccttgccgttaccccttatacttacggtacagccgctagcggaagtacattagatacattagcaaatacccctttagttattctatggggacataatcctaatgaaactatttttgggcattccaatcattacttccaaaaaatgaaaaaaaacggcactaaatttattgtcgttgatccacgttattccgatactgcctcttctttagctgaccagtggatcccgctgttaccgaccactgataacgcgatgatggatgccatgatgtatgtcattgtcagtgaaaacctgcatgatcaggcctttatcgacaaatacacccttggtttcgatgagcatcagatgccagaaggcgttggtgaaaatgagtctttagttgcctatttaatggggaagaaagacgggatcaagaaaacccctgaatgggcggagcctatcactaaagtacccgcagatactattcgtcaattagcccgtgaatatgcttctacaaaaccggcagcattaatccaaggttggggaccacaacgtcatatttgtggtgaacggacggcacgcggtgcgacactgttagcgactattaccggcaacgttggtgtacgcggtggctgggcggcaggctatggcatggcattaaactctgagttacgtaaaaccattgccggcccaagtttattgaccaatcccgttaaagcaaaaatcaatatcaccaattgggtgcaagcgtgcgaagataaaaatttggtcacaccacaaaatggcttactcaatgccgagaaacttgatactgaaatcaagatgattttctcaatggcgggtaattatatggtgaatcaaaataccgatattcttcatgccgctaaagtgcttgaagatgaatcaaaagttgaatttatcgtctgtagcgacctctatttaacacctagcgccaaatatgcggatatcttactgcctgaaaccagctttttagagcgctggaatattggaggcacatggagttatggcgattatattattctgtccgaaaaagtgatagagccagagtttgaacgtcgtaccgactacgattggttacgtgaagtggctgataaactgggggtcggtgaacaatttagcgaaggtaaagccactgatcgcgactggattgaatatttagtcaatgatgccagtattaaacgtcctgaagatggtattcctacctttgatgaattattggttaaacgtcgtcatctgctaaaacatcgccctcatacccaaaatgttgcgtttgagaaaaatattcaagatatagaaaataatccatttccaaccccatcaggaaagattgagatcttctctaaacgcttatatgagatgaataatagcgagatccccgcactttctcattatgtgcctgccattgaagggcccgaagatacgttaacagataaatttccactacaactcatcacgtggaaaggacgtaaccgcgcaaactcaacacaatttgctaatccttggctgcaagaagtacaacgtcaagaattatggatcaacccattagatgccgaagatagaaatatcaaacaaggcgataaagtcaaagtctataacgaccgtgggatcaccttagttcccgtcaaactcacacaacgcattatgcctggtgtcgttgctttacaagcaggtgcttggtggcaaccagataaacaaggtatcgatcaagggggatgtgccaacgtcttaacctcatcccgtagcaccgcaatggcacacggtaatgctcaccaaactttattggtcgaggtagtaaaagcatga

SEQ ID NO: 302398 - DNA, 762 bp, Proteus mirabilis
atggcacatttgttaattgtcaatgccgatgattttgggctgagtagagggcaaaattatggcattgttgaatgtcatcgtcatggcatagtgacatcaacgacagcgttggtgaatgctgaaggtattgagcatgctgcacaattatgcaaggagctacctcatcttggtgtcgggcttcattttacattgactatgggacagccgctgtctcctatcccttctttaacgcgtaatggggtgttaggtaaatggctatggcaaatggcagagcaagagcagttacctttagatgagatacgagtggagcttaatgcacaatatcagcgctttgttgagttgtttggttgtccccccgaccatatagacagccatcatcatgtgcatatgtttaaacaaattttccccatcgtggcagagtttgcacaacaaaaagcattaccgatacgtgttgatagactgttggcacaaaaagaaaatcttaatactcaaggggttattagtagtgatggttttgatagtcaattctatggtgatgaaatcagccaagccttgtttttaaagacactggatgacgctaaagcacgtggtgaacaatcgcttgaagtgatgacacatcctgcttttattgataatcctttacgtgcgagtggttactgtttccaacgtttaacggaattagaggtgttgacgcaatcatcgttaaaacaagcgattgctgagcgtggatatcaattaggtacttatcaagatttaatttaa

SEQ ID NO: 302399 - DNA, 615 bp, Proteus mirabilis
atggttggtgtagaaatttacacaaataataggctgatacaattaaccgataaactcgaaacaatatgtgttttgagaaaagcaactcctgatgaactaacgtcatcatcaggccctcatgatagctatccgagaatctatgcgttaaatagccaatggatggttgctccgatttccaaggtaagcatacctcaacacggagttggtcttgaagtttatgatgagcaagggaaaatgaaattttcatctcttgctaagttggtctgctttgagaaatattatgatgtcaatacggggagcgctggcaaaggctcattaagaatcgcaggcaaaagtggtcatcggtatggcatgattaagactcgctctatggggtattttcataatacaaacatacgaagctacatagaccctgacacgtgggatgaagtttggacattcaaaagatatagcgagcgttatgtcttggttgatgatgtgggagggttaacatttgagtatcgatacgagttcttaggagaagaggatggctggataagtatgcctccgagtcgagaaggttctggattaatggaacaagggcttatgatagacgtttcaatgttagaagattaa

SEQ ID NO: 302400 - DNA, 363 bp, Proteus mirabilis; identical to SEQ ID NO: 301378

SEQ ID NO: 302401 - DNA, 894 bp, Proteus mirabilis
atgcgcatgcgtaaactagcattatcattaatgattttaggggctgcaggagctgtgcaagcagaagaactcactggtaccttaaaaaaaatcaacgataacgatattattattgttggtcatcgtgaatcctctgttcctttttcatactacgataatcaacaaaaagtggtcggatattctcaagactattccaacctaattgttgaggcagtaaaagaaaaattaggcaaacctaacctacaagttcgccttatccctatcacttctcagaatcgaattccactattacaaaatggtacatttgactttgagtgtggctcaacgaccaataatctcgctcgccaacaacaagctgatttctcgaatactatttttattgttggtacacgtttacttgcgaaaaaagacagtggaattaaagattttgctgatcttgcgggcaaaaatgtggttgttacgtcaggcaccacatctgaaatgttactcaacaagctcaatgatgagaaaaaaatgaatatgcgcattattagcgcaaaagatcatggcgactcattccgtacacttgaatcagggcgtgccgttgcttttatgatggatgacgccttattagcgggtgaacgtgctaaagcgaaaaaacctgcgttatgggagattgtgggaacacctcaatcggaagaagcttatggctgtatgttacgcaaaggtgatacacaatttaagtcgttaattgatgaaaccattgctaatgcgcaaaaatctggcgcagcagaaaaatcgttcaatcgttggtttaatgccccaattccaccgaaaaacctcaatttagaattcactatctcggatgaaatgaaagcactgtttgcatcaccaaatgataaagcattgaactaa

SEQ ID NO: 302402 - DNA, 1038 bp, Proteus mirabilis
atgtatattgcatttaaccttttcttaaaagaagagttaatgcgatcacaaagaagtttattaagaccagaaattgaatttgttatagataaagctgaaagtttcgattttaataataaaacagtttattgttgttctaagaaaaaatatcactatgattttctggtattagccacaggatgtgttcctcgtcttgatagaattgaaggtttagctgaagctggaaatcatttttatcaatatgaagctgcacgaaaattagcagataaaattgctaccattgaaaaagggcgtgtatttatcacggtaactttccctgaaacgccaaatgtacctcaccaatgtggtattgcaccaatggaaacaaccttgatgctggatgaatttttacgtcagcgacgggtaagaagtaatatagaaattgtttatacctatcctaccgtagctcaactattaagaaattgtctttttatgcagcaagaagtttgtgaagtacttcctgcggtcttttctgaacgagatatcaaagcaaagcgtggttttacattaagtcatgttgatcctgataagaaaatcgcctattcgaaagaaggagaagcagagccttttgatatcttaatgagcacacctcctataacagcggtagaagccattcgtaatacaggattaagtgaatataacaatggtgaaggctggctaccgaccgatcctgaaacattacaggtatatgggttaaatcaagtttatgtgttaggtgatacggttgatttgcctattagtaaggccggtggtagctgtcataaccaagcgggggttatagctaataatatttgtggtgaactgcgttatggttatccggcagcaatttatgatgggcgagtacaagctgttgcccaaatgggattatcagcgggtatgccattacagtatgactataaacatgatgttattccaacacctccaacaaaactcggtggcatgttacgtaacggttataaccggggcttatattgggcaacggtcagaggattattgtag

SEQ ID NO: 302403 - DNA, 795 bp, Proteus mirabilis
atgatggaaaatcaacacactccattattatatggcaataacttgagctataaaatcggcaataaaactattcttgaggatgtttctattgcacttaataccggtgagcttgtcacaatcattggtccgaatggtgctgggaaatcatcattattacgtttattgaccggctatactcccccgacacaaggagaatgtttttttaaagggaaaacttactcacagtggaatagccaattattagcgcaaaaccgtgctgttatgcgacaaaacagccagctatcattctctttttctgtagaagaagtcgtcgctatgggaagagcaccacatgggcaaaaacataaacaaatcgcaatagaaaccgcgctattacaaaccaattgtttaaagctcaaaacaagagattaccgtcaattatcaggtggagaacaacaaagagtgcaacttgctagagtgcttgctcaactttggcaaccaacacctgagaatgttgcgctatttcttgatgaacccacatcggcacttgacctctaccaccagcaacaaagtttgcgtttattaaagcaactggtcaaaacacaaaatttgatggtgtgttgtgttctgcacgatctcaacctcgcctccctttatgctgatcgtattttattactgcatcagggaaaattagtttgcgaaggtacacctcaagatgtgctcaccgctgagaatattgaaaaatggtatggcgccgaggtcagtattaatactcatcctgaattatctcaacctcaagtttttttacgcccataa

SEQ ID NO: 302404 - DNA, 699 bp, Proteus mirabilis
atggagacggtagagaaaaagagtattgcagggcaacaaactgctatacaaacagatttttcaacacgtaatgcccttgctcgtatcattcgctgtctttttgcagaaaaattattggatgataataaactgcaagttttcaatgatgaaaataacgttaagtacccgctttctgatgggatacatatccttcaatttaatcaaacgaccgtttttcctgcaaataccgttattaatcgcggtgatattatccttaaatcaatggatggtcaccaccgaatggtgcaatcccatgaagaacttatggggatactgaaaaacgagcttagtttcacccctacaacggagggaataacaaaattcaataaagatgtagcaaacagtatccataatgatcgattagctagagcacatcggtcaaagtggcgggatatgatttctaatgagatggcacaagagggaacatcttgttttattgaatggataactcgtcattacagtcggcgtgatggtgcaacttttctcgatcagtggggcgctcttgaaggtcattcttattacccaacttggaagtctagacccggtttaagcgatgatgatattgtcgcactatcagctgaatttggtgcacgagttaatctgcgtatcgcagccatacaaaccgatatggtttattgtgagaagatgccccatatttag

SEQ ID NO: 302405 - DNA, 1725 bp, Proteus mirabilis
atgagtaagcaaacagttgcaacctatattgctaaagtgctccataatgcaggtgtgaaacgtatttggggggtgacgggcgattcattgaatggattaagtgatagcttgcgcaaaatgggtaccattgaatggatgggcacacgccatgaagaagtcgcggcttttgccgccggagcagaagcggctatcaatggtgaattagccgtttgtgccggctcctgcggaccaggtaacttacacttaattaatggactttttgattgtcatcgtaatcatgttcccgtattagcgattgctgctcatattccctctgctgaaattggtagtaattactttcaagaaactcatcctcaagagttatttcgtgaatgtagtcactattgtgaattagtctctaatcccgaccagatcccacaaattctggctatcgctatgcgcaccgctattttgaaaaagggtgttgcggtggtggtattacccggtgatgtagcgttaaaacccgctccagaagatgcccatgaaaattggtatccactacaatcaccactgattatgccgaatcgttttgaaatcgaaaaactgtctgaggcactgaataacgctaaaaatatcaccttaatgtgtggtgccggttgtgctcaagcacatgatgaagtggtgaaactagcacaaaccttaaaagcccctgttgtgcatgcactacgtggtaaagagtatcttgagtggaataatccatgtagcgtgggaatgacgggtcttatcggtttttcatcgggttatcacgcaatggagaatgccgatactttagtgctgttaggtactcaattcccttatcgcgctttctatcctgccaaagctaatattattcaaattgaccttaatccaagtagcattggctcacattgccatgtggatatggcttttgttggggatgtcaaagcaacccttaatgcattacaaccgcgattaaaagagaaaacagataccgcacatcttgatgcctcgttaaaacattatgctaaagcgcgcaaagatttagatgcattggctcaacctagtgagcgtgatttgatccaccctcagtatttagcacgtcgattaagtgaattagccaacgatgatgcggtatttacctgtgatgttggcacgccaacagtttgggcggcacgttacgtgaaaatgaatggtaaacgtcgtttaattggttcgtttaaccatggctcaatggcgaatgcgatggcgcaagctattggtattcaagcactggacagaaaacgtcaagttgtggcgatgtgcggtgacggtggttttaccatgttaatgggtgatttcatctcattggctcaaatgaacttaccggtgaaagtggtgatttttaataacagcgtattaggttttgtggcgatggaaatgaaagcggggggctatttgactgacggcaccgatttacataatcctgattttgccgctattgccaatgcggcgggaattaaaggtattcgcgttgagaaaggcgaagatcttgatgaagcattaaaaacagcctttgaacatgatggccctgttattgtggatgtggtaaccgcaaaacaagagctttccatgcctccggaaattaaatttgagcaggccaaaggttttagcttgtatatgatgaaagcgattattaatggtcgtggcgatgaaatagtgcaattagcgaaaaccaactggttgcgctaa

SEQ ID NO: 302406 - DNA, 1272 bp, Proteus mirabilis
atgacagataagcgcaaagatagctctgggaagcttctgtattgctctttctgcggtaaaagccagcatgaagtaaagaaattaatcgctggcccgtcggtttatatttgtgatgaatgtgtcgacctttgtgttgatattattcgtgaagaaataaaagaattagcacctcatcatgaacgcagtgaattgccaacgccacatgaaatccgtaaacatcttgatgattatgttatcggtcaggagctggcgaaaaaagtattggcagttgccgtttataatcactataaacgtctgcgtaatggcgataaagccgatggtgttgagctagggaaaagtaatatcctgctgattggcccgacaggtagtggtaaaacattattagcagaaacgttagcacgttatcttgatgtaccttttaccatggccgatgcgacaacgctaacagaagcgggctatgtaggggaagatgttgaaaacatcattcaaaaactactacaaaaatgcgattacgatgtgcaaaaagcacaacgtggtattgtttatattgatgaaattgacaaaatcactcgtaaatctgaaaacccatcaattacacgtgatgtttctggcgaaggtgtacagcaagcattattgaaattagttgaagggacagtagcttctgtacctcctcaaggcgggcgtaaacatccacagcaagaattcttacaagtagatacttcgaagatcctctttatttgtggtggtgcttttgccggactggataaagtagttgcgcaacgtctaaatacccattcaggtattggttttggtgcagaagtgaaaagccaaaatgagaaagcgagtgaaggggagttattagcgcaagttgaaccagaagatctgattaaatttggtctgatccctgaatttattggtcgtttgcctgttgttgcaacattaggtgagctcaatgaagatgcgttaattcaaattctgcaagagcctaaaaatgccctgactaaacagtatcaagcattgtttaaattagaaggtgtagatttagagttccgtaaagatgctttaaccgcgattgctaaaaaagcgatgtcgcgtaagacaggggcgcgtggtttacgttccattgtagaagctgcattacttgatacaatgtacgatcttccttcatttgaaaatgcagagaaagtggttattgatgaaaatgtaatcaatgggaaatctgaaccgctgattatatatagtcaacctgaaaatcaggcatcgggtgaataa

SEQ ID NO: 302407 - DNA, 474 bp, Proteus mirabilis
atgagcaaccaagaagatattttcagaatcacatactcttactatttaaatgaaatgcagagtgttttattggatcgtattgataaactcatttcatttttactaattgttcttggtagctccgttatggcttctggtttcaatttatttataacaggactatttattgcttccttgtctgcttttcagtttatctatcagcccggtaaggcgtcttacttagctaattcaagagctaaacagtatctttctttaaagataaatgcggaaagccaaaaactaaatgatgaagaagtccataaacagttaagcgatcttctacaaagcgatatttctacttttggtaccttatgtaatcccgcattcaaaagagcgtccattcaattaaagctagaggacgatactgaattatctaaacccgaatcatttgttgcttgggttgctggtgatttacccatatcccaacgtaactaa

SEQ ID NO: 302408 - DNA, 204 bp, Proteus mirabilis
atgacaactgaaccagtaatcataccgccagccaatttcactgatgcagatgttgttgcttggatgaaagagaaactatcgtctatcaaagtcctcggtgagttaaacgcaagacgtgaagagctggtggataaactagaaaaactggatgctgaaatagataagtgcagaatcaaaagcgctattcagatacaaattaaatga

SEQ ID NO: 302409 - DNA, 1488 bp, Proteus mirabilis
atgtctattaaacaaacacgctatgttgatattgcgagtgcggtgattggtgcctctactgcaccaatgcgtaaactgaccgcacgtattttttcaacaaaccctaaaattccagcagggaaagtactcgaatttacttctggtcaagttgatgcgtttctgggagctgattctccagaagcgcaatttgcccgccaatattttagttatgtgagtccggctcccgtcagcaagcctaaagagctacaaattgcctcttatgagccaatgggacgagcgccaacactctttggtggaccggttgccacactggataaattaaagctgattgaagagggtgagttaacgctggtgattggcgatgtgactaaaaaaatcagcaagctctctcttcaagacgtgacgtcctatagtgatattgcatctgtaattcaagcaaaactcaatgctgaaagtgagccacaatttgccagttgttatgtgacttttaatgctatggatagtgctttcttaatcagcggcggtgtgcaagaaaaagcgcagattagcgtcaacaactcacctcttgctgatgccttagggttaagtcagggacaaacttctgagggtaatgcatcacagactgcccttgaagcatttatggctgcagaagctatttctgactcatttggtagtgcaacatttttaaccgaactatctattgagcaaagtgtggaactggctgaatacgtagcaggtgaaaatgtcaaataccaactttatttatcggtgccagatcaacaagctgaaatgtacagcaaggcattaatgaataccgcatcgacagggttgaatttaaaaaccgaggaaaacttttttgtgcaagcgttgcctatggcgattatggcagcaacagattttgagcgtactaatgccaccacaaattacatgtatcgacaatttggtattacattcccatcgcaagttaccacagatatggtggccgatcgcttagataaattgcgcgtgaactattatggtgaaacggcggtatctggctctgagatcagtttctatcaacgtggttttttatgtggtaatggtgctaatccagtagatatgagcgtacatgccaatgagcaatggctaaaagcgtatattgcacagcagtggcttagtttattactgtcaacgcgcggtattcctgcgaataaagatggtgaagcaagagcgatgatgatcattgctggggcagtaacaaaggcattaaataacggcactattcaaacgggtaaagcattaacagaagtacaaaaaatcgcaattacagatgcggcaggtgatgatttagcgtggcacgatgtacaaaacaaaggttattggtacaacgctgaaatcgttgaacaaacagggccaggcaatttaccggaatacaccatgaaatatgtattgatttacggtaaaggcgattgggttcgtaaagttgaaggctcacataatttagtttaa

SEQ ID NO: 302410 - DNA, 4458 bp, Proteus mirabilis
atgattgaacgaggaaaatttcgctcattaacattgatcaactggaatgggttttttgctcgtacttttgatttagatgaattagtcacgactttatccggtggtaacggagcgggtaaatccaccaccatggcggcttttattaccgcgatgatccccgatctgactttacttcattttagaaataccactgaagccggttcaaccagtggctctcgtgataaaggattatatgggaaattacgcccgggagtttgttacgctgttttagatgtgattaattcccgccatttacgagctgtcgttggcgtacgcttacaacaagttgccggacgagataaaaaggttgatatcaaaccttttatgatccaagggctacctattgctgaaaatccaacagaaattttgacgcaagctgtcgatggacgccaagcacgtgttctaccacttaatgaattaaaagaaaaagtagaagcgatagaaggcgttgtttttagacaatttaactcgattactgatttccactctgtactctttgatttaggggttattccgaaacgtttacgctcagcaagcgatcgggcaaaattctatcgtcttattgaagcttcattatatggcggtatttcaagtgccatcactcgttctttacgcgactatttattacctgaaaatagcggagtaagaaaagccttccaagatatggaaggggcattacgtgaaaaccgcatgaccttagaagctattcgggtcactcaatccgatcgtgatctgtttaaacatttagttaccgaagcgacctcttatgttgccgcggactatatgcgtcatgctaatgaaagacgagtacaccttgatcaggctctatctttacgtaaagagttgtgggatcagcgtaaagcgattaacaatgaagcttatcgctttattgaaatgggcaaagagttagaagagcaacaagcgttatcggctgatttggaaacggattatcaagccgccagtgatagacttaatcttgtacaaaatgcggtgcgccaacaagaaaaaatcgatcgctatgttgcggatgttgaagaaatcacattccgtttagaagagcaaagtgaagttgttgaagaagcaacatcaaaaaaagaagagttggaagcgcgagttggatctgcggaagaagaagttgatgaactgaaaagtcaattggcagattatcaacaagcgttagatgttcaacaaacccgagctattcaatatcgtcaggcggtacaagcattagagcgtgcgaaagcacaatgtggcattgatgatttagatgaaaccaatgccgagctatgggctgaacgtattcaagcaaaaattcaatccatcacgcattcattactttctatggagcagaaactcggtgtttctgatgcggccaaaacgcaatttgatcaagcctataaattgatcacctcgattgttggggaagttgagcgtcaaaatgcgtggagtgtggctaaaagcgcattacgtgaatggtcatcacatcgccatcaagccgatcgtgttcaccctattcggatgcaattagctgaattagagcaacgtttacagcaaagaaataatgctgaacgtcaacttgcagagtttaataaacagtatggcaaaaatgttgagcctgatgatctatttactctacaagaagagctagaagcaaagattgaagagctgagcgattatgttagtgattctggcgaacagcgtatgcaaatgcgccaagagcttgatcaactaaaacaacaaattgaaaaattaagaaaacaagcgccagtttggtttgctgcacaagatgctttaacgcaactgtgtgaacaaacgcatcaatcttttgaaacaagcaatcaagttactgaatatatgcaacagttacttgagaaagagcgtgaagccacggttttgcgtgatgaaaccgctgctcgcaaacagcaaattgaagctcaaattgaacgattaagtcagcctagtggggctgaagatggccgattaattactttagcagaacgctttaacggggttttattatcggagatttacgatgatatcaccttagatgatgcgccttatttctcagcattatatggacctgcgcgccatgcgattgtggtacaagatctcagtgcgatcgaagagcagttagcttctttagaagattgcccggaagatctctattttattgaaggtgatccacaatcctttgatgatagcgtatttaatgcccaagagatggaaaaagcggtacttattaaaagttcagataggcagtggcgctattcacgttatccagaaattccattatttggccgtgcagcacgagaaaaccagctagaaatattatcccgtcaacgagatgagctgtcagagctatatgctacacaggcctttgatgtgcagaaaattcaacgtgcacaccatgcatttagccaatttgttgggcaacatatttcagtggcatttgatgccgatcctgaagaagatattcgccaattaaatcaacgtcgtaatgaattagagcgcgagttatcacaatatgaagagggcactcagcaacaacgtcagcattatgcgcaagccaaagagtcgctcaatttattaaataaactcattcctcaagtcaatttattattggacgaaacattaattgatcgtgttgaagagctacgtgaagagctttataacgcagaagagtcgatgcgttatttacagcgtcatgagaaagcattaactgcgttagagcctatagcctcgattttacaaagcgatccacaagagcatgatcaattaacacaagattatcaatacgcaaaagaagagcagcaacgttatcaacaacaagcatttttgctggtggaagtggttcagcgtcgtccacattttagttatagcgatgcggttgaaattgtcagtgaaaataacgatcttaatgaaaaattacgtcgtcgtttagaaatggctgaaacagagcgagcgacagcgagagagttatatcgtcaacagcaggcacaatgtgatcagtttaatcaagtactagcctcactaaaaagttcttttgataccaaatcagaactattaagagagcttgagcaagagatgaaagagactggcttgcaaattgatgcgggtgcagaagcgcgagccaaagagttacgtgatcaacgttatgctgcggtgagtgctaaccgtacgcgtattagccaacttgagcgtgatattgcgcttagtgaagctgaacgtgaaaatatggcgaagaaaattcgcaaattagaacgtgattatggccaaatgcgtgagcacgtcgtcagcgctaaagccagttggtgtgctgttatgcgtttagtgaaagaaaatggtatggagcgccgtttacatcgtcgtgactttgcctatctttcagcggatgagttacgttcaatgtcggataaggcgctaggtgcgttacgtcaggctgtggcggataatgaatatttacgggatgcattacgtcgctctgaagacgcaaaataccctgatcgtaaagtccaattctttattgcggtttaccaacatttaagagaacgcattcgacaagatattatcaaaaccgatgatccggttgatgctatcgaacagatggaaattgaattagctcgcttaaccgaagagctaaccagtcgtgaacaaaaactggcgatcagctctcgcagtgtggcaaatattattcgtaaaactatccaacgtgaacaaaatcgcattcgcatgctaaatcagggcttacaagcggtttcctttggtcaggttcgtggtgtacggttaaacgttaatattcgtgaaagccatcaaatcttactggatgtattatcggaagaagaagatagccaatatcaagatctatttaaaaaccaaaacctaaccttctctgaagcgatggcaaaactgtatcaacgcttaaatccacaggctgactttggtcagcgtatgccacaaacggtgggtgaagagctacttgattaccgtaactatcttgagatggaagttgaagttaatcgtgggccagaaggttggttaaaagcagaaagtggtgcgctatcaacaggtgaagccattggtacaggtatgtctatcttagtgatggtggttcaaagttgggaagaagaatcacgacgcttaagaggaaaagatatttcgccttgtcgtttgctcttccttgatgaagccgcacgtttagatgcgaaatctatcgcaaccctgtttgaactgtgtgaacgacttgatatgcaacttatcattgctgcaccagaaaatattagtccagaaaaaggcacaacttataaattagtgcgtaaagtatttaatggaagcgagcatgttcatgtggtcggattaaaaggctttgggcaacaaagtgaaaaagataaacatttatccgaaaatattgcagatagttga

SEQ ID NO: 302411 - DNA, 2799 bp, Proteus mirabilis
atgtatcgtaagttactgattatctcagtcagtttatcacttctgggttgtgcaacaggcacctcgtctgagcataccaataatgccctttcactgcgccccgatattcgccattttacgcttgataatggcttaaatgtctatttgctacaacgcccacaaacgggggttgaaatgcgtttactggtgaaaagtggctcggtacaagaagatgaaaaacaacttggctttgcccactttaccgagcatatggcctttaaaggcacgactcattttccgggaacaactgggtttaaacagcttgaaagcctaggaatgaagttggggagtcatgttaatgcggcaacgagcttaaactcaacaacctataaattatccctgcctaatgccaatccggcccaaataaaaacagggttgaggatcttatccgattgggcctttggcatgacatttgatcccgttgagtttgataaagagcgtccggtgatcgtcgaggagtggcgattacgccaaggtattggttttcgtattaatcgccaacttgaagagttacgttattatggcagtcgttatctagatcgtgatcccattggggacttagatatcgttaagcatggtgatgtcaaagaagcaaaacgttattacgatacttggtatcagcctgaaagaatggcattggtgttagtgggtaattttaatcaaggtgatgcgattgctgatattacccaaatgttcaatgcaaaaaatagtgaaaacaaaggcgttgactctccatcatggcaccgctttatcgacaataaagatttattagtaaagacgatttttgataaagagcaaggctcacgcattgtgcaattcactctacagcgtacactgcctgcaccattaaatagtcgccaaggtcaatatgatgatttaatggactcgttgtggctctccatcttaaaccagcgcttttcaaccattgttgataatgggttagtgccttccgtcagtgccaatacacaaggtgcgatgttagatgcccgtcgctcacaacaattgatgattgcccatcctaaaggggatgattatcaaggtacattagatattctatttactgaagtacagcgtttagcctcacagccagtatctcagcaagagttagataatgcccgcaatgcgctgttaaaacgtcttagccaacaagctgctggtgaagagcgctatgagcatggttatttagctaaccaaattactacggcacttgaattagaaatgccaatccaaagcaaaaagcaggcgttaaacttaagttatcaactaataaataacgttacacctgataccttaaaacactattttgcccaatacctaacacaagcttcaccacgagtggcaattatcggcccagatagtgatagtcaggtatttagtgccactaaagcctcgcaacgctggcaagagattagacaatctgatcccggtgcgtttacattgaaaacccatgcggtggtattagatattaaacctgagcaaaccggtactgttgtcaccacacaaacacttccgattgaaaaaacacagctgtggacactgagcaataacgtaaaagttattattaaaaatgaccagtggctaaaagacaatatccaagtatcactgcgtattcccggaggtgtttctctggaaacaggacaaagtttaggcttggttcagtgggcattaaacttaccagaagtgagtggatatgggcattacaacgcaagagagttagcgttatttagtaaacagcatcaaatcagtttgcgtccatacagtgagttgttattccacggcttgcgtggcgaagcgcctattgatgagttagacaccttgttggccttattgcatttaaaagtgacagcaccacaatttaatgggcaaaaattagagcaacaaaaacaagcaacggcattagggatcgccaaaacaccagttgaacgtattttcttagatcatattaataaagatagctatcaaaacggcgagcgcttagtgatttcgccacaaggcccttggcaacagtttaccgcccaacaattacaacaaacgaatcaatcacttctaggacagcctgccgatatggtattggtgattagtgggcctattaacctaaatcaggtcaaaccgatgatcgaacgttggatagcaacgctaccgacacgttcatcgcaacgtctattttgggctgatccggcgattaatcccaaattaagctcatttaataaaacctaccctattgccagtagcgataagagtatgatcagtattcaatacgcagccaaagcccaatggtcacaacagcaactgttagcacttaacttgcttgataccgttgtcagccaacgtttaaggcttaatcttcgtgaacgagcgggcgggatctactcgctaggcttttctgagtcattaaccaagctaccaagtagtttttataccggacgtttaaactttaccgcatcaccacagcgggcagatgaattaattgcacttgcgcgtaaagtggtcaatgacgtaaaacaagcgggtattaccgataaagaattacaagaggcaaaaaatatttggttaactgaatatgggcaagccaaagagagtgctagctattggactgatgcacttgctcaagtggcaacagatgaccaacaatatcaacgactattaactgagactgcgattgtcaacggaataagtgtcagtgatgttaatcaagttgctcgtcagtggttgggtgaaaatgaaaaaatcttcaaactaacaccgccaacaaagcaataa

SEQ ID NO: 302412 - DNA, 894 bp, Proteus mirabilis
atgagccagaaaaacactttaaaaggcgttttatgtgccctaggcgcctatttgatctggggtattgcccctgtctattttaaaagcattcaagaagtgcccgcagaagagatcttaacacaccgtattttatggtcattcttctttatgttgcttttaatgtcgatcactcgccattggccctatttacgccaacttgttcgtcagcccaaaaaagtactaatgttagcacttactgcggtgattattgccagtaactggcttatctatatatgggcggttaaccacggatttatgttagaagccagccttggttactttattaatccattagttaatgtgttattcggtatgatttttttaggcgagcgctttcgccgtatgcaatggttcgccgtaagtttagcctttactggcgtctttatccaattatggcaattcggctctgtacctgttatcggccttagtttagcagtcacattcggcctatatggactattacgtaaaaaacttggggtagatgcacaaacgggtatgacaatagaaacactgtggctgtttcctgttgctttagtttatatcctcttttttacccattcacccaccagcaatatgttagaaaatagctggtcgctaaatacattactgattgctgcaggggttatcaccaccgtacccttactgctctttaccgaagcagctcaacatttgcgtctatctaccctaggatttttccagtatataggacccacattgatgtttattctcgccactatggtgtatggagaacaaatcgatgcggagcgtttagtgacctttgggtttatttgggtcgcccttatcttatttactttagatgcactctacactcagcaacgtttaagacgaagttag

SEQ ID NO: 302413 - DNA, 837 bp, Proteus mirabilis
atgaataaagcccctttaatcgaagtcgataatctgtgtattgattttccacgtgctagagtggtgaataatgtctcctttcagttaggacaagagcggttagcgctggtgggtgaatctggttcaggaaaatcgatgacggcacgctcattaatgggcttagtgcgtaagccgggcaaagtttctgctgataaattgcattttatgggggacgatctcctcgcttattctcctaagcaatggaaccagttacgaggaaaaacaatatcaatggtattacaagatcctcgttatgcattaaacccagtgaaaaccatttatcagcaagtagaagaaacggtaaaactccatcaaaaattatcccataaagatcgacatgcattaattactgaaactttgctttccgtgggattaccggaacagagtatttctcgctaccccggtgaattatcgggcggtatggggcaacgcgcgatgatcgctattgcgctgattaataacccaacggtactgattgcggatgagccaacttccgcactagatgcacagctacgacatcaaatattagaacttatcattacccaatgcgcacaacgagatatggctttgttgttaattagccatgatctacctttagtggctgaatattgtgatcgtgttatggtcatgtatcaaggggagcaagtggatgaacttgaggcaaaagcattacctcaagccacacatccatacacccgcaccttatggacctgtcgccctaatgcgagtacctatggcacacaattaccggtattagatagaacactgaattttaaaggtacaccttatgctaattga

SEQ ID NO: 302414 - DNA, 2115 bp, Proteus mirabilis
atgcgctctctgtttgccagcacaggccgaggtctggaagaattattaaaaactgaacttgaacaccttggtgcccagtcttgccagattacgcaaggtggtgtctatttccgtgctgatgataaaaccatgtatcagtctttgctctggagccgtttagcttctcgcatcatgcttccgctaaatgaatttaatgtctacagtgatctagatttataccttggtgtgcaagcaattgattggagcgaagtatttacagttaatcatacttttgctattcactttaatggcactaatgatgtgatccgtaatagccaatatggtgcattaaaagcgaaagatgctatcgtcgattcattccaacgtaaaatagggcaacgaccggatgttgctaagcaatcaccggatattcgtttaactatacatctacataaagaaaaagcgtcattatctttagatctcagtggcgatggattacatcaacgtggttatcgtgacttaacagggcaagcaccgctaaaagagaatctagccgcagcgattattatgcgttcaggttggaaaaccgatacaccattaattgatcctatgtgtggctcaggtactttacttattgaagcggcaatgatggcgacggattgtgcccccgctttaaatcgagtccattggggttttcgtcattggttaggacataatgaagcgctatggaaagaagtcactcatgaagcatttgcccgcttccgtgaaggtaaaaagaatactcaagcgcgtttttatggtttcgatgtggataaacgcgtattagatatggcaagagctaacgcacgccgtgcggatgtggccgatttaattacttttacccaaggtgatgcagcaaaactgactaatccagtatccacgggtgttaaagggacgattattagtaacccgccttatggtgaacgtttagaaagtgaacccgcactcattgccttgcatagtcagttaggacgagcggtaaaagcccatttcccaggatggcgattatcactttttagtgcttctcctgaattgttaagctgtattcagttacgtgctgagcgtgaatttaaagctaaaaatggtccgttagattgtgtacaaaaaaactatttattatcagaaacaccttcgacgattaatacacgactggcggaagattttgctaaccgtttacgtaaaaatgagaaaaaactcgcaaaatgggcaaaacaacagcaaattgagtgttatcgcttatatgatgctgatttaccagaatataatgttgcggtagatcgctatggcgaaaaagtggtgatccaagagtatgcacctccaaaaaccattaatgaacataaagcacgtcagcgtttatttgatgtgattagtgccaccatggaggttttagcattacgctctgatcaactaattttaaaaactcgtcaacgccaaaaaggtaaacaacaatatgaaaaaatggcagagaagggtgatttctttttagttgatgagtttggtgccaaattctgggtgaatttaaccgactatctcgatactggactgtttttagatcaccgcattgcacgcaaaatgttaggtgaaatgagcaaaggaaaagactttttaaatctctttgcttataccggtagcgcgtcagtccatgctgggttggggggagctaaaagtaccacaacagtagatatgtcaaggacttatcttgaatgggctgagaaaaactttcaagcaaatggattatcaggtagacaacatcgtttaatgcaggcggattgcttacagtggctaagccaaagtaatgaacagtttgatgtgatttttatcgatcctccgacgttctctaattcaaaacgcatggaaaatacctttgatgtacaacgtgatcatattgaattaatgaaacatctaaagcgtttattaagaaaaggcggaacaattatgttctcaaataataaacgtggtttcaaaatggatcatgaagcattagcgaatattgggttaacagcaaaagagataacacaaaaaacgttatcgcaagattttgcacgtaaccgccaaatccacaattgctggctattaaatcatgctggtgaggaataa

SEQ ID NO: 302415 - DNA, 510 bp, Proteus mirabilis
atgaaaaataatcataataatattgagatcaatgatgctactttagtacagaatagtgccatgggggctttttttatatggtatttttgtttccagtaccaaaaatataaacaagattcaccgtccataatcttagcctttttggttctcccacttattctgcataaatccacagtaaaaataatttgtacaacaaacaaatcatcaggaattcatttattagcagggaaattggggaagcaaagagaaatattactatcgattcataccagagcctttcaacttcgttcccttactttagagtctatagggatagctgaactttctggattattaaaaattgagatagaaacaactagcctaatcgcacaaaacaaaaagaacaaactttctttacctttactatctgatgatttaaataagcttaaaacctgttgtgataaattagcatattggttttctgaagaatcagaacaacaaataatgagaacattaatggtggatttctaa

SEQ ID NO: 302416 - DNA, 1179 bp, Proteus mirabilis
atgcatgaaggaaaaacatcccaatcaaaatcaagtgccgcaggccaatatttagggtttgctctccagccagttcggttatgctactacttactgagtgctcctgatgatgcatgtgtttcactcgaatactacgatgatgtagcagtacactatgcaaacaatgacgtactactagagcaaacgaaaagcgccttagctcataaccctttaaccgattggtcggaagatttttggaaaacagtatctaactggctcgatatactcatagagcatgatatttgccacaatgcagcgaccttccgctactacgtaactcctttcaaacaaattggtacaatatgtacattatttaatgaagctaaaaaccaaattgacacagcagcgctaattgtcaaattaaaagaaagcctggagaaattgaagtcacctcccagatgtatgagttatatcaatcgttttctcaatgctactcagcaagaacaagaagcgatagcaacaaaaatgactattatcaataaagcagagcctataggcttaatccgtgagctcttaaaaccagcaattcctgataatctaattgaattaactatccaattcgccatcggaatggcaaaagaaaaagcagataacctgattcgaaacaaacaaaatgctatgatctctgttagagaattcagaaatgaatttttaacatttgtacaaaaaaataatattcctggttatcttccaagattaaactcacacattagtaaatcagatgctgaggaagttcttcagcaaaggcccgtatttataaaacagctacagttagttgattctcgtgaaagtcaacaactacatgcaatcagtgaccttctaaggacaaactctgatcttacaatttgggctgagcatgggttaatatttgagcaaaatattgatgattggcatgattcattaataagacattatgatgcaacatgtgatgaagtagatgtatgtttcagtgatacccctagcattgataaaggtaaaattatatacagccgttgttccacaaaaaatatatcccttgaccattacattatacctgattacttcacgaatggagggttcaatattttagctgatgaacttaaattaggctggcatccagattacattgagctcattgggaaaataaataatgaaaaataa

SEQ ID NO: 302417 - DNA, 366 bp, Proteus mirabilis
atgaaaaaactagaagtatttgatcccgcattatgttgtagcactggtgtttgtggaacagaagtcgatcaagcattggtagacttcgcaacagatgtggattggttaaaaaaacaaggggcaagtataaggcgttttaatttagcgcaagagcctatggagttcgttaacaacacaaaagcaaaaatatttttggaaaccgcaggtgccgagtcacttccactattgattctggatggtgagattgtgttgactggtcgatacccaaaacgacatgagctagccagatggtttggtattcgcctgaatattgaaaaagccgaaattgttaaatcgtgttgtggtaatggtaaaacgtgttgttaa
